United States Patent Application Publication US 2008/0114160 A1 - sequence listing, part 60

SEQ ID NO: 21059 - DNA, 11315 bp, Oryza sativa
aaaacttctcaaaaaagatccatcaaatgtgatataaatcatgacaataggtgagtctaaatcgcctaagctataactctcactatatcaaaataagcatataatcatgccgagagaatgacttacaaaaaccagtcatctcaataaaacccagacagcctttgcagcctaaaaagacttacaaaattagtataacacttttccgtcgagcacctttttatttgcatcgtagtaattccaaggaattatctaactgcgtcaaaaaggattttaacagcattgggttaaactgttgtgagcaaatgttgtcgaagcaaaatgcctaagtccctaaggatcacaactaaaccacgccgatagcaaaattgggctgaagtactgatttaggcccaggcccattagtactcccgataccctaataaaactaaaacctaagcgtcagttcgtcttccccgctgaaactcttgccactttccccattctctgctacagtgcaaaaccacaccgatggagctagggttcacagattcgctccaatccagccttcaaggctccacgaaaatctcccacacaaccaccgcatcaatctcccatccattcccagccatatttctaaccaaatcacatcatccaattcgcatccatggcggaagagagagagctttgagagccagtggacgccctccgacgtaacggaggaaaacctaaaggagatggtggcgcacggtgttcttccggccaaggagatcatcgggtggcgtccagcatacggcgaaatgtttccaacccacgacacacacgaggtggttgtattctcctatttcttttacggcgggttttctcttccaacctcaaacttcttccaaggaattctggatttctatggtattagtctgcatcacctaaaccccaattccatagtccacattgccaacttcatccacgcttgcgaagcttttctggggattaggctgcatttcgctctattccgccgcatcttctttctcaagccccagccaaacaagagcaaaccatgtgttgttgggggagccagttttcaactgagggggaccttgagccaaaaatacttctccatgccattcaagacctggaataaatgttggcatgcaaattggttctatgtacaaaaccccgagccagtgtttcctgggtactcttgtctgcctccggtatatcaagatacccggaattcgcttcccatgggggatgaggcagcccaagcacttgcactgatggattgcatgctgaggctcaaagagcagggtctgcaaggagaacagatcacccgacattttataaaaagccgactagggccaattaaagagagatcccgcacagcctttgaatttgacggcaagcatgaccccacccgtgaagatccagattcacttgagtttaaagtcatgaaggagagaatgtacaaaatcttctcgaatgctatcgtggtcagttattcgcacttgctgccagtagtgctatacaacgccttcaaccctcctccaccggtatgtcttatacaactcagcttttctcaaagcatacttttatcttctgtaaggtcaactgaaaactcggagtatcatgcacaggaattcgctttgatgaaatctgaccctccaattgctcaacgccattcaccccattggaagacaagccaggctagtggagggccaaaaatcaagcctgctaatcaacctgacacttcgaagttgactaatcaatctgactctcggaagaggaaattgatttcaagtgacgatgaaggtgatgatgcggaaaagacgggtaacaaaagggtgactggaaaacagtcaaagcaaaccaatccgaagaagaaaacgcccagtcgtcccatgccaaaaataaggaagtcatccaggtatgtatcatctagcaatttcttctgtttcgctagtcactcactattgaagcaaagctaatagcatgtctcaaatatgtagaaaaccatctgacatagatccctctggaaaagaccccacgtcaactgacacggagaccggtccttcagaagaaactggaccgactgccgaagaccgcctgggtaataatcaaccggcaaccgacaatgtagataccagcaacgagcccccgactggaaaccagtcggccgagactgaagtcagtgctgatcaggagcccccgactggaaaccagtcgggtatagaaccaaataaagatatcctagaagtagaagctcaagctaacaaccctcccaagacagacactggtgctagccctagaactaattctcctgttagggtgcaaggaactgctcgtcctcgaccggaaattatcacaggtaaacacatcctccgaacctgctttgatccaacaaactttcttcaattacttcacttattattcatgactatctaaggtccgatgatcggtgatgaagaagaggttctccggatacaatcggctgaagattctcgcccacccattttagtcaagtggtgggatgacgacatgcaaccacagggaattgtaataaataagcaaaaggaagatgaggaagtatgcctactgaaaaagacactcggccaagccactcgtcttgtaaatgtaagtctccatatatatagcctcaatcatcctgtcgatcaccttacttgaacaaagataaatttgtggtgcagagaatccatcttaggaatgaggcgaatactgcaacccttgaaaagttagttccccaccttggaacccttgaagccactagaaaccagctgcacgaagctaaagagcttgccaagaagactgagcatgatgtgagagaccggatcgccaagctccaagactccaactttgagctgagcggttcatcaaaaggtaaatatcatctttgtctgacttgtttcgtgttgctatccatgtgcatctgacaaatgaaaaacaatacagtgcaagcttctaagatatctgagctgaagaagcgaatccaagctctagagaaagacaaggccgaattggcaaaacagagggactcggctctgaaagatgtcgaaggtattggtagctgacacttcaaaaaccactctcatcttcatgcctagtcgttgatgtaaacctatttgtacaaatcgcaaaatcaaatcccaggctcaattcgatgtcttagttaacaaaatcaagaagcttgaaggagccagagataaagtcgccaatgccgctacgccactcgtccaggttcgagtttttcaataacaacggtccgagttcaattgatgttgtcgaaatcttcgacaaactgagaactgctccggacacctattttaagaatatcaaagaagctggatgcatgagagcgagcctggcgttggcaatgaccaagtccttgtacccgaagattgacatcgatgctgttgatggctttgcagacgggacaagcgaagaagccgcccttgacctcatcaatgatgcgaaaaaagctgctgacaagatagccactgatgtagttgagaggttccaggaaaacgacctcaggccaactgggtctgacaattctaatgatgaaaaaactgaaactgattaatgttgtattttgatgataatgatgatgatgatggaggcacaatttgtacaatactgataaatttatgctgtgctttatggtttgaacatagctccagatttcttaaaagtttttgtcaaaccttattgagcctagaaccctcaaaagtttttaaaaaactctcagtcctcattggctaagccaaaaaatcaaacaaggcaatgataaatcaagtaagcaaattgaattgataaaaatcacactccattattattatagtagcccccgactgataactcaagggacaacttgatgttaacagtcaaagaggaagatacaaaagtaatgcttaagcataaaaatgacgaagatgttcaatattccaagagttgtcgatatgagtaccatcttcacgcttgagtcggtaagaacctggccgagtgacttcagaaattatgaacggtccttcccacaagggagataacttgtgccgatcccgtgtagtttgaatttttctcagaaccaggtcgccgactaaaaaagctcgagatcgaacattgcagttgtgataacggcgtaacccttgtaagtaccgagctgactaaattaaggctgcctcacgggcttcttccagtcggttgagatcatctactcggtcttctccgtagcgattcaaattccacctcacttggcaacatcgcttccactccatagactaggaaaaacggcgactggcccgtagcccgactcggagtggtgcgcagggaccaaagtacagatggcaactgttctacgcatttgccagcatagggacgcagtcgatcaaaaactcgtgcttttattccttgaagtaccataccattggcgcgttcaacttgtccattactcatgggatgcgctacggaggcataacaaattttgatgccaaagtcctcacataaatctttaaatactctgcctgtgaattgagtgccgttatcagtgatgatccgattgggtaccccaaaccggtgcacaatgttgatgaagaaatctctagccttgtctgccgcgattgttataacttgtttggcttcaatccacttggaaaacttgtcaacagctacaaagagatgagtataaccacctactgcctttttaaatgggccgaccatgtcgagcccccaaaccgcgaacggccaagacaacgggatggtttgcaactcctgagccggtagatgagtttgtcgggcgaaaaattgacaaccctcacatgttcgcacaattttgtcagcgtcagacacggctgtgggccagaaaaaaccttgctggtaagccttgccaacgatggttcgtgtggcagcgtgattgtcgcagattcctgagtgtatatcctttaccaattgtcttccctcctccaaagacatacagcgttgtaggattcctgatggactttttttgtacagctcggtctcatgtatgacataaagtctgctgcgcctggagatccgctcggcttcatctttatcttgagggagttcttgttttgtcaaaaatcttatgaggggctctctccagtcggcttcaatcatgcttatgtcttgagtgtccatggcctcgattgtttctttccttggtacggttggctcgtagagatgttcacaaaacacgtcggaaggagctgcttctcgttttgaaccaaaattagccagtctatcggctgcctcattattgtgtcgaagaacatgggtgagctcaagtctatcgaatttgtcttccaacttgcgtacctcttgccggtaagcggttatgttatcatcaaggcaggaccactctttcatgacttgattaacaactaactaagaatctccacgaactaccagacgccgaatccccaaggagattgcaatccttagtccgtgaagaagcgcctcatattccgccacgttgtgagacgtagaaaaatgtatccacaatacgttgctcagcctctctccagtcagggaaattagaactactcccactctagtgcctgaaagcctcttcgacccgtcaaaatgcttagtccaatactccatcttctccgtgggcatgtcttcttggcactcagtctactcggcgacgaagtcagctaaagcttgagacttgatcgaagtttgcagcttgaaagatatatccaaagacatcaattctaagacccattttgcgatccgcccgtttgcttcgcgattgtgaagtatgtccccgagtggaaacgacgtaaccaccgtaaccgagttaccttggaagtagtgagataatttccttacggtaactaaaacaccatataatagcttttgaacctgagggtatcttgtcttggagtcagccaaaatctcgctaacgaagtagattggtcgttggactttttgaacatggccttcttcttcacgttcaacaaccaggactgtgcttacaacctgggaagttgccgacacgtataacaacagttgctcttgcggatgtggtgaagctaagactggtggagtagtgagaagttttttgaagtcttcaaaggcttttcgtgggtccccactggaaattgtcggttttctttaacagcttgaaaaaaggcatcccccgctccccgagtcgtgagacgaaccggctgagcgccgccatgcagccagttaacttttggacgtctttctgggagctcggcagtttcattttgaggatggcattgattttctccgggttggcttgtatgcctctatgggacaccataaatccaagcagcttccctgacggtactccgaagatgcacttttcagggtttaatttcatcctgaaagcgcggatgctctcaaaggtctcttctagatccacaatcaaatcatccttctgctttgtcttgacgactatgtcatccacataagcttcacgttgcggccgatctgagttgaaaaacatctctggatcatgcgttgataagttgctcctgcgttctttaatccaaaaggcatggtgatgtagcagtaggccccgaagggcgtgatgaatgaagtctttaagcagtcggattcctttagtcggatcggatgatatcccgagtagcaatccaaaaaactgagtagctcacagccggccgttgagtcaactacctggtcaatgcgaggtaacccaaaaggatctttgggacaagacttgttgaggtcggtgtaatcaacacacatgcgccattgccccgtcttcttctgaaccaggactgggttggccagccagtcgggatgaaggacttccttgatgaagcccgctgctaacagcttggtcaattctaccttgatcgcatccttcctatcctatgcgaaacggcggagtcgttgcttgattggtttagcgtcttccttgacatgtaaagagtgctcaatcacctctctaggaataccaggcatatcaaatggtttccacgcaaagatatctttattattttgaagaaaggtgatgagcgcgctttcctatttacaatctaactcagcgcctattacagcagtcttagtaggatcagaaggatctagaggaatcttcttggtcttggtgtcgcttgccccgctctttggcatcttggtcgcaggcacttctccttcgcttgctgtggacgcagccagtcggatttcttctcggtcgagcgtgatctcgcggaactgggccatctcgcagctttccttgtcacacgtgacggcttgcttgatgtcactccgcagggatatgactccttgaggaccaggcatcttcatcatcatgtaggtatagtgcgggacagccatgaacttggctaacatcgggcgtccgagtatggcgtgatacgctgtcctcaaaacaaatgttctctgtgtggaagttctcccaagtgccgaaagtaatgggaagagtgatctggctgagtggtgtagcagatagccctgagatgactccgtgaaagggcgcattactcggctttaattccatgcgagggatctgcatgtcgtccagagtcttgacgaaaaggatgttgagtgcactgccaccatcgatgagggatctgcgaagcttgacgttgcgaaccactgggtctagtaccagggggtaccgccctgggtggaccacacggtaaggatgatccaagcggtcaaacataattgttgtctctgaccaccgaagatattggggcgtgtcgggctgaatagcgttgatctcccgttcggttagcttttgctttctcttggattcataggacaggggtccgccaaagatgtggttgagttccttgcgatggtcttgaaaaccagtcggggcgtcaacttcatcatccttctttaacgtgctttgatctccgtcagaggccttgcgtgcattcttggcgtattgttctgcaaactgtttatagacgaagcaatctttggccgcgtgattggagtttggatgatgcggacattgggagttcatgatcttgtcagaagtgttgacccgtgaacgttgtcgggaggatggtgtagtagttgccacaagttccttgggtttacgcttgcgatccttgtgattggtacttccactcccccctgtagttggcgtatctttcttcggcttccaagtggtgcccgactgcttggacgcggtaatgacatcttctgcttgaccgtcctgggaggcttgcgcccgaacttgccgactaggtcatcatggcaaatgcccttggtgaaggcggcgatgatgacgtcgtcggtgatgtcggagatcttgttgcgttgctcggaaaaacgtcggatgtaatctcgaagggattctccagacttctaaacaacgttatagagatcaaactgtgtaccagggcattcaaaggtaccctggaagttggcgatgaagtggtcgcgaagttctgcccaagatccgattgtgccacggggtaagccgtgaagccaggaccgggcagagtccgctagggccacaggcaaatagtttgccatgactttgctatctcgtcctgctgcgcgaatagcgagaccgtagatggtgagccaagactccgggttagtggtgccgtcatacttctcgattccagtcggcttgaagccggctggccaatccactcgacgcaatttgcttgtgaaggcagcaactccatccacgtcgttgtcgtagcgatctagtgaatggtgggaagcgtattctcttgccgcgcagcgctggttgatagtatcgcgaagatcgacggggcgcctgcgatatgaggagcgaggtcgttcaactcgatgctccctgtgtcattcaggaggcgagtggacagatcgctcgtcgtgacccttactcctgcgactggatcccgcaccgacgacgctgaggcttggttggtgatagtcttgagatcgaagagggggaactcggctaccagtcagcgtgcggacgcttgcagagttaaccgggaccaaggcagagatcatgatcttggtctggttcaagatgttgacgacgtgattggcttgattgagtacgtcttccttgaggagggtgtcgaggagggtgatcgctgcaaccgcgttctgttgaggggtgcgaaaaacagccgttccctcaacgtcttgctgcccgataagttctcgtgctcgtcgcccgacatccaaggcgtgctgtcgccggtcctcagcctcttttgcagcccgttcgcactcctgttgctcacgctgcagccgttctcgctcttgtgcttggcgctcctcttccagtcagggtcgttcggcttcctgttgcacgcgttgttcttctgcttctcgggctttacgctgttcttccgtctcgttttcagccatgaagatgccgaagtagagaggcgtgtagttatcttcaaagtcttagtcgaagtcgtcgaggttgcggtctacggtagccgaagtcgtcgtactcaatgatctccgttggccgtgagtcgacgccgggggagctgaggtagccatccagttgttccgtcgaaaccgtgccgagaggctagagtatgacgccgacttccctggagctaggctggatcgaggtagaggccggatcccgcctagattgtcacgcccggaaattcactagtaatttccgaacttatttgtgcataaaatcctcgtccaggaatcagccgaggtacacaaactgacaatttaatatacagattcatcaaattaactaaaacgataaatacttacttaagaggcacttagtcctcactaagaagaaaactgcagcggaaaataaaatctagcgaagctccggctccactcccacaggcagctcaactgggatataagccaaacgtcttctccttctggatcctttttcttcaactgaggttgattgattattgcaaagtgagcatatgacatactcagcaagccacacagcaaatatgcaagtgcacaaggataccaaaggatggcataatataggctcatttgcgaaagcagcatttagcaaagagttaagagtagtaaaacagtagagtaattaatcagaaattttaatcaacactgaacagcacacccatgctgtacaggcccaaccatcctgaacaaccatacccggctgtacagatctaactccaaaccaggagctaagcaaattgttaccagttataacatccataattattgtgagaggtgtgggactaatcacgaaaaacattgctcaacccgcccataaccacgggcacggctattcgaatagttttactctggccagaggtgtaccactgtacccacaagacacagcctcatcatcatgtctaccatgcgtcgcgatactggaaagtacccgaatagaggctgtgacaataccctttgcacaacacaactcaccacagtgcaccattcctggatcataatcaccccctcaaaaaccagaggcatggactccccagcgacccccgtgggcttatctccgccacttctcagtctggtgctccgcaatgaatcatgttatacaaaaggtaaagccgttgcccacgctggcttgtggttggcacggttaatgtttcacaatagtagctcgcgaaccggtccttaattgtcatgagcacgactctcaaaaccatgtgctcacaacccaccattatcaagttttagttggcaagtaattaattaaccaatcacgattgaccatcgtgaactatcattaagccatcattaaacaatgagtcataagttatctcaaaagtgtgctaatgtttctaagcatagctaagcaatcatatctaatatctagctgaaccaatatatatatagcccaactagtcaagttataataacccaaggtatcaaggaatagaataatcaatgcaaattggccataacaaaggaatagattcacaccacccaatgacattcgaaaataaatgcacagttgaaataaatagagaatttaagtataggatcaacatgctcaaaggattgtgtttaggatctatgtgacttgtcttgcaataatcggtcttcaattaatcttctgaacactcccgacgcactcacgaaccttcgcaacgacagaaacgacaagctaacacgcaaaaagaagaaaaagactaataaaaaccaaataaacagtacatataaagtaaacaaacatgtagatcatgattttagatgaatttagcaacttgaacgactcaaaaccgagttacgatgatttagttatgaatttccgaagatttaatctattagaaaaacaggaaaaagaaaaaaaaaacgatgatgacgtcagcgatgacctcatcaatggtggccggctcggaagg

SEQ ID NO: 21060 - DNA, 28445 bp, Oryza sativa
aaacacttgcattcaatttgtagtttagctcttagctggctacttctatttattctaagaaaaacaactgaattgtacccattttgattaatctgtgaccttttcatgtccttcaaatttcatcatcttctgcatttgttgatctaatacggcccagccacctgttttttttttcattcatagtctgcatgatcatcgcgcttcaccctgagtgggatcgatcctgatctgccaggtaggcctctgttctcgtcgtcatcatggtgctttgcccgtgagcatcgcttgtcgttctttgttgagtcatcgtcaagctgttaacaccaaaatttgatacggttgtttagaggattcagttaaggaaagaagtcaatcaaccgatcaggacttatatcttttcttttatctttaggaaacttgtatcttgtccgattaggactaatatcaacctaagggtataaatatgtacacccgtagactttgtaatctatttccacatatcaatacattactttcggtacattgccaacttttattccggcgagttcttagttttgagcaggtttgcatttgttaagttcgatctcccacgaggaagtaagtttcgtcaacttcccgcgaggaaataatctcctcttcctatactatttaactttggctacaactttctcgtttaagtccaatattttattcaggttgacgcaagcattgtctatctgatatattgattatatctttaactgcattgctatttagagtggtatcggcttagttaggactttctcacttaggtccgatattttgactaagttgatgtttttctaatcgtattgccgttttagatagatcgatgtatcaatcatgtttgtatatatatctattggctaaatatttttttcttgttatcgtcaatcttaaaatatcttagttaggctcgatctgttagattgctactaataagtctatttctactaagccgataggttttcatgcaacgtttcatcggactgttagccgatgagttgtctttattgtgggttagctatcagatataatgattacttagttgatatacactttaatttatttactgttggcggatggcatgaggcccttcgaccaaatctgccgaaacccgtggcaaagactatggagcaagaacggcgcgagacgaggggtcgtgcgagtaccttgtcgagccagaggcgtcccaggcgaagggtgcaaggcgaagagtatctgccgaaggaagacgatttcgccatggcaagttcgcccccgcgagggccgaagaagcctttccggcccatcaagcctaggggctatagggccggcggtcgcccgacggcccatcaggggcccatgaacctccataacattatgtaccccctgtaaatgtccctttcgtaagggtaaccatgtaaattcccctgtataacctaaaccctagtagtaagaacctataatggggctataaatagtcccctagggccatgtaataaggggatcccgaagtaaaaaattctaaaattaatacacttcgtttctttccaaccactgttgagtaaccacgtctttcgacgtatgcggttgtcgtttcgacaacatttacattggatcttcagccaatggatgttttaaccatcctatttacatcacattatattattagttttgaccgattggttcaaattatattatctcatggcatcttctgagttacatcggcttatactcaaacttgtataatcatagttaaatctatatttatcaacttaaatcttatattttttcggtttgatcttatctatcaatattgcttttgacaaagaatgtgtttacactcaaatttggcacctagaggcgaaataggaaaaattgccaagatttgggaatctaccggtttcctccagaagggccgatctaaccgccatgtatggaccactcagactgtggccagagggccggtctgaccagcagagtccaagtcagactccgtttttgtcgggtctcgagattccttgctcagggggctatgttttgggttctttttttgttttctacccctagttagacatggaggagggcctgtagagggcaagaccaacccctatttaatggataaggtcggttcaaacaatgtatcacacaacgatcaatcaatcgaatcgctttttcaatatcgctttctgcttttcacttagctctactttaattcgtccatctttattgatttacgccgtaaatcattcgccttcattgcgagagtgcgaaatcctttgtaggtttgtcccgtaaaccttctgtttgcccacgagacatgtagttattcaccgttttatctaaatcggctccgctatccggtttaatctatcaaaacccaacttgatctagattttgctggtttggggtggttggcgactctacaaatcaccgcaagacgtttaggtgttgcgatcatgcttatctacttgaccaaaaaagttgccaacagaaagcagacgggaagaagaaggacaagcgcgcgagaagatagaagaggcgagccgagaaaacaaggagaatttctttaatttgtacggggaaatctctactattataaaaattgaagatattttcgcggtccgtcatccgtttttgagtcggttataaaaattgaagatgtttctgctgttcgtcattcgtatttgagtcggttttaaatttatgttttggttttaacctatatctctgtctctgctatttaaaaaataaagatgtttttgtcgatatttttatatgtcatctgtgtatgagtcggtttttaagtttacttgctttttttgaaaataaatatccgtatttaagtcggtttttaagatcattcacatgcattttttttatagtaatagtattataagtataaacacagtagttaagacggagccaaacacagcagagccgtcccgatctaatcgaccgagcccaaaactaaccctaaattccccagctccccaccacgccgccgccgccgcctccatgggccgcaaagatacttcctcgtcgtcctccgccgccggcggcaagaaggacaagccgatgtcggtctccgccattctggcctccatggacgcgccggcgtccaaggccaagccatccaaggcggcgtccaagcccaagccctccaaggcgcccgcgtcgtcttacatgggcgacatcgacctgcccccctccgatgaggaggaggacgacgccgacctcgttgccatggccacgaagcccaaggcggcccgcgccaccgtcgacctcaacgccatcgcgccctcgcagaaggacgcgaagaagaaggacaagcgcgaggcgatggcggccgcgcaagccgaggcggccaagcaggaggcgctccgcgacgaccgcgacgcattctctgtcgttattggcgcgcgcgtcgctggatccgccggggcctccgagggtgactccgccgccgccgatgacaacatcaaggatattgtgctcgagaacttctctgtttctgcccgcgggaaggagctactcaagaacgcctcgctccggatctcgcacggccggcgctatggcctcgtcgggcccaacggcatgggcaagtccacccttctgaagctgctgtcatggcggcaggtcccggtgccccggagcattgatgtcctgcttgtggagcaggaaattattggagacaatcgttcagcgctcgaggctgttgttgctgctgatgaagagctcgcagcgcttcgtgccgagcaggcaaagctcgaggcctctaacgatgctgatgacaatgagcggcttgctgaggtttatgagaagctcaacctccgggattctgatgctgcccgggctcgtgcatccaagatccttgctgggctggggtttgatcaggctatgcaggccaggtccactaaatcgttcagtggtggctggaggatgcgcatctcgcttgctcgtgcgctgttcatgcagccaacattgttgctgcttgatgaaccgactaatcatcttgacctccgagctgttctttggttggagcaatacttgtgctcacagtggaagaaaacactgattgttgtgtcccatgatcgcgacttcctgaacacagtttgcaatgagatcattcatttgcatgataagaatctgcatgtttatcgtggaaattttgacgactttgagagtgggtatgaacagaagaggaaggagatgaataggaagtttgaggtgtttgaaaagcagatgaaggcagcaaagaagactgggagcaaggcagcgcaagacaaggtcaaaggtcaggcactatcaaaggctaataaggaggctgccaagagcaaggggaagggaaagaatgtagcaaatgatgacgacgacatgaagccagctgatcttccacagaaatggcttgactacaaggttgagttccacttcccagagccaactttgctcacaccaccgctccttcagctcattgaggtgggcttcagctaccctaataggccagatttcaagctgtctggtgttgatgttggcattgacatgggaacacgtgttgcaattgttggtcccaatggggcaggaaaatctacacttcttaatttacttgctggtgatcttaccccaaccaaaggagaggtaaggaggagtcagaagctgaggattgggcgatactcacagcattttgttgacttactgacaatggaggaaaatgcagttcagtatttgctcaggctccatcctgatcaggagggaatgagcaaagcagaggctgtacgtgcgaagctcggaaaatttggtttaccagggcacaaccatctcactccaatagttaaattatctggtggacagaaggcccgtgttgtgttcacttcaatatcaatgtcacatccccacattctcctgctggatgagccaacaaatcacctagacatgcaaagtatcgatgcattggcagatgcactggatgaattcactggtggtgtggtcttggttagccatgactcgagattgatctctagagtgtgtgacgatgagcagaggagtgagatatgggttgtagaagatggcactgtgaacaaatttgatggaacatttgaggactacaaggatgaacttttggaagaaatcaaaaaggaagttgaagagtaatgtgtttttatagttgcaggatactgcttattctttatagactgggctggtaaacttaatgtactagtacttattttctttggtttgcagagtatttgtatggttgagtccgaaacacctattcgagctgttcttgctttttgcatgatctaagaggttccaggatgagtctgataaatatgttttctatgattttgctgccaattactctgtactaagacttccatgatatacatccataataattcagtatgatttcatgttattggctcatataattaatattatattatgctcagcggtactttatgttggtcagattaatccaaattattatcaaattcttggtcaattagttcaatatatggttgaatgcctatatgcttatggatggaatgctcactgaacaatcatatggaactgcagcactgaattgaaagcacactaaatgtgcgtactgaaaccatggtaattgaaggacaatgttacactgctgattattgaaactctacatcctgcagcttgatcctgaaggactttatctggttattatcaccgtatgccttactgaaaacatgctatatctaactactgaaatgttcagctattgattgtgtcacaagttgtactgctaattaactaagctacatgctatgaatggcgatttaatgccataccgatacggattgctctggatggtttgttacaagacctatgatttctgcttaatggttcaactagaagatctgcacgcctgttggcgtgccacctaatttagcatgtaatatggctcatctgtaatatatatagaaaatttgcctacctctcattttatattatttgtaactctagcaaaatttcacatcaaacaaggagatgtggcaaattacactgatatgcttattaactacattataatcgttttcaaaagcaatattaactttgattgacagttatacatggcatttaaaaggtgaagatagaagaccacgatctaaaaataataatttgaaatgtgagaatgaccagtaatattaaacatgcagagtaatatattattacatgagtaagtttaactctgaaaaaaattctttcaaatggacatgttaatggaatttaattttatgtttgtcttagaattatgagaaaaaccaaagtaagattgtaattaatgatgatcaataatttggcaaatagctagactctattagaaaatttaaagttatgtttcctcaaaattgttgtgatttcattaaccaaaaagtcgtacatatagtatcaatgataaagtgcatatttgaagaaatggttcttagtttatatttgaacaaattctcatccaatctctttcactttatatttgatatttagtttttcccgattattatttattttatataaatacaggatatcaatattttatgttttgaagattttttttacaaaattatttatacttttctctaccttcctttttcctacttttgtttggtcctgtttgtgttattactaattaattagcccgagaaggtaaagtgcaacgtgcaaatgctgtagcaacaacgctagatgaccaggcctagtgcagtcatgcatgactgggctgtacagcccatgacaggcgggatggtaattttgccaatgggttcgggtatccacggatacccgatccaatgggcacgggtgtgggtgtgattttttacctgtgggcacgcctacccgagacccgcagacatcgtgagcaacagccgagtttcattttttatctgtgggtaacccatgcccgacccaattcatatgtattagctaatttcgacttatctcttaattcttatacccctttctcttgattcatttgtgatactaactactaataataagttgtgacgtaattcaaattattgttgatagctgataatttgataaattgttgattttatttctctttgttaaattatatatttttcgagtattattcatgtgagatccattgggtacccgctgggcatacccgtgcccgcatgggtacgggtacagagttttgcctgctaaccctagtgggtagggtttgggcgggcgacgacgggcatggggtcgggcatggttttgctctacccgtgcccaacccgacccgttgccatccattgacagccagtgaatgaaccaatggcttttcttttctttttctttttctttttcacggtccagtgtccggactaatcgagagggctggacgaatgaaacatgccacgtggaccaatgaaacgctagaagaatggctagctttagattaatagaagagatgagacaattgcacaatcgacgctctagctgaatctcacgggacacgtggctggttttcaaaggagcaaaccctaaaatcttagggagccacgtggcccaatcatatgcttgattttttaccttgaattcggtatattagataagatttgattcttttaatgggacatgctgctatgtggtctttcaggcttaaatctgaactactgatgccacttgaactgctgctaatttcctgaggttaatttatcaaggtcacaaactaattctaactaggtcataaactaatgataactattcctgtataaggttcatcctgtagggtcttcattagaatcttacatcatatatactagcttatgttgtcacacatttgcgcgactcttgttacgtgatacgtgagtgtcaatcaatctgttgtttttcttgttgctagtaaaatataatcaatctgttgtttttcttgttgctagtaaaatattgggtcaggatgagtcatagtattatgttggtaaagtagatggcttaatatttattgtaaattttaataggtatgagacatatgtatcaccctttattcttcacttattttctattagtgcgtacccttttgtgactcattgtcatatattttgtaggtttttaaggattagtttaatttctatttttaaatttgtgtgaaaaatcattaagcctatattcaggtgaccatgactcattattggaaggaatatgcatgtctcagtagcaattttttttctcaaatacattaacaacaaattgctagaaacaaaaataatcacatgaacatacattttgaatatgccctgaatagctcaatcttgactaatgaatatttagttaagggaatgagggtgccttttttcttccttcatttctttctttccacttctagtagcttcatctcctgaagtctcttgaatgtgttcttttgccatcatttaatccaatggtctaagattcattcactcttttttgtcttgtagtaagttcaatggctaatatttaccaaataatgtggctcattctcagtccactttggatgtcacttttcactagttaagatataaatagctgtgatgggctatgagataatgagatgtgagacggcgaatggaatatggagggtttgcatagggattggggataagatctgggcccttggattgtgaacctatgattcaagatttggaagattagagatccaatttattgtgaaatttatatcctctatgttcccaaatataagcaaattttaggattcaaattttatacacaaattgtttttataggactatgattccaatacatgaaaataaacattttcaaccaaatattccgtttgtccaaaaaaaaagaagtatgattggatgtgacgtaatctagtcctcgagccccgacatgatggtcagggtgggagacggggattgatagagaaaataacgtggagctgagacgggtggtggaggggggaggtgtgaagttgtttaaataaaaatgaaggggtcgagtgggctgaagttgtttgtagcgcatctgtcatctgtctcgctcacaatacgggatgtgggtgttgggtggtgccgttcgcttgtcaccaaatcatgccatcatgatcagtgagaaggtagctttaaaatagggagtttataggtagttttgtctgaaatgatattatagtgataaacacaccatttgagaataatattttgataaaaacctaatatatcaaaggctaagggtgaatgcgtttggtagaggggagattttaggagggatctcctcttgacctggataatggtgagttggaaaggatttcatcctctaccctatctaaataaatcttagcactatatttttatttaaaaatacatagtctaaactcaatattatttctaccttctaccaaaaatacaagattaagattgaaaaataaattttcgtaacaatcatacgatcaatttcctcataaaaaactcccaatcctcgtctcaatttaccaaacaagcccatgcatcaaagcctccaaggcaggcgccaaccccagcccgggaacatcttctccggttctccctcaccgctcactggctctcgtctctcgccgccgccgccgccgccgccgccgccgtcttgccctcaagcatccgggttcgccgatcgccccacttctcccttcctccctccgccagcgccacctccgcgctactgcctcctccctcctttctcgcgcccgcgcctcctgaaactgggatcccccaatggcaatggattcaagtattcaactctctctctctctctctctctctctctctctctctctctctctctctctccgtgaacattggggccgccatttgccaaagatataagcccgagaggttcagcttctcgtagaagctaaggctgtgatgcgactgggcggatggatgctccggccactgaaccgcggcctcctcctccccaccttgtcatgcccagttgccccacaccgccgtgggttcgcagcctatgcagcagcgctacagtggctggaggacgagctcacctcgctcgcgatcctcccctccgtccccggggtggactccttcgcgtgcgccaggcagttgcagggctgcatcgctcgtggcgacgcccgcggcggccgcgccgtgcacggccatgtagtgcgccgcggaggggtggggcgcctggacctcttctgcgccaacgtcctgctcaatatgtacgggaagctcgggccccttgccagcgcgcgcaggctgttcgaccgaatgcctgagcggaacatggtgtccttcgtcacgctcgtccaggcccacgctcagcgcggtgattttgaggctgccgcggctctgttcaggaggctgcggtgggaggggcacgaggtgaaccagttcgtgctcaccaccatgttgaagctagctattgccatggatgcggcagggcttgccgggggtgtgcactcatgtgcgtggaagctgggccatgatcacaacgcctttgttggttcagggctgattgatgcctactccttatgcagtcttgtcagtgatgcggaacatgtgtttaatgggattgtgcgtaaggatgctgttgtctggactgcgatggtttcttgctattctgaaaatgattgcccagagaatgcctttcgggtcttttccaagatgagggtgtcgggttgtaagcctaacccttttgcactaaccagtgtgctcaaagctgcagtttgcttgccatcagttgtgctaggcaagggcatccatggttgcgccataaaaacccttaatgacacggagcctcatgtcggtggtgctttgcttgatatgtatgccaaatgtggggatattaaggatgcacgtttggcttttgagatgattccctatgatgatgtgatacttctgagttttatgatatcccggtatgcacagagcaatcagaatgaacaagcctttgaactgttcctccgattgatgcgttcttctgtgctgcccaatgaatatagcctttctagtgttctgcaagcatgtactaacatggttcagttggatttcggaaagcaaattcataaccatgctataaaaataggccatgagtctgatctttttgttggaaatgcactaatggatttctatgccaagtgcaacgacatggatagctcacttaagatcttctcatcattgcgagatgccaatgaggtgagctggaacacaattgttgttggcttcagtcagtctggtttgggagaagaagcattgagtgtattctgtgagatgcaagctgctcagatgccttgcactcaagttacatactcgagtgtgctccgggcttgtgcaagcacagcatcaataagacatgctggtcagattcattgttcaattgagaagtccacatttaataatgacaccgtaattggcaattcacttattgatacatatgctaagtgcggatacattagggatgctctcaaggtatttcaacatttaatggaacgcgatataatttcatggaatgcaataatctcaggatatgcgcttcatggacaagcggcagatgctctagaactttttgacaggatgaataaaagcaacgtggaatccaatgatatcacttttgttgctctgctatccgtctgcagtagcacaggattagtaaatcatggattatctctgttcgattctatgaggattgatcatggcatcaaaccaagtatggagcattatacatgcattgttaggcttctaggacgagctggccgtctgaatgatgctctacaattcattggagatattccttcggcaccatctgctatggtttggcgtgcattgcttagctcttgtataatccataagaatgtggctctgggaagattttctgcagaaaaaatacttgagattgaaccacaagatgagacaacctatgtcttactatcaaatatgtatgctgcagctggaagtttggatcaagttgcccttttgaggaaatcaatgaggaatattggtgtaaggaaggtacctggtcttagttgggttgagatcaagggtgaaattcatgccttttcagtgggatcagtggaccatccagatatgcgggtgataaatgcaatgctggaatggctcaatcttaaaactagtagggaaggttatattcctgacattaatgtagtgttgcacgacgtagacaaggaacaaaagactcgaatgctgtgggtgcatagtgagaggctggctttagcatatggccttgtgatgacacctcctgggcatccaataaggatattgaagaatttgcgttcctgtttggattgtcatactgcatttacggtgatatctaaaatagttaaacgagaaatcatcgtgagggatataaatcgcttccatcattttgaggatggaaagtgctcatgcggtgactattggtgatcttctgttgttccttgatgtgttaaaggaatccatacaagttatatgtgatataatgtgtttggcaaatggcaatcttctaggaaaccaagttatcatgcatgctctattgttttgggtaacatggttttgaacttgaactcgtgcaatttcatgctattttcaaggcactggagaagagatatcatatcagactgggctaccattccgaaaaaaaaaacccattcatttttaatgtttagtgttacctaagcacattttcgttattgacttgaatactagtgaatgtcatctcattagcaatagaaaaccttatggctgaactgaattggctgatatttttcgttctctatgatttcatcaagttggtagatagccttttgtttaagtatgttctagtgactgcattggaaaattgacacttgcaccggccttcgtattgatagtaattagcatagttcatgctatgacacaaacattaggccatgcaagtggttttcatgaaagagctttccattttctaacgtttatcttacatagttttgttagaattgtaggggggttttagttataataaaattggcagcgaacctacaattaaagcatcggttgattttcttgagttatagttaaagcagcaaacctataattagttatatactttgagttgtttaaataaatatcgtttgattttcttgtgccattgccttgacatcattgtgccgcattatcagttcagtcacacttcacactgactaggtgatagcgactcttctagcactagctaatggggatattaagtgtaatgcaccctgactctgcttgctgtgggagaccaggagttgttttatttttctgatcttctcaagattgtggcaaagcttgctaaaggagaaggaaaaataatttcttttgcctatcttatatgatataaactgcttgcccttgttaaaataaactctgttctgcaggtgatagttgggcaaggcaaccataagggtaaaatgcagcctttggaagtgaaacgagcttgcctactggcttattcttaggctatataaccttctactacctccttatggaagctgagggattgtttgtgccggatcatcctgtaattgctcatcttgtagagatgaagagtattgtagaaaaggtttgttttcttttctacaacaaccttgtttctttaatttgtatattttctggaaggagttaatgcagtaccaatttcaattaatactatgattttttatcattgagttgattgcaaatatttgaataatatctgatattaaacgtatcattaaacaggccaatatatcttccaagacaacaaggagacattaatgactgttgtacgcctggtagcagtaccatggatgtgctagacaagataatttttttggacaaggacaatttactagtacgggataagataaaaataggatctgttcttctttactttactataaagtacaaacatgataattgaagtattctggtaactcatcatgataatttttattcagcgtgcggaagttgctgaattgacaaagaatgaccattctaataaggcttagaatgaaattgacaaaagaaaggacaaggttgaactgaaacaacacttttgatatattttagcattttgtttcgaaaataatgcagatgcacaaaagctgaacaaatattaaaattctaggatgagcatatcagctcacaaagccttgaaatgttggaagtatgagcaacccttgaagaaaaagggctctataatttcacgcagttgaagcctgagaaggtttcaaacaccaggacaactcctcataggtgagtcattagttgtgccatctctttctcttttaaacgacacatttaatatatttggatggttttagcttttaaatgcctttttgttaataattatgagatacctgcaaatgttggatgattttgatgatgatgttctcagaaatagacaagtaaccaaacctagcaaggtcctggtagcagtggtaaaatccaataaaaataaggtctgtatacatttttttaatttttttccacctttctttaataattttatatttggttggcttctttcttagtttctacaatttcttaaatcttgtgataacatgtaagcttgaaatgatttaaagtgtgccaatctaaccgaagccttctattgagatgatggaaatacagagctacctccaaaactgtagaaacaaaagtacttatgccatgcatttttttagagttactgtagaatattgatgtataggtagtttactgcaatagaggttcaaatatcatacttctatcaagttacccaatttgacaaacatttttttttaaatgtgacagtagattttggtccctggccagtggtctcagatgagaaaactgctatttcatccgtcacaaaatgtaagcattttttaggtgggcacgggtattaaagaagtacttcctccgtttcatattataagactttctagcattaccacattcatatatatgtctagattcattaacatatatatgaatgtgggtaatgctagaaagtcttataatttgaaacggagggagtaggtgagaatgattcgaggaatattgtgattgattgagaagagaaagtagatgaagaaatcaaatgaagaaaaatggttgtgattggttgagagtagggtaggtggaaaaatagctttcattttgggataaggtattgtgctagaaatagctacatttcgggacagaggtaacaaaataaaatctttgacatcagtttgttcagaatgatctgagaagaaaactgcgagaaaacgttgcttgagtttgcaattaatgttgtatttctgaggcagtgagatatctaggtatacattgccaaagtgtagtaggacttcacaaattgacagaagagaactgaaattttgtataagacctggtcataattcgtgtccattcttgtgaatatttgaagatatctcatccttgaggaagcgtaataggaatggactctgctgcatttggtgccttttgtccttgaaaacttggtttagctatgtactagctagatctaataattagctttctcaaatatgcagtaccaaaatatattggatattttcttcttgtattatttcaagtcattcctctaatggttgtctcgctgctatgctgttcttgcagagctgatgtgctaatctgtcatattaactcaataacatctgcgtgtgcataaattgtgttcaatattctttagaacaaaaaaaaatgtagttattcttgcctggttagagatagtctgaaatatgtaattgggttacagttttttaaattgctggtgaagtggtgataccgtgatatttcttcatcagtggtagtgtctggttatcactgccatgctcttgcatacaagataaactcttctttggtgtatgttatttgtggttgtgacagttgcagctgtcagatactcttttctgctctttattatctgtttatgtatctccagttcgggtatagtctttttctttggaataaaaaatgtaggcacccttttctggttagaggtatgtctgaatatattaagtatcttatagctttttggcaaaagttgcagttttgaattttatggtggtgttaagaaaagtatcaggtctttgtgtctgattcacaccaggccactactattctcttgcataggagtacctatttagcacatgcactttggagttctggatgtcaaatgcctacgttaattgtggttacgacttatgacagttgtagacttgcaccagctgcttacctctttcttttttttaacctgctatgttttcaagtttgtccctggtgatgatgagcttccaaagcgagataatattggtgaaagacagtgaaaatacgaactacatgttcttgccagagtagaagctagtacacttgaagaagatgacttgcccaatgaagatgcccatactgaagggaagcttaacattttcaatccaaaacaacaggaacagaaacatttccatactgaagtgaagaagatgacaatgatgatgacattggaccatcagagtacaaggacattaaaaagcatgactgaaaaactcgagcaaagaacagaaatactcaccgtaagttccattgataaaaacttatgaagattgattgtttccgatcaaggttcttttggcaaggggatggacacaaaaggaaatatagactagcaaggtgggacatcatatgtcgtcctaaagaccaaggggggttaggaattcaagatcttgaaattaagaacaaggctctccttagcaagtggttgcataaactactcactacagatggtgtgtggcaacaaatgctaaggaacaaatatttggggtcacagcctttgtctcaagctcagtggaaagcaagagactcacacttttgggctagtctaatgaaggccaagcttaattttcttaggtttggctccttcaacatcaaagatggctctcaagttcggttttgggaagataaatggttggggaatgcctgtttaagggaacaatatccttgtctctataacgttgttaggcataaacatacaactatttcagaaattttccaaaccagtcctctaagcttttcttggcgcagggaccttactggctttaagttagtggcatggaatcaccttctctcacgcatcgctaatattatattatctcacgaccaagatgagtttaaatggaatctaaccactgatggcagattctcggttaaatatctttatcttgcgttggtgcagaccgatgtcccaatataaacaaaagaatctggaaaatcaaagccccctaaagattaagatcttcttatggtacttacgtcgtggagtagtcttaacaaaagataatcttattaaaaggaattagagaggaaacaagtcttgttctttctgccacaaagatgaaactattaatcatttgttctttgattgtcgttttgcctgcacagtttggtctataattcaattttgcttcgaatattagtttacctaatagtacaactcatatgtttgggcattggataagaagacaaccacgcaatttgagatctttggtcttattaggggcaactaccactatttggtctatttggctttgcagaaattatgtggtttttgaaagaaaaaacatatcttctcctttgcaggttatctttttgattacacattggctccgcttatgggctatccttcagaaggtcaatttgcggggtactatcattgcggcttgttaacaattggagctagtggccatggagttttctaccccggtgcatgggtggtgttctagactacggttagagggctcctgaagttctttttgtccctgctatttggatgatgagtttatcttttgtttctttcttgttggctgtgtgcactctttgggtgcagaagccggaggtgctcgcagaataattatatcacttgatagagttttactaagattaataaagcttccattatctaaaaaaaatacttattcgttgactgtattacagaaaccccattactcaaccgctggaggaagaagctgaaggaaattggcaagaggaagatctcataccaggttaatcctccactagtgtacggtacaacctttcacaatttttattttttttatatgtgtggctaattaaatctaaactcctccagatagagaagaaaggttaacctgcacaagaacaaaagcttaagaatccatggaagatagggtaagtaataacataatatatgagacagccgagctatgtgagcaagtcattcagatgcactcgcttgtgtgtatgatcgttcaagctaagcatcaaaccaagcttgtttagcggggaggtaagtgcgtggcgtcaaccgtggggtgaatgtccggcatcaatccaaatgttagccatagtgttaggtttaaaggttgatggatcctgcatgatgaattgattatggtctaacatgatatttctttgatggtacgtagttttcttgttaagaattttttgagagatcgcacacatgatatttggaggttcaacgtcatgcattaaaaaattgtgttatgtgctatggatgcttagttctcactggtggagaaacctcaattgtcccagtttacaaccccctatatcccgggttgcaaaccgggacccccaaattctagactaaagatggtatctttagttccggatcaaatttgatcaagtttatagacaaattagttttattaaatttataattgaatattttttcataatatatttgttttggattgaaaatgttaatatttttttctacaaacttggtagcagtttgactttgaccaaaggcaaaacgacttataatctaaaacggagagagtagtttatatgggtttctcattgttttgataccctaccgatggagtagtgcaagtgtagaaatttatggagttaccgaaatttggtagtggtaaggttgtgatagttgcaggagaaaattaacaaaatcgaaaagatacgtagtagataaactcaaaagataggttcgtattacacccattacacccatcaaaagataggttcttttttttttaaaaaaaaacaccttaactatggaactggacattttaaatctcaaccattcaaaccaaccaaattaccttcctaagaataaagtggcattcataattttggcatccaaatgtattagtttttctacttagatttaactactttttatatcttttctaactaagtgccatataagtacgaaaaatatactcgctctgttccaaaataaaataaatggattcctagaatcccaacaaaactttagtagggaggaaatgaccatgcacctggtggtaggtagcaagggataaagtttttttatttgcagatcgggggtatgtaagaaggtaaaaatcaatttattttgggacaaaatttttaaactttaggaactaatttattttcggcttgtttgataacttgagggaaagagattgggagtttacatgagggaattgatgatgagattaagatgggaatttgatttttaatcccaatattttgtttggtagaggtgatggaaattgatagggagtttagttggagattaggtcattaataaaaacggatggctgagatttgcttagacaaagtaaaggaggaattccctcccaattacctgcccctacccaggtattgaaaatgaggtattgaaaaggagggggttccttcctcaattccccatccccatcccaccaaaattcccatgtctcccaccaaataaaacacttaatagcctcatttttctatattcccaatccctcctaaaaactccctccaaccaaacggaccgtttgggatggagtcgaaaacggtcggaaacgatcggaatcggcagcatcttttcagaaacgatgctcgaccggccggtaattgaccatatttatcatttaaactactcagtattgacattaatacggtgtagaaagaattgtgaaaaaacaacatttaaaaatagccaaaaacggtatggtcagaaacggtacctcttatatggaaacgacgctcagtcgatcgggaatttccatgaccgttttcacccctagatagagtataatatttggatcttaaaaccatgaaaccgctgttaaaattgggttttgttgccatttgtgtgtgtgcgcgctcatactttcggaaaaaattttaaaaaataatttgttggctatattgttggtactatgaaacagaggatcgaaatcaaaggtacttgctatactatcaggttctctcatcaagtatcaattaggtttttttctatattttagtaataaaaagttaataaataacaagaagacctctcttttagaaactcaattatattatgtttcatgatttaataatcaatgatatgatattatttaaaaaaatgtaggctagttttttaaaaaaaacaaaattgtaaagtagtagtaaaatcttgagattggtctatattacacccttaaactactggttttgtttttaacaacgaaactagacattttacacccctcaaccaccaaaatcatccaaaataccctcccaaaagtaattttagttttgatagtgtttcttacaattttactaccgattcaacttttctactatatagccaagcccagccaaaagattattatacacacccatataaaatcatgagtaaattgcatattgggctcagtattattaccaaagttttactttgggcaagggtatagcctgcattttcactttggactagagtttctttcctttggttgcacgttgggccacctttctcgtcggccggccaggcactgcgtgcatcccaccattgctggcagtggcaggctccaagggcagccattattgttgctgctgcaaggtgtgaggatctcctgcacatgtgtaggaagaggagaagctccgggggacagccatcagggtggtgaggcagaggagctcgtgcacagcggctgggatggcagcaccggcgacgctcgagcttgtggtggagcaaacggagtttaactaaccttgagggcgagggacacgattccttttgcatcatccggtcaggtccattggggattggaggggattatcgcaatagatgtagaattaatcctctccaaatccccctcaatccacttgtgggagggggccttagagggaagcaacagcaggttgcattctcatgcatggaggagtaggagcaagggggcggaccgcagctagaatgatatggagatgaggagctcaagcaggaagccatgggaggctcgtgggagttttgagttccttggccatgaagcgcgagctcgagctagcccagtatctcttcttcgtatcaccaggggacacccggcttggcattctaccccttgtgcaatgctgagcagagcagtgatgtgctcaagcatcgtccctcacttcctccccaagcagtcttggatctagaccacgggcgaggagaacggcagggattggcggcggtgtgatgaattggaagcagagaatgcacggctggagagattgagacatggggtggcctaaattgcaacaaaggcgatatttcctagtataaagtgaaaacattggctcttctcttgtccaaagtgaaatcttggtaataataactggcccaagatgcaattcactctaaaatcattgtcataactaatactaggtgacacctcatgctttgctacaaaatgtatggataaatatgttaaatattatacaaatgatttatgttgaaataatatgaaaataatgtgagaaagatgatttgaaatattgtatgttgagttccataatattatattctagatgatgtgttatttttgcatgagatttaagatattctagtagaatagtaatagctagtggatgatgaagtgacatacttgcatgtaataattgctagtgagtaccaactatatatagaaggtatagatttgttgatgaacaattgaatttgcaaatgacttatttaatggaaattggtttgaaaatatttgtcgatattggtgtaagtatgtgtgattaacacaaatcggattgcgatatctataactagaaacaatttgtgtgcagatgattaaggatatttttggtcaattgcggtgatcgggactagcatggataaaatgtcatatgacaagattgaactaaagtcatgagacctcatggtcaatctcggttaacagcgggatgatgactacgctcagagaaaccgaggtttagatcagtcaaggatactaggtgataattttggacataagatgacatgagggtggacacatgcgggggaggagtctgacacagtacgggtcggtctagattttctatctatggctgcctttccggagagagggttttgaatttgggaaattgtaaaaattttggataccaagggattgagttatagtgtaaataggagttttcccttaaaagaagtgtaaataggagcttttgtgatggaattactagttatagatagacgagaggtttaactcaacacatggataagcatctagagttagagagaaaagttagggttaggattaaaaggggggcgattgcatttttgaccttgttttgaattcaaactactaatttgactctacttttttaagtttgctcatttgaccctcttttttgaaaatgaaaatcagatctgaccctcttttgtgaatgcaatgtaacggtgttaacttaggtaaaaaaagacgtttacgcccatgcttatttgaccatattttttctcaaagtttttgtttatttgacccagttttctactcattatatatgatgaatttgaactaggtatgacatatttggcttagttttcatttgtttgacttagatttgaaagcattttaagaaatttgacttagatttgatatatttttgacccatttgaattagtttgatatatttttgatagatttgacttagatttgaaaaaaaaagtgaacatacaaaaaaattgacagcatttatttatacgcatacatccgtcccgattaaatcatttctgtaatatttaacatatatttatccatacatttcgtagcaaagcatgaggtatcacctagcgacaatgattttatacgagtgtctataagcttttggctgggcttggctatagtagaaaagttgaatcggtagcgaaattgtaagaaacactatcaaaactaaaattacttttgggaggtattttggatggttttggtgattgaggggtgtgaaatgtctaatttcgttgttaaaaacaaaaccagtagtttaagggtgtaatatagaccaatctcaagattttactactactttacaattttgtttttttaagaaactagcctacatttttttaaacaatatcatatcatcgattattaaatcatgaaaaacattataattgagtttctaaaagagaggtcttcttgttatttattaaattttattactaaaatatagaaaaaacctaattgatacttgatgagacaacctgatagtatagcaagtacctttgatttcgatcctctgtttcatagtaccaaaaaattattttttaaaaaattttctgaaagtatgaatacacacacacaattggcatcaaaacccaactttaacagtggtttcatggtttttagatccaaatagtatactccatcccaaaataatgtagttcctaaagtttaaaaattttgtcccaaaataaattgatttctatcttattcctatccgctatcctattcctatcttgggccttcttttcatctgcctacgtctcaacactcaggccttcagtttcttttcttcttttttgccccatccctttttaaatgaacaaaaaatttaatgtttatattaaaacataatatagattaataatacgaatctttctaaatatttgtaaatattttgcaaaataaaaacgatttgaaaatgactagcacacgtcgctggttatttaaaaagacaggtgattcctcgcgctttgctgcgggaattactaagcaattctcaatatattttttcgacaatcaagttaggagtaaaaaggaaaaaataatgaaacatcagggcttatcagtacttattaaaaaaacaaatgatactcgtactttaatgtgaaacatattaataagtatacattaaatattataaatttattagaatattatgcaaatgatgtgagggatgattgttggatatgcttgcatgaggttaaatatgtaattattgctagtgggtgatgatgtggcatggttgtatcttgagttttagacttagtgggctataactttatataaagtatagatagggagtatttgttattatttattagttacccatacattagaacattaaatttaaaaggaattgtgcgacaattctaggttatgagtggtaatgctcgtttctagggcaagacaatctcaacgatccacttccgaaagtatgttttgctctccgttgatttttcggattttctgaagatggctctcaaaaattccgaaatcacaaaaattcaaaattcggtactgatgtgttttcagatatgttcaaaatgaaattttgtaatttctgaaattcattttagccctgtttttggagatttatatattttcaaaaatgatttttggaatttttgaaaaatggaatctttggttccaacgggtagatctaaggttgtggttataaatagtttcctccactctcaagttttggctactgctccattgaatatttcatgccattgacttacattgatttgagatccattttgagccttgttttctcactttccctctcctccgcttcaagcttggatttagtgtgtgtgaggagttgtggttttgaatatgtatgagtgcttggtattgacttcgtgaagatttattgagcacttgattcatccccaagagatctttgcatcatcttttactcttagaggttgagaacttcttgacggctaggtgtcattcttaaggcaccgatctaattgtggtttgcctggagaagtttgttaaggtcagacctcacttccgaaaggaaagagataccactagtgaaaggagtgcatttgtacaaacctcaagaggaaagggttagtgaagacccggctctttgaaagctcctcaacggatagtagaatccctgaatgattcaaacttcgggaacacatcatcttgcaagaacctcggtgaaaattccctctcttcctcctctagctttgcttacttgtgccgctactagtctggttgctgttagtgcttgctctccatacttatggcttgctagatcttgtgcatttcgcttgctttgagttttttggaatttcctaaagtcattttcgaaacttctaaaaagttcagcttccacatttaattaaaagatttaagtcacctattaacaccctctaggcctaaatgactcttttaatcgggacaattgcttatttgaccctatttcgaagcctaactagtaatttaaccctacttttttagtttgcttatttgaccctgcttttcaaaaacgaacacaccgtttttccctgtttccacagcactgtgaaggtttcattttaaaataaaagaaatataattacttttcgtaatgaccagaatacccttgaagcaatcctatccattcagattatccctatccattcatctctcatatcacatctttctctcccccggctagtggcgcagtgacgtacgaaggggagtggccgtggcggcggctcgtggagggagggagcggcggtggcggcgggagggatttgcggcactaccagatcgaggccgcccgacgcggaggatgagggccacatccatcccaacctcttgctattctagatgatgtgtcatttctgcatgagatttaagatattctagaatagtaatagctactggatgatgatgtgacatacttgcatgtaataattgctagtgggtaccaactacatagaatgtatagatttgttgatgaacaattgaatttgcaaatgacttatttattggaaattagtttgaaaatatttgtcgatgaggagcatacaaagagctgggtcttcactaaccctttcctcttgtggttgtaccttccactagtggtatctcttccctttcggaagtgagatccaaccttaacaaacttgtctagtgtcacgcccagaaatttagcccaaatttccagactattttttgtattaaatccctgtccaggaatcagccaagatacacaaaacgacaagtaataaacagttccaaacgtaaataaagcgtaaatacttacagaagaggctcttagtcctcacaccaaaaagaaagcagcagcagcggaaaaagacgatcctagcggggcttcagctccactccacaggcaaaactcaactggggtctgagccttggtcttctaacttagtcttcagctcagaagcactacacttctgaaaatggggaataatagcaaggctgagtacaaccaccgtactcagcaagccacaccaacgatgcagacgtgcaaggggattcaagaatggcttgtggctatttgtataaaggtggttgtaaaatattttattgagcaaatcagtaaaactgttgagtacttaaggtaatattaaatctccactacagtgtaccaaggggattcaacgctacaacacgttgaacaggcccaaccatcccacctgaactacagtgcattgggtcgattgattaagtgtgagactaatcacggtgaatctggtcgatcgcccataaccgtgggcacggctattcgaatagttttactctggccagaggtgcacaactatacccacaagacacaatccaccggcatgtcaccgtacccggccggacacgtcaccatgtcgagtgattgtgacaagacccttcatataaccccctctgaccaagcacaccacacctcaggtttcacccccgcccccagcaagcagcgagcagtcccatctcgtgcctaggcgaatcagaaagccgcataggccgtcgcagggcccatccgaactccatcacgctcacccttgtctggatgcgtcagccagagaaaagctatacttcaagtcaggtagttacccattcccgcttgtggcaagcgctgtatgtcttccagtgcatcccgcgaaccggtccttaattgccatgggtgcgaccagcaaaaccatgcacccatagcccatcattcaatcgcattttagttggatagttacaaccaatgaaacatggccggatgtctcgagcatgcagctcgtaatgatactaaaaggtctattactgccattatcccatcaactgagttagtggtaattaagcatggctaacatatagttctagctagatcaacataagtgacacaagctagtcgaattatcacccacggttgacaaaggacaggtatcaagtaaacatggcacaagcgagcagataggttaaccctaatcccatgtaattagcaaaacatgcatatttatttgcaaacagggaaaacatttgtaacgtaggatcaaaatgctcaaggggaatgtgtgacttgccttgcttcttcaaacaatcttccgaactcttttcctcgcgaccgcggacttccgaaacaacagattctacacgctagcatgcaaaatgaggaaaaacactaataaagaccaagcaaatagtacatcataagtaaacagacatgtagagctcaattttagatgaattttgcaagttgaatggcccaatttggagttcatatgaattagatatgaattttagaagttttgagccatttaaatgaatttctagaattaaatacgatttatgacgcaattattaattatttttccaaaggaaaaggggttgctgacgtcatcaagggggaggggcggcgccggcaagtgggccccaccggttagcgacacaagggcgccggtccaccgtggaccaggaccactgaggctgtccaccgccggtccacgggaaccgacgtcccggatcggccaaagccgatcgggcggccaggggcggtgcggctggggcacagcacggcacaaggtcggcccgaccaagcgacggcgcggcagcgcggccactggtggcgatggccggcgacggcgcgggcagcaacggcgcacgcgggcagcggcagcgcacgcgagggaggcgtgacaaaggggaccggtcggcctgggcgagcagggcagcggcaagcctgctggccgagcacacgacgcggcgccgacgtaccgggctcaaggaccaccggcggcgaacggcggcggcgcgagggggcaacgcacgcacggaagcgacggcgcacgatgctaggagggagaggaggaggaaaccggggtgctcaccgagggattcggctggtgcggagggaggcaacgacgggtggcaatggcgagtgaccggccaacgacgacgagcggtggacgggatgcgggaggacctacgaaacacaatg

SEQ ID NO: 21061 - DNA, 2764 bp, Oryza sativa
atgtcgaacgaggtgaaccatgtagggaaggctcccatgtttaatggcacaaactattccacttggaaaattaaaatgtctactcacctcaaagctatgagcttccatatttggagtattgtggatgtaggctttgctatcaccggcacgcccttgacggagattgatcaccgcaacctccaactcaatgcgcaagccatgaatgctttgttcaactctttgagccaagaggagtttgatagagtgagcaaccttgagagcacatatgagatttggaacaagttggcagagatccatgagggcacaagcgagtacaaggatgccaagcttcatttcctcgagatccaatatgagacattctccatgttgcctcatgagagtgtgaatgacatgtatgggaggctcaatgtcattgtgaatgatctcaaggggcttggggcaaactacaatgttcttgaggttgcccaaaagatgcttagggctctaccggagaagtatgagacccttgtcaccatgctcatcaactccgacatgtcaaggatgacactcgcaagcctcttggggaagatcaacaccaatgacatgtacaagttgaagaagaaggagatggaggaagcctcaccttctaagaagtgcattgttctccaagccgaagttgaagacaagggcaagggcaaggtgaatgaagccaatgaggacttggaggaagagattgtccttcttgctagaaggttcaatgatctcttaggaaggagaaaggagagaagaaggggctccaactccaataggagaagaaatagaagacccaacaagactctctccaacttgaggtgctttgagtgtggtgagaagggacactttgcttccaagtgcccttccaaggatgatgatgctgacaagtcatccaagaagaagagtggaggctacaagctcatgaagaagctcaagaagaaaggcaagaagattgaggccttaatcggggaataggactcaaatgaggagagctccgcctcatccgggtccgaggaagaaggtggtgatgatgcaagctccaaaaagaagaagatggccgttgttgccatcaaggaggctccatcactcttcgctccactttgtctcatggcaaagggctcctctaaggtaacatctcttagtgatagtgagagtgatgatgattgtgatgatgttttctatgatgagcttgtgagtatgtttgaggagctccatgcttatagtgagaaggagattgtcaagttcaaggccctaaagaaggatcatgcttctttggaggtcttgtatgaggagctaaagacctctcatgagagactcaccatttctcatgagaagcttaaggaagctcatgacaacctcctttccactactcaacatggagctctcattgatgttggcatatcttgtgatttgcttgatgatagtgctacttgccatattgctcatgttgcatcatctagcatttctacctcttgtgatgatcttgtggatatgcctagctctagctctagcccttgtgtttctatttgtgatgcctcacttgttgagaacaatgagcttaaggagcaagtggctaagctcaacaagaatttggagaggtgcttcaagggtaagaacactcttgacaagattttgagtgagcaacggtgcatccttaacaaggagggacttggattcattccaaagaagggtaagaaaccttctcaccgtgccagtcgttttgtcaagaacaatggtaagtattgctccaagtgtcgtgaggttgggaatttggtgagtgattgccccggtggtaagccttccaagacttgcatgtttgattctcattatatgcttaggaaggcttatgatggtagcattgttgctagatatgtgggttcgcctatactcggtggtaaaaagaatgccatttaggtgcccaaagctttggtctctaacctccaaggacccaaacaagtttgggtacctaaaagagcttgatcttcttttgtaggtgaactactgcaccggtgggagccattgggtgcttgatagtggatgcactcaacacatgaccggtgatagggctatgttctccacatttgaagtagaagggaatgaacaagagaaagtgacatttggagacaatagcaaaggaaaggtaattgggttaggtaaaattgctatctccaatgatttgtcaattgataatgtctctcttgttaaatacctaaatttcaatttgctttcggttgcttaaatttgtgatcttggcttgtcatgtgctttcttcccgcaagaagttattgtttctagccttcttgacaagtcttgtgtgttcaaaggttttagatatggaaatctttatttgattgatttcaattgtagtgaagcaaatttgaaaacttgtttagttgcaaaaacttcattgagttggctttggcataggaggctagcccatattggcatgaatcaattgagcaaactttcaaaacgtgatctagttgtgggcttgaaagatgtgaagtttgagaaagataagctttgtagtgcttgtcaagccggcaagcaagttgcatgttctcatcctactaagagtatcatgtccacatctagaccattggagctcttgcatatggatttgtttggcccaacaacctataagagcattggtggtaatagtcattgtcttgtgattgttgatgattattctcgctatacttgggtgttctttttgcatgacaagtctattgttgccgagtctattcttttt

SEQ ID NO: 21062 - DNA, 13150 bp, Oryza sativa
accaacgggcatctcgaccttgatgagagaggtaaaccggtagatttaaagctttatcgttctatgattggtagcttgctttaccttaccgcatctaggccggatatcatgtttagtgttagaatgtgtgctcagtttcaagccgctcctaaggagtgtcacttaatggccgtgaaaaggattctaagatatttaaagcattcctcaactactggcttgtggtacccaaaaggtgctaagtttaagctagttggctattccgattcggattatgccggttgcaaagtggatagaaagagcacatccggtagttgccaaatgcttggtagatcccttgtgtcatggtcatccaagaaacaaaactccgtagccctctctaccaccgatgcggaatatgtttcggcgggtagttgttgtgcccaattgctttggatgaaacaaacattgttggactatggcatatccttcaccaaaaccccactcctatgtgacaatgatagtgccataaagatagccaataacccggtccaacattctagaaccaagcatatcgacatacaccatcacttcctaagagaccatgttgccaagtgacatagtcattagccacataagaaccgaggatcaactagccgacatctttaccaagcctcttgatgaaacccgcttttgcaaattgaggaatgagttaaatgtcgtagaattctccaatgtggcttgagatagtgcaccatggttgcttcttttgcatattgtatatttgctctcatttgctcttttgttttggatttgttgccatttggttcttcattgcgaaaatggagcatgtcacattaagggggagttttgcactcttgtatgtgctctacttccctttatatgtgagcaaatcaactagtggtgctagtagtattttcaaaatgcccaagtcaacataagtcaaaacttttgcaaaatcaatgtaatttgaaaactatctcttggaaaatatttcaaaaggtttcctatatgttttccaagcctcacattgcaagaaaaatgatttttgaatgaaaatgccagtttggccctcttttgaagaaactagattcttagttttggccaaaatgagatttatccccaaaatgagattgagaaggaatttgagaaaagtttcaaaacaaagttggtagagaagaagatttgaaatgtttttggtattcaaacctttttcaaaaaccaaatcattcaaaagttatttgaaaaccaatttggcccaaaaacccctatagaccataaaaggtcacctcctagcacttaagtgagttttgttgcaaatcatcgtaatcttcaaatattatgggtgtttagcaatatttaaactcacacatttcaaaaattgctccaaaaatcaattttttattgaattttattgtgtggaggttgccggcttgtgcaagggctgtgcacagccggcatggggcctggtggtctgaccggcgctatatgcacggtctgaccggccaggtgcggcggtctgaccggccacatagagccggtctgaccggccggcaggtgggcctaggatttttgtcctttttcttctctcttcttcccctacccgactccatctcctcccattcagccatcttcttccccaacttgaaaaaactcctcctctctcctctcccaaaccctagccacctccctccatcaaatccattcggtttgaccgcggatttctctccggttacaccgtaagtgattctcctccgcctcctctctctattccatggattagtttgtgtttttgttgagtttttgatctatggcatggaaccttaggtgaagcacgaggtgttcttcgatttgcaccaatagagggtagtttcttggtgtgattcaactcctccaacgggtaaatctctctccctcttgtacattgctctcaaatcggtctatttcaatatctagggtttagggtagtttccccatttattccaatcttgatgaaataggccataccctttgatgttctggttccaatcttgtgcaactttgtcctagcaatttttagaatcatttgtgtggattgtggaaggatttggttgtgctcctgtcaatggcggtctgaccggccccaaagcgtcggtctgaccgacttgaggccggcggtctgaccggctgggagccgtcggtctgaccagccttggccctcggtctgaccgcccttaacaggcagcaaccccctttcctcccacttcactatgtggtttctaaaatcattgcttatatatcctttgctcctatttttcagtgatgcctcccctcactcgtcatggtcatcgtgcgcccactccggatcccgtgagtaagcctgaggaatcaagtggagatgattacgctcaaagtgatgaagaggttgaggcaaatgttgagggggctagtggggaggctagtggagatgatgtcagtggaagtggagaggatgaggatgaaggaagtgatgatatgaacattgatccctccatccaatttgtggtgaacatgaggaatccattgcagtataccatcttgaggcatcatgatcagtttttgaggcctcgggacaccccggatccccgttttcacaccgctttccagaagtctgtgtatgagcaagtttatgcagggaaagcatttgcagagcataagtggatttcttggagagacatcaaagagactccagagtttgaaagcttgcaggatctcttcaagactgttggcattgaccggattgtgaccctcaagcaagactacaatgaagatttgatccggcagttttatgctatagtgtgggtggctggagactatagtgagatgaagtggatgtccgacaccctccagtgttctatctctaggaggcaattacggtggctcctcaatattcgcttggactttggagatggcttgcatgaggagcacactcacaattcgctctccatagactatctctgtcagttttatgaagatggagcgcggtacacacatgggaaggttgacggcttgaggactattcctagtgtggttaacaagattgtgagagctaccatcctccctcgccttggcaacaatgatgacattagaggggtggcttggcacgtcatcgatgcaatcatccagggtcgtcaattcgacattgtgtctctcatgatgcaagagattgccatctctaaggggattttcactcagggaatctactatgccccttacatcatgaggttgattcaagacaagcttggggctgctgggcaaaatttgaagaagcacaagcagtacaagccccgccttcagcttggagctccccgtgcacctaggacggtgccctcttctcatcctggagctagctcaagctcagcacctccttctcctcctgggtatgatccaaatgctttcttccatccatagtatgcttattttggaacgcaacctaatgaatacttcaacccggtacttggggctattaataccctaagtgaaagcattcaacgcttgtctatcgggcatgaagcattgcatgaggatgttcgtggcttgcgcaccaatgttggagacttgaatgcttccgtgggaagattgcatactcgagtgggtacattggattctcgagtccaaatgttggagagctctcaagcttttgtatatcatcgtcgtcgtgatgctcctcatccttcatcttcggctcgtcctccttctcctccgcaagaatgaagacctttttggtacttgatgccaaaagggggagaaaaagtccttaggtgtgctctatgtcttgtgggttgggattagtggtagtgaggttagtcatctcatatctaataggtttaggtgttttgggctatattatgtatgggtatgggctattactatatattgtgtgttctttatcgttttgttgaactctctatgtcatttggacccttcatggtcttgtaatagcctatgttcatttgtgagcccttttaggatgatttgtgacttatgtgagttgaatggttaagtgatgtgaacttgtgtgatgatagatggtgtatgtgatattgatatatatgtgaccatcttatgctcatggatgaatatttcttgaagttcacatttgagatattgctcttgtgtttgtgatatgttgaaatgtgaaattgaaatgtgcattgactccatatttgctagttgtaattgttatgcacatgtttaaggggagcttttgatttcctttgcaatatatgtccatatgttccatgtttgtttatatatatttgtggtgtttgtcatcaattaccaaaaagggggagattgaagcatctaggcccccattgttaattttggtaattaattgcaagcgctaattgtggactaaccgttgctattgagatatattttaagttaggcccacgtcatgtgtgcgcatggatgactatcgatggattaaaatttacggcgcaaagcaaagggaaagaagacggtaaaactagtgctttaatttagaattgatcgaggtgtagggcgatcaaatttgctagtttatttttagttttgtcgtactatcaagggggtaatgacctagcaataagatgattttaattgccacattaggtcattatgcatttagacttgtgctcacatttcatctctcacacacaatctctttatttttcactgggttcggcctgaccagggcggtcagaccggccacacagtggcggtctgaccggcgtgccttcgctggtctgaccggcgtgccctggctggtctgaccggcgccacaacggcggtctgaccggcccataaggccggtgtgccgccggtcagaccggccccctggaggccgggatggtgttgcttggggtggccgatacagagccgacggagccgtgttcggtcagaccgagccgatggcagtctgaccgagctgaggctggtctgaccggccactcaacctcggtctgaccggccaggccgatggggccctctgacagggctacaacggctagttttctagccgttgcagagtagcacggtctgacagaccggtcacatacctctggtcagaccggcagagcacagagttgggggatttcgcccccaacggctagttttggttggtgggagtataaatactccccctttagcagcaaggggactctcttggcacccaattcaattgcatacaccccttgcacctctctcacacccacttgagctttgtgttcatccatctagtgtgttagagggttaattagccaagagtcaagtgcattgcttccatttgtagagctagtgtggcacttgatttatcatctccacgccgggtcattgcttcttactcttggaggttgccgcctcctagacggcttgtggaggagttgcccggtgacctctctgagaagattgtggaggagacccagcgccggtttgtgagtggtttggagttcaccaccttcggagtgaaggaagaactacccaagtgatcaaggcttgggtagtcctctccgtgggccggctcccgccttgcccaccccttgacaaagggggcgtgcggtggcttcgtggttgagcggtggagttggcctcacctcaacggggagtaggaaaccggcgagtttccgaacctcggtgaaaaatctcttgtctccttgtctcatttgattgtcgcatttacatttgtgcaatttatatttctagagacttacttgagatcatatcaccctaggattgctaaacattgacataggagtgtgatttattttcctagagatataattgagccactatcaccctaggtttgcaaaacataacttagttgcttagttagagttgaccctcaccaagcctagcaacataggttagttttaattaggtgtcatttgtttttaaatcgcctattcacccccccctctagtcgacatctcgatcctacaaccagtagcaataattacttatttaacctcatgcaagcatatccaacaatcatccctcacattatttgcataatattttaataaaattataatatttaatgtatacttattaatatgtttcacattaaagtacgggtatcatttatttttttcgtaatactaagtactgataaagcttgatgtttcattattttttcctttttactcctaacttgattgtcggaaaaaatatattgagaattgcttagtaattcttgtagcaaagcgcgaggaatcacctatatttttaaatagccagcgacgtgtgctagtcatttcaaatcgttttttttcaaaatatttacaaatatttagaaggattcatgttattaagctatattatgttttaatataaacattaaatttttacttgactattttagtgtaactagtggttacaaaaattaaaacaataaagtcaaagttaatagtactagttatttgttcatttaaaaagggatgggggtaaaaaagaagagaaactgaaggcctgaggacgtggccagatgaaaagaaggccaaagatagaatgaaaagaaggccaaagataggaatatgatagcggcgaggtcatgtatactcacgagtcacggcctttggaaagcagcaagcaaagcaaagccttgttcctccttggcaccgtccccctctccatgagaatatgcagccgtctcctcgagaaaattgcatatgtaccactcataaaaacttgcttcgctataatgtcactctcaagatgggatttgcccaaacgccactcataacatgtgggcattcgctggtatgccactttcaggctttcttccatttcgaaaatattgttcatcaatttcaatttttctcggactattatgcccctgataaggcgagcgtgagaaggcgagaagagaagcggcagcgacaccggtgccgcccaccaccactgcgccaccgctacctctgctctagccgccgtgccgaggtcctccccagctgtgccgctcctcgcctcctcctggtccacgcagttgtgccgcctcctcggtgacatacaccatgagtccatgacacacaacctcacttcatgagttcatacatataacttgcaagcggtttaattttcatttaatttcgcatcaagcagagctaccgacttgtttaattttgtatgagcaagttcgttcgctttggttaacccaaacgaactttaaaaagaagttgcaaaatgtttttcgaagatacaagaagatactactagaatagaagtcgctttgtgcttgaaaattatacatagttgttgatttcagaatgtaaaatcggcacatcactaacacaaaaagtgaacaaaaatatctaccgggcaccagaggaaattacacaggaggcaaaaaaaaccactatgaattcagagaagagaagaaaaaaacgaaagctaagctcaggggtcctcggtgatgcacgagaggtgcggctgcaacggcgaggcatggctcctggtgctcatgcaccgacggtattggtggtggtgatgcttctgcgccctcatcatccttgtcttctccggcgacgcgctgcccgggctgcccaaccaatcggcgacggcggtgctgccctccgacttgctgcggacgtggtgcccgcgtcggcggcgccgccggtgctcgtcctcctcttggcgtcggggacggaggcggccgggatgaggaagtagatctcgccgcgctccagcttcgactccggcgacacgatgtgtatccggcctaccgcctcctgctgcgacaagcactgccggctcagcacgtggttggggtgcgccgccagcacctcgccggcggacacggcatggctgtacgcatcgatgcggccggctcggtgcctagggtttggctgaggataggcggcacgactggggaggagactcgccggggagaggcggcggcgcagctgttagggggcaggaccgatgaggcgcgccgcggcggctggaatagagaggcagtggcggcgatgcagtggtgtggtgggcggcgccggtgtcgctgcctcttctgttctcgacttcttgcgctcgctcgctagattgaaacgaagagaagaaagagtccgactgaatcagttgactcaggggcataatagtccaagaaaaattgaaattgatgaaaagtattttcaaaatggaaaaaaagactaaaagtggcattccagcgaatacccacgtgttaagagtggcatctggacgaatcctatctcgagagtggcgttacagcgaagccagtttttattagtggtacatattcaattttctccctctcctccctttatttttgctggagccgacaagggcagaggcgaggcaaggcaaggcaaggagggagagaggcggcctccggccatggatcccctcataaagctccttgacgacgacgtggtgcgcgaccccaaccccaacccctccctcctcattctcgaattcgtttgttttttggggggaaaggaaggaaggattcaaatggtggctctctcttgttgtggggttgcgcaggacgagaccatgcactcgggcgccgacgtcgaggccttcacggcggcgctcaaccgcgaggtggagggcagcggcggcgcgagcaccagcgccgcggcctcctcctcccagccgctggatcacggcgccggtgagtttccctgtccccaattaaccctaggaaactgtttcccttcctcggatcgaattcgtgtgatcctgtggagaaccgggggttgtaggaatcaacaaactgtactgcgagggggttggacaatgcgctacttggaatggggtaataatgaaatcaagaaacttttatgtacgtggcacctaggtttagtgttcgaattaacgttccgcaattttagatttagtgttggaagggattctgacaaatgagccttctatgattttttttttggtactgcaatgggttgggctttttctcattattctcatcatggagggccttcccctaatatccctaatattaaaatagagataaatattcttcatattgagacccaaatggaaaaaaaaaacaattcatcaagggaagaaaaattataggaaataagtgtccaagtactgaagggtgtgaacataacagcttgttaggaaaacaaaacttttctactggtttatctttgagtcccctaatactgactgcatgaaaataacaacagacgtttataagggtttgtcttaaagaatgtggttattgatttcgaaaaatcatgtagattcttgaattttaccctgcatataggggaatggagcagtaggccatgaattcatgacaatctggagtagaccacaacacttttttcttgcagaaatgattctcttagtgcttgatgacaaccaaacattgtgtaactcaaatagctgctgtgccattgaatccacttttcctttgccaggtctgtaaagtatgcctggatagaaagaactttatccagcgagcattattataccaatattctatgttgctttagtcaacaataattaagaggcatagataaatatgtttcttgaaattgagcaacttccaacttattctgtaaatatatggtacccactttgacaagagctggtgaaatttacactagtgttctacaagaaacgaagttcctaaacaatatttcttgagcttgaatataagttctgattgacttctgtaatcattatacagtgttctgtcttgaagtatcaacattacactttgctgtggaagtctctagtgttatggaagtaatgaaatttgcaagcaaagaaccaaagtaggaacatttacagtaaacatgaagcttgcatacccatcattctatgttttcttctgcccttattatcactgctcttgttctattttacactccactgaaaatagaatttcaaggaaaagcacaactaccttttgaggatagcacttatacctggtttgaaacttggccacttgcagcttacaaacttagaaacctttctttcatggttgtggactagcctctgtgcagccagccatgcccattcacgctagctgagacaagggttggcgggtttagttcaatgtgtatctatatttagatagcgttgaatattaatcctatctatagtttattggttcattagatttccttcttcagtgactggctacataagcacatgattgccatccctttggattaagcaataaaattgcattgtaagcactttcacccaaccaatgcgagtacttaaaagggttagttgtatgtgagttttagaaaaccccaggttctgtgcttcgcctcacttagcttggagaaaacattgtggcaataaataagtaaatcctatgttttgtcactccctgtgctgttaactcattgacatactgctaaagttactgaaagaggagaaagagagcacatatttcattgacttgtcgcacttaaaacagtctaaatgaattgcatgtaggttccattggtttctttctgttttgggacataacaagacagactttcaccactatattttcttaaaccttgggttaagttaaaatattttcacaacttctgtatgcgtgttttaaacgcaggtaaaaataccaatcggaaagataaatgactctattagtctctgacactgacagagatactgtagttcaagggtacaaaattttcatcccgcacatgcttctcacagtggcaaggcttttggaatgaagggtagcatgattagtctctcctgatgtccaactatttatgaactaaatatcatattgcttggagttagttctccatgttgctttcagattattatttttattattgaaatttgcagattgttttgtttgttgaatcaagcctgtttaaacatgcaataacttcagatctgcattcatcccttttgacaaatacaatagagagatacatttgtggaagctaaagctagaaaacttgccacataagtagcttgtttgcttatcagctgagtggcaaatagtttgtacaagctttagatgtttgcaatgtgtttttctttaatattgtgaactgggtagtggggtagagtatcattagaagagtgttctaagccttgtaaaacttactttctagatgtgcaatcaagtaaattatcagtgaaaattgcaaaatattttgcttcatcctgtctcaaagtacaatgcaaatatcacgaaaacttccaataacatttggtcatatgaatatgagggtaagacgcacatgatacactctatgttaaaatgctaaactgggggaaatgtgaccaaagtcctgtggtgcataatgaactgttactggaagcccacaattttgccatatcaaatacctcagcatattgtctttaaaaaacatctaagcaattcagtatatttctcttgaagtaaaagaattttagcatattcttggtaacctagttatgctatttctgtaaaaaaaaacctagttatgctacgattgtatttatcaagtattcactttatagtaatttatctcaaatgtaggtcttgtgcctcaggagagcaattcaatgttcacccacaatcatgaacagtggcagggttcagtaaagaatgaaattggaaaccaggagaaccaacaacaggaacagaaacatttgcatcattcaaatgagcagccatctaggcctgaactggtatctgggggtgctgataataaacaagaccagccaaaggttaagcaagagccaggaaacagttctcaacaaagtattctggtcagaagcagcctttgcaacagatgaggagtcaacaaacaccaagcacaaatcaaactaatagtgctcctacggtggggaaacctcctgttgttacatttcatatgttaataccaattttgagacggcaccttgacaaagacaaggatatgcaagttcagtccatttttacaaagttgcgggttggttcctgaactatgctgaattaaaaaaaaaacaaatagaatattattgcataactgattactcaactatacttatcgcataaagatatcctttattttcgatagaaaaatgaagttagcaaggaacactttctcaaagttgtaaggactattgttggcgataagttgctcaaacaagctgctgcacaatatcaagctcaggtaactaaagtttcaatttattagggttcatttgagacctctcccccattgcaggtaactgactgccactttacattgtgcagttagtgcgtaagttaggtcaatctatctattctttaagttaggtcaatctatctatcaccactttctgtactgctattgttgttcttaccatcacaatctgtttttcttgggagttattctggtcttgttagctgcaagctgctcatgggcaacggaatccacagacaaatccaagcaactattctttgttaagtcaagtttccaatcagcagaatgttcccagtggttctacgtcaggagttgagcacaaatcatatccgtcagctcattccattcctgcaaaccaagctagtgacagcccaagaccaccttttttccgaccttctttgtcaggccaaatgcaaagtaacatgggctatccatcttcagaaagcaatttgcaaaaggttaatgaatctagtaacatgtcagatgtgaaaggggggcatatgctcagccatccacacaatatacaatcagccccagggcaagcaacacagcatccacaaacatctttacctgtgcttgggtcaaataatattcatgctcgtccattgccacgaccagttggaggtccaattgtaccacttagaccacaaatggcagattccagtcaaagaggacaattagtccagggagctgttacctcagtgactgggagcatggcagcacgaccaacgttgcaaactaatatatctccatggcaacaagtaaacaaagagcagaaaactaaatctttccctccaacagaacacacaaataaggtaactgaaatctaatgctctgaatctacgtaagtgtttttttttttttgcgcctccatgcatgtaaatcaagttaacacagcctttggatgtaagggtgttggtgttcctgaaaaccaaccatcaacatcaggtacttctaaatctttcaacacaacaaactcaagtcagcctcatcgatctcatggcactcaagcagaaccaaacatgcaggta

SEQ ID NO: 21063 - DNA, 21427 bp, Oryza sativa
ttcctaatctaacgtaagttttattcagtgtgttgaagagcggttacgaggattcataagcaatacaataagactttcaaaacaggtgtgatggcttaatttcatggatcttttccaaataaagaattctacttaagatactaattcattttgttctttcttttgtgtagagggttgatcttgaaaaatcaagacatcgaatttatcctttgtcttcagatgttcgtagtcacattttgagggtgaacagagaagctagagaacagtgggacaaaaagctggccgaagatgctgaaagaatcaggaaacagagtgatgttagttctgcatgctgtttcagctggaatttcagtatatcttttcacacgtagtataatacatagagactggctggcaggtggatcaaagatgtcaaaagttgtagcatgtaagggggttgacttaaatgtagatgtagcaatggcttgctattgtgcagcaaggtgctccagttcatttaatctccatcgtccatttgtgttctctctccttgtacaggttgctagagtgtatttgatttgatgtgataattagtcatccttcctttgcgtagtatgttgattggcataaattgggcctgagtttcacaatttagtactatgatttgtgcggtttgaatgaagatcatgtttttaaatgcagggagatgacaatgctgtggttgattcagagaaggacaagaatgagagtcgtagcacatcaaagcatgctaaggttagtgtctttcactactcaggcgatacttgcacagttgtataaacatagtatgctatagatattgatgattttcatgccttgcagacctataaggcggaagatgataaaacgagaacaacagctgcaaatgctgctgcacgagttgcagcaggcggagatgacatgctttcaaggtggcagttcatggctgaaaaaaagaagagcaaatgtgatggtgatggttcttctggttccatgccaggcaacatgttgcctcgtacgtcttcaccgaaacctggaaaaggttcaagagaacaacaggaaattgaaaagacaggttaattttcaatgcttggaccccgataaactgttgtatttttaccgttgtttattatatttgtagtaaccaatgtgcataagcgagtcagtcaattgaacaaaaccacttgatggttgagtgggatagttaatattttggttataagcatttagtaatgcatccatgcaaaaggttggtagatatctgtagttgtagaccctgagatttgtgtttggtgagttcttaagaggacaagatcaccttgtatccagttagtgtgaatgtttaatatgcgagtcattttctagtagaccaaagcctcatagagtagattacacaccacatgcattgtgacatgccttgtatttagacgtttgtccctaaagttttgtgcctctttcattaggtggtgttagaagatcatcacacgtaaaagtgacccggagcattacggtgaaggatgtgatcgcagcacttgagagggaacctcagatgttgaaatcctctttgctgttccagctatatgggagatcaccagcagaatcatctgcgaaatagttgcagtataaccattgcatttcgagttgcagtgttcaattttggttgtgctcttgggggcattgtattgagtagaatggttgatagaagatgagtctaataccaagcgatgggtttgattggttgataaatcatttttgcaggatttaacaatcactagtgaaccgacatcatcagccattttttttaacgagaatagtgtgcatatgtgttctttatctcatgaataatattgtaatcgcttcctatgtcaggcatgatataataaacagcatcaagctcattatgtagagctgatacctgattgtgtagttagctctttttttccactaagataattgaattactctcatgtattctgattcttttaacatgcaatgctggtatttcaaccgttggtgggactgggagaatgtacaatatgtacgttaattcgtgtcgctaggatttgcatcacctaaaaacacgactgcagtaaagcagcttgaaatttacatacatagtacctgtatcatgaatataagtaaaacttctctgaatacattctttgttcatgctgcctgggtacattaaccttccctctttagctctgcagctctgctgcatatgtgaactcacaacatacatgctagctttcctatttgtactactatattcttttccatttatcaacggacgacatgcattgctgtgctacttcaccaacatggagctcttaacatccaaagtcataaggaaccaaaccttgcagctctgggccgttgagcctgttgttgttctcaaagctgcagaataagatgagttagctgtcagtttatgtgaaaggtccagtggtaatgagggatacaaagggtgtgtttagttcaagccaaaattggaagtttggttgaaattggaacgatgtgatggaaaagttgaaagtttgtgtgtgtgggaaagttttgatgtgatggaaaaattggaagtttgaagaataagtttagaactaaactccgcgaaactagtagcaaaatagtgaccaaacttatttgactcaaaccattccaacaaacttaaccaatacaaatcacaaatgtcatgtcaatgggcaatgtaagaattaactgacatttgttttagtcaagcatcaaattcaacctaatgcatttcaatagtaaattaacttttaaggtataccttcgaagagggaaggttgagaagggaccgtcaacaggaatagttccacagaggtcattgttagacaagtcactacatttcacaagaacttagagcaatcagtattcagtaaccatagagagtcaaggaaataactaatttaaaataaatagttttatactcacatgactttcaggttggatagtttggccagctcccttggaattgatccagcaagcttgttattgttcaaccgcctgatatcacaaaccaaaagctttcagtggtagcatatgaaacactgtacaaatatgaataatgagttgaagcctacttccttagttcctgtttcttttgataaaagttactcctacttaaatgtgcattggtaacattatctaacaaaaaatgtgcattggtataagaaaaaactacttaaccatgcataaaaccaaatgaacagagatttgtggatttcatatcagttgaagaaattgtgatcacaagcgtcaggatatttggattcaccgatcatttatttgcactagacatgacatgacttcgtattaagcaagagctgtaatataatcaggtggtgatggtacatacatgaatctcagcgagccgagcttggaaagcgacttggggattgttccagtgagcttgttggcatacaaatccaagctgatcaaattcttgagattgcccaattcttttgggatctcaccgttaagattgttcctgtagagctccctgcaaatcaaaatttgatttttactgattaaatcatggtcatatatccctttctcgccatttgaacagaaaaaaacttgcacgtaatatgcccatacaggtattggaggttcacaagacggcctagctcagggccaatcgagccggagatgttggagtttcctaaatccctgaaacattaaccacaaataaaatagtcagaccattaaggatttagtgtgcgatccttctgaacacgcggattgctaccttctgaacacgatttttgctaccggagcagcaaaccaagaaattcgtgaacaagaagcaactcaattgaaagactaaattaaaggtcatttcttttgccagtccgcaaattataagttgacctgctattgcagaagagttggtgcgtcgagatcttgaaccaagtgttgatttttgacgagttcatcgaacaaatcaaaccagtaataactatacgtagctagcagcagatgatcacctaattgacttaatttagaatagacggaaactaagccccgaccattaatcacagcagcacgcacagttgacagattccaaattcgataagcaagagaagtggagaaccatcagcaatctttcgcacggtcggggaccaaacaatttgggcatcggagttggaaaatcttgaagaggcggcgggggggttcgggagggagaggaactcacaggcggacgacgcggctggcgtggtcgcaggtgacatggaaccaggtgcaggggttgacgagggtcgggtcccagctctgcagcacgccgttgggatccgacagcctcgtccgcagcgcgtacagcgcgtccccctcgtcgttggacgcccgcgccggcgcggcgagaagcaggaccacggccacggccacggcgccggcggcgagcagggacacgcggggcgccatccggccgcggatagtcgtaggtagaggctctggcagtcgggctggcctctcccgccggctatggctccggtgtgaaagggcgagaggaggaagaagactagtagaagagggtgaaggcccgctggtggtggtggtggtggtggctggtgggcggtggaaattttggaaaagtaggggattgcggtcaacacttcaactgcaaggtccacggtcaaacttggaccaggaacaaagaggatgcattttgcaaggctcacccagaggaggatttgtcgcccttggggaactgcgttcgaacgttacagatagtatgatccaatccactctgaatccgtctgatatggtatggacttttaaaaatccggttgatatggatgtggatgtagatagtatgatgcggatacggtatctataaaatccgaataggccgttttccagataattcgtaattatcaacacatgtaaccactctatctattgcatgtaacataagttggtccatccaatggcctaattcatcaattaacctagattttcttagtctaagtctttcaccgtgtcatgtcacacactcacacttgcgcagttgtatttttaaattatggacaacatgaaatgtattcatgttgtttaatgttgtttagcacttaagtatgtactccctccgtcccataatatagcaacctagaactggatgggacatttcatagtacaacgaatatggaaactttccgaaccgattctgcacaatttccggcatccgaaataatccgctccacatccgcatctggacactatctgcacccgctccgaatccacttgaaaatatggtttaggatatggtatgaccactatccgtctgaatccggtccgttttcacccctagtcacttagtttttcagcataaaaaatgagatagatcattattgtataattaattaagtattagttattgtacatttaaatttatttgatttattttaagaagcttctataatagttttgcaaaaaaaaatgtttagcaatttataaagcgtgttactgagaaacaagaaaattgtaattttgagttgaagattagaatggaacctaaatccttatacttaggaaatctattttatgctactgagtttattctggttcaacaatttaccattaacattgttttttttataatacaccgacaactttattaattattcttcaatacgtcattcaacttatctttttagaaaatacccaaaatacacttatggacataaaaggttaagattgatttatcttattagaagttttaaaaaatatgaaattttttaggtgacatccttatacattatggaagtttgtatataagtttcaagttttttcatttgtactttttttaaatatgtatatatataacctatatgttatatgctatgtaaaatacatttttgtgttatagtttttaatgtaaatcatctttcatatgctatataagatatttttgtgctactatcttttgtgtaagcaatttctctcttatataccccaaaaaatatttttttcaaaaaataaaaataccaaaaagaacttaaaacttatacacaaacttccatgttgtataagaaggccacataaatattttcatattattttagaatttctaatgagataaattatttgttaacattgtatgtctataagggttaagggtatttttgggtgtttcttttaaaaaaaaggtcagcccactggtatattgcaaaacaatcgacagtgtcaatggcaaatcgttgaactggaacaaacttagtacgaaccaagatgtcgagtgatgggttgggaaagatatattttcaggttataagcttggcttctgccgatagtgtacacaatcaataagtcgtaaggctcaagaactctctgaaatataacctttgccaactgggtattgggtaacatgagctggatattgtaattttctttttacacctatgatatgttgggttgatttatcttcataaccctacacatgactcaaggccaagggcaaagctagccgataatatcagcggggttagtttcattatatgccatagtaaaccttaatactagaaggtttttgtcggctaacctcaatgaaaagggctaactctaccatgacacaaatgaataatttctcaattatagtctattggaacatgtatgatcggatcaactcccctccctagcaagatgcctccagaagtggctctctctgccacaattctttccatgtatagcttagtactctctctcataaaaaaaccaacttctgtagaagttgatttttcatggagggtgtacataatttgagtggatgaatttatttttgaaaaacttttggattgatgaatttagatgtagagaaagggaaatgtgcagtcgatccgtggacagaacaatttgcggccagtgggtcccatagggccggcaagtgggtcccatggggcactcagtcgatttgccgtggtattggcgttctttgtccgggtgcatggtatggaccattacgtgggacccacacagaaaaattcaaagtcatcagctcgttttacatattccactccagataaaaacaaaatccttttagattctaacttttttcttccaacttctaattttttcgtcacatcaaatatttagacacatatatagagcatcaaatgtggataaaaaaaaactaattcacggtccgactgtaaatcacgagatgaatcttttgaacctaattacgtcatgattagccataagtgctacagtaacccacatgtgctaatgacggattaattaaactcaaaagattcgtctcgcagtttacagtcggaatctgtaatttgttttattattagtctatatttaatacttcaaatgtctgtctgtatacgtcaaaaaaaaatttaccaaatctttacagcatttaaacacggccttagtcccaaaatctcttgctcagtcgattttggttgtatgggacacatctaatactatgaatttggattcaactaaaatctcttaggagtatatttttggggtggagggagtattaggccattcatagtgcggtgaggtggcgttcgacctcagcttaccggcgcaggagattccgagccatgttagcgtggagcagtctccgccaaaaatgtggagctttatttgtccacccgaacctcgtcagaacttgtcatcagtaggaagccccatgacgcgcgaggagaggggcaaaaccgcgttggagaggctatgtcccaaaacgcgaagcaacggtcccctcatcatcattgtcatcgaggttgccctgccatcgcgtcaccattgaggctgtccctgccatggaggggttgcgggatgaccgtcgtcgtgccgctgctgtcgtcgagccgctcccgccacttcccaaggtcagatccggtgactttcaggctggatccggcgaaaccagctcggtcaagctatggagatagggagggagagaggtgccgccggtgggggagggagaggcgccggaggagggggaggcgcggcggctgaaaatggaggaaggaaagcgtgtggccagcggaggagttgcggtgatttgttgagctgagggagagatcccagagaaaaggaggaggtttaaatattttttttctagattttagggtgtttattgtaaattttggaccttcacataaattgaaaaaaaagactatgagaactgataaaaagtgtagtggctgaaatataaagtgaacaagattttagactcgtacgtctaggttaggtgacagctgaggctccacaaatacgtgggatacactcactgcgaatgcccttactgtgtgatgtacgtctccccgacacgcagaacgtgctgcgaagaaagagagcacgaaacgaaatatcagggcacctgccaaactaaagtacacacaacatgacttgacttgtgaaaggacataaaaaattttgcctttttatttatttatttatttatttatttatttgcaaaggagaacctattggttttgaatatgaatgaatttgctagttatgctttgtattattttccctcatgaccaaagtcaaccttttttacactaaatttcacgcatccctgagtatcgtgatctaagttgcacaaatcatatagattttgacccatgatatataatcctatgtattgtgaccataaaatttacaaaacaaaactattgattattttaactttattctactattcttttgagttctttccacaatgacatcctaaatttatgagttttttttatccatcatataaatgttacgtggaatctatgtgagtaaagatttttaaagttttgatataagagtatgtcaaattagttaatagagtggttttgagaaactttatgacaaattgacaataaaactagtgttatgtgtcacgtaccatttctacaactttatgacaataaaactattgttatgtgtcacaataggtgtgttttatgaaatgtagtctttttaaaaaaatatagattccaaacattcagtaactggtttccacctaataaaaatgtcttctttcttcaaaatatgctatgtttcttttctataatgcaggaatttcttttccacctaataactggtttctttacccctggctacctccgtaatgcaggaatttcttttcatccttaccttacctgaattaaagtaattgttttcttaaaataatcccgcaatggaattaatttcagcctttcaaagaagtccttcgttgtggttaaatattaaggttatatcaagtgggggacataaaaaagatttttcatggcactttcctttaactttttcaggcagactaaaaataatgccgctagtgaaagtcacgtttatttttactagcggataacataagcattcactagtgaaaatcacattatctttactggcaaacgacgacataagcatccgcaagtgaaaattgattttcactagcgggcgcttaagacgtttgttagtgaaaatcaattttacaaaaatatgtattcgtatctaacttttccataaaaagttggatgaaaataaaacttataccaaacttgtactatatctcaatgagatctacaacattttagtgaaaacttttccatttaagattatttagggttcaaaatattcattacaggattcaagatctgttttacaaaatttcagatatatgattcaaataacctccaatggacaaatgacatgtgtcaaactcttagagctctatgagatctataactttctatcatgactttttttatttggaagtcatttagagaggcaaataagtattttaattttgaacaatggaaatcaaaacaataacattctgaatatatagacatagacaacaagtgcttcattgtgagatgataatgtaacacatgtgtgtctgtgtggagagaatcttgtattcgaatccttcaaaaaaatcgcatacttgtgaatttaatccgaaagagtgtaaaaattgtcaattaggatttatagttgtgttatagatgcacggtaaaaatcaaaatatttttttatttttactttcccacctaaaaatcaaaatgaaattatggaaatcgattttcactaatggtcggatgccgctaacgaatatcattgattttcactgaacctttaattgcttgcggaatgtttggccgccaggaaaaatatggtttagtctccagaaaaaatgtgttttgtagtagtgggaaggcttatttccattatcgaaagaaatcaagtgtggttcaaaatttttgtacggagtaccccgacaggcacacaattgaacacgaacttacggttacttggttgttgtagtaacaatcctgttgtttgtcatgaccatcctacacgcatgcttatgagatgttgatgatcggcttaattgggaagatcatcaaacaatatttattaagagtgtgtgtgtgtgtgagtagggaaaataggagattatgaagatacgtaagataaagtaaatagtgtataatcaattaatataatttttgaagcactttttttataatttttttagaacaacatattatttagcagtttgagaaacgtgtagtccagaaaaaatcataattgtttgtttttttagaactataatttttttttgcttaatttgtctttctttggaatcccagctagctgaactgagtagtgaacagtcagttctctgaaggcatgcatatgttagagcatgagcaatgggtagcccctgggcataccctcactcacggccgtctggctccattgctttttaggccgcgttgtccccctacgagtaaacgcgaccctcggttgaaagacgcgtccctcggccacttttggctgagccacttcgccgggatccacgttgggcgcgtggtggctaggggtgtggcttgtggacacccctctcacctctagatttcccctttccacctctcggccaataagaagtagccgccgccgccaccgccgcccgagtaccgacgcctcctccgccggtgccgcgcccgtcactgccaccatctcctcgatgtggagcggccgacgccgctccatcatgatctgcccgcacagggctagatccacccacgacaacaccggatctaccgcctttggctagcgatggcgagaggcgaaggagccgccgctgccctggcctcgccggacattgtgctcgccgccgagggtgcggaagagagtggcgaagagagagagagagagaggagagagaggcgaccggcggcgatgacggatccgcgacggcaatgaacaaatccgcgcgccactctcgccgttgactgctcgccgatgaacatatctgtgacagccctcctcatcgccttcgcagctactagcgatgggagagagagggggagagagtgaggcgaccaatggcggcgcgtgaggagagagggagtcaggcggcgacgatgcgtgagcatggaggacgaggggcggcgaagaaaaagaggccggcgcaaagaaaaagagaagagagagggagaagagaggggtagcataggaaaatagccactatcggctttttgggttgggacatctattgtgggtttgagtaccttcacccaattgcttcaaattttgaaaagcccacctaggtgtagcctccaataggagatgagtactcctaagagtaccctcgattattgagggcactctatgtgtggctttgattgtagatgtccttagggcatgtacaatgtaagccactcctagagtgtcttcactaactgaagccgctctatgggacacccgtctcgtctcctaatgaaggacacaactaggtgggctctttaaaatatgaagcaactaggtagagagatactcagcccacaacgggtgtcctagcccacaaagccccatgcatatatttttactatcctacccctaatctctctctctctctcccccccacacctaatctctctttttttcgtcaccgcccctccttttctctttttcttcgcctctctcttcctcttgccgccgctaccgccgctcgcttctctctcccgtcatcggcggccgcgaggacgacggggagggccgctgttaacagtgaaaattgccagtgtgtgtttttcgcgtcaacagccgcctccctccctctctctcgtccccgctcccacccaccgccgtccgtctccgcactgacgacactctctccctttctcccgtcgccgcccgtcgcatcatgtcgtcgccgtcctccccagcctcctccacctcgcggtcgccggtcggaggtggcagaaccgatgctatcgtgggcagatctgcccccctcccccgcagccggatcgggatggagcggcgatgaccgcgctgcatcgaggagacaggggggcactcgcctttgacagtgatggcgccattgccttcttctctccctctcgccgccgtcgttcgcctctccctctccctctctctctctctccctctccctttccctctctctcccatcgctaatggtgattaggatttgcgccggtagtggcggcgcggcggatgaggacgaggagccgacgtctgctggctgtcggggtttcgaagcactagggcgagggtacaaggggaaattccggggtagctttgggcgccttggccacgagctccccacgcgctcaacacggcgcttagcttcaactccccacgaaaaagtaggctaggcgtggagagagccgcgtccacctgcgatgtgccgcgctcccctgctgggcgacgatgccgggtcaaaaagcaacggagctgaacggcgtgaatcggaggaacgacccagggacaccgattgtacatgctcttagaaccgcataatatttctggtagatcttttcatccttgggcgggccttggccattttgtattctcattcgtcacacgatgaacggctttatgcttaatttcctcatagacgtaagattattctattctaccgcaactgagttgcaagtcattcatatcatcatatgtatccatatcgcaagcaaattcaatgaactgggacaacgagaaaaaaaaagttaagtatgcgaatattacagctgctagctaaatgaacatacgatatggataaaaaatactctctccgtttcacaatataagtcattctagcatttcccatattcatattgatattaatgaatctagacatatatatctatctagattcattaatatcaatataaacgtagaaaatgctagaatgacttaaattgtgaaacgaaggaaatatattataatataacatagataaaatattgttattaaaaaatattaatatttgactatttcctaatactaaaaatatattgggctaatttatatagattttctagtgtcttacatagattttcctagtgtcttacatagattttcctctcggacgaagaacagtgtcacgtatgtctctatatataagccccatttgattcaaagaaaattcatataaattttagagaatttaattcctataggaactctttctacgtagtcctttggatcaaaggaatgaatcttacgaaatcccatgaaatccctatgaaatgcctcgttctatgtaagtttcgaaagaaatttaatataagatagaacctcatgggaaaaaaaatccttgaagtcttcatctcttctgcggcccaatcaaacggtcattcctgtaattttttctgtgttttacaattctctattttatacttgcatttctgtcaaaatcatatgttttttccattcctctattttttttctttaatttcccgtgattcaaatgggcctaagattacacctatccaaagttggtacaatagttcacacttgccactggatattgccctttggctaataatgcatgcacgatctgccagtgtagcaatatgtgtaattctagttttgtgaaagttacagcgactatagaaaggatacatcctcttttgtacaatttggaaaaggttggaattctgaacgcaccagtatctaactccccctggtgctctctgacgcagagatgctgtatactctctctgtcccaaaataataaatgtagttttagcactgttcatgttcaatatttgaccgttcgtcttaattgaaaattttttatgattactacttttattgttattagatgataaaacatgaatagtactttatgtgtgactaattttttaatattttttataaattttttaaataagacggatggtcaaaacaatgaacacagatatctatggctgcatttattttggaacaatgaacacggatatctatggctgtatttattttgggacggaggtagtatcaatcaagcatatttggttaacctaacccaacttttttatagctgacgatttgacccagcaatgtcgtttcacaactgcaaaaagatcatacatgcaaagaaattagcacttcttttgcctaatgcaaatagctaaatatatcttcatttcaagctgtacactcgtaggtctttttttatttgaaacacatatatattaaaagcaagaacataggttaggggataaatcccattacattgccagaagataaattaaagcaaagagccacccttttgaaaagggaggttaactctggactaaagaagtagacttcctaatgggactgagcagcagaaaaggagcaaatcgatagggagttggggcaataccgcgacgactgcttccttcctagagcctcataagacgtgcacaccgcttgacaaaccggtaatcctcatcggctgcctccacagaaacggcacaggacagaggtgtgatgctgagccgtagatattggtgtgagcttcaccggactcagcaaaggatctccacggagctcgtcattgaatctgaggaactctaacaataaccctgtcgactgaaatcgcgcaggtggtccgagctcaacccgaatgacaaactcagcatgttttctactaatcaggcaaaaaagagaagccagaaccaaagaccaatcaaccttcatcatgcaagagttgtagtggctgcaaagatcctcttgtcttgctgagacgacgaagttggctggggaagatgaaattgcatcaagagtctacaagagtccggcaagagcataaacccatccactgccgtctccagaactccaaacatgtcctcctccacaagggcacctagcaccagggccatcatcgacgaggtcaacaacagcaacagccagcgcaggtgagactgatgaaggggaactagaggaagaagtcaaggaggaggggccagcgaaggacacgagaagccaccgcagtcgactcaagggacagagcagcgacctcccggccaaagacagcgacgctgctgtcgacgccgccaccaggagccagctccaaccgacaatttgcccctagatctttggatctcgcacctccaccgccaccaatcatcatatcaccgcctccgaccactccgacacccatggagctcgccggcaaaagcacaaactagagacaaaccctaacaacaggaagaacctgacgacctaataacagacctaaccacacaatactagtagggggaggtggacggacctctcctccaaccctcgccggcggcaagccgccggaatcgaggaggaagaggggccggagagctggaggaagggggcggctactgtagaaagaggaaggggaaagaagactcgagaggacgcaccagcttaccccactcgtaggtcaacaaggcattcttcgtcagttaacatctgagtaatcatgtacaattgaatcatcagacaccacattcaccagctgcatgctagctactcatttactcattcgccatacccaaacaaagagcatagctctgatccagcattatttatcttgaggtacctataccaccgatctaaatccggccgttcatctatcgggggtaggatagggaacgaagcaacgcttggcatgctaagctcgcccacgatgctcctgtctatcgaattcatccccttctacggcagtggttgaagttgaatagtgtcgttatcatcccctcaaatggtgtcaggtgcaagggaaacggaggtgttgaatgctagggatggcggtaaagttgggtgcttgacgaggtggatgtggtggctccggatgagcgtggagatggaggtggcggcgccggcgccggtgcacggcaaggtgaacgcggtggcgcagaaggcatagcgggttgtgtcgtatttgggggatttggagttgatggcgaaccaaacaagagaacatggaaagccgttgccaccgcctattgtgaccacatccccctgccctttatttctgatggatcaacgacgggggcaaatgggcaatactgaattggccaagggaggcgggatgtagatcatggtgccggcatggaagaagacgctgctagccatgaaaatcgttgacaatcgtacgagagccaaccatgaaatcaaccgctcaaatcttcaccagcgtcgtgatgcatggatggaaggagcagcacactgggaaggaatccaatttactcttcggtttccggcccctcccaccgctccagcatcctactccactggcgaggctgccggcaagggcactgccatccgatggaggaaaaagaaaagaaagtgagaggagaaagagagataggtggtgtttcaaactcatgaaaatgaagattaagtgagcgaacgtaaaacaagaaagctattagcatataattaattaaatattaattattataatatgaaagttttcgtatgaaacacgttatttagtaaagcgtgcttactaccatgtaccaatttctcctaaccgttggatggaatggatcggattgcctagattgcaggtaccgagaaacctgaaggaccgtgaaaaaatctccctaactaaataagcataaggaataagcatgtatttccaagagacagcttgcagtttctcaaaaaaaaaaaaggcggcttgcagaaaaaaaatgtacaaattaattacaacaggtcgcaaattggtgtatgagcaaaacgcgtcattaagcagtgaatgttaaatgagaatatgcgtgaaatgagagcaagaaactaagttcaaagttactgaaaaaacctgctccctaaggtcaaaaggaaatattgctgtgaatgaacccctcgttctaccaaggagacagaaactaaacggctgaacaggaataactgaagggttcatcaagccatttctcgccttaacccctaaagaaacaatatgcccttctcaagtaaagggagaacaccatgggagtaaaaatacataaaatgcaaaatgaattcactcaagtcaggcacatgctcatgcaaattggcacagaattctcatgatcaggtagacaatcaatctggtttaacagcagacaatatcttagttggaaaccacatcactttcttatgtagagtaacataggacaggacgcatgatcagacggtagcaaacaacatgtaaggagctccatcagaagagagaaacctcaggactaatggcaactgacccaaacattaactttcaaatttttctggattccatgaccatgatacagcttgctggtacaatctttcatttcttgagatgggggaagcactggtacacatctgtctttggatgcttagcttctgcatgctcccggcatttcacttcagatgtggtgcacatgaatgtttgcatacacaccttgcactgcaatcatgaccatcaaaacaatcagtaaactagaaccagcttgcaacaacatgcaaatcattcatctgcacatagctattatgtttcgaaagctcaactatgaattcacaaattccaacaagcagtaatcaacaaggtaattgactagggccataagcaactacacttcagaaggaaaaccaatacacattcaagctcatagtactaacacacagaaggcatgatgcatcaaaatgagttactgaaggcctaaataactgtaaaccactggagccacacaggcgacccatttcatcgagtcacattcaatgccaagtgtgcatgatctgcatagcccaaggcaaattccacagatcaagaattatgaacagtgttatttgtcaaaatactttacagtttgttgtcgaaacgacaaccgcatacgtcgaaagacgtcgttactcaacagtggttggaaaagaaacgaagtgtattaaattttgaatttttcttgggatccccccattacatggccctaggggactatttatagccccattataggttcttactactagggtttaggttatacgggggaatttacatggttgcccttatgaaagggacgttcacagggttacataatgtcaagaggacttatgggcccttgatgggccgtcaggcgaccgccggccctatagcccctaagtttgatgggccgaaaaggcttcttcggcccttgcgggggcgaactggacatggcgaagccgtccttcttcgagctggatgccagggcgaactggacatggcgaagccgtccttcttcgctggatgccagggcgaactggctatggcgaagtcgtccttcttcggcaggtactcacgcgacccttcgcctcgcatcatccttggtttatagccttcgccacgggtttcggcaaatttggtcaaagggcctcatgccatccgagcccctcacaggcaagggtgagagtggagcttcggccgagaccgtgcaaaccatgtggtatgtatgtggcgccccctttcgaccgatgcttctgccgaaacctacactgttcctgcaaataaaatattcttatttgtaccgggccggaagggaacagtattgggccttttactgtgctgtttggatgatgagattttacctttacgcctacccttgcgctacgtggcgccttatgattggcgggtaggcgaaacgtcggcccggtgggctatatattcccacccctttctttttcaccgccgcactcgccatttttactgcatgcgctctcctctcccgttacttcctttcgctgtgtctcttgaactcgtaggtgctttgcctaccctcttgttccgccaccgcccacacacctttcgccatggcccctcgcaaaccaaaccctgttcaggcggttggaccggaccctggccgggtcgacgacaacacctcctttttgggggtctctcttatggacgacgaggagctggcgaagctggtcagctctggggcgttggttgaggggcaggctttcgccccagggaaagccgtggtgccgaaacctgcagagaatcggacggtggtttttgctgtctttttcgaggctgggctacggtttccatgcaacatgctgttgccggagatccttcgcctcttctaggtggaactcccacagttgagcccgtcggcgctggttctgatctcggtcttcgactgggcatgccggacttccgggttcgaacccagcgctaccctcttcggcgccatattctttgccgccgtgaactcgaagacgctggttactccggctggaacgaagaagacggtgttcgggagcgtgaactttaacgtttgcccctaggaagcgtagggctcctgcttcgtcggactctgatgctgatgacgaggaggatgccgaagaacatgacggcgaagaggaggaggggaagaagaggaggtggagatcgtggtcgagaaggccacgggcgaggcagtcgggggccgcgctgagactcccggctatacccccactccgagtcctggccataacgagaccggggtggagtcgaatagctccccccttcgccagaaagacttagagggggcgaaggccctggttgcattctcttcgggcacagcggcgaagggaggtcctgtaaaaaaggtggctaagaagaaaggactcatcgatgtcgctcgcgtttttagcgacgatgagtcctctgacgggactccgacttcgcccgctggccgcatcttggatctttcggccgcccctgttcctccactcggcgccgctagagcgggcggtagtaccgccgctgaggcttcggcctctgcagaaagaatcgtgacggccgcggcgaaagtattcggcagtcctccgcgtcagccggttgcatcgccgctgattgatgcgaagggaaagagagccgtcgttgagacgtccgcttcgaaatattcgctctcgttaccccgcttcgcccctggcgatttcgagacgcgggcggacccccttccttttgtggagggggtaagcaatcttgtactgcccgccagtgccccgagcttgttcaccgaactgaatgagttcgatgaggggtgctctgctataaaaagcctggctgttcgggtatgtttttcccccttttttttatttttactctccctctctttttttttacaactgacacttgttctcttcgccgctcctattttgcacccagatcctcgcggctcactgttcgatggagcgaaccgtgcgagcccgccttgacgggttcaaaagccgtcttcgggtcaaggatgatgaattaggccgcaaaaatttggagatggaggcccttgccaacacccttaaggaggtgaaggtcgaaaacaagcggctccaatcggaactggagaaagggaaggaagctagggccgaagtcgatcgcttaaaggccgatctggagaaagagaaggcccactccgccatgctcatagattattacaacctcaccgagccaaagatggaggctcttcggcaggaggttcacaaggccgaagcaagcgctgcggaggagtcacggcggttttcgcgggagatggtgaaaaccaccgagtccgggcggacagcgtgccaaacgcttcgcctcacccttactaatatgggcgcgaaagtgcggggtgtcccctctgaaggtgcctcagccttcgacttctccgaatggacccgacaggctggtggttcgatttcggactgcgccaccgcatacggcgactgctgtgcgcgcgtgtcagcggcctttaccatgggcctcctgcagcagttcggctacgagcacatcgccgagttccccaagtacgcgaaggaggattgggaaatcagcgcgcaagacatttcgcccgcacttcgtgcgtggcgaaaacaattctggcagaaggacggccgctccaccgctaaggcgcgccttttggagcagctggcgaaagcagaggcggcggacctttgtgaagaggaaggcgcggcggccggagggggtggaggcgatgcccaggaccacccagaggtgtgaggccctccgcccttctcttagattttcatagttttcttttggtgttcgctagatgtggcgaaccgttgtatattcggcaatctgccgctaacccttttgttgtaaccgaaacaggtggccgttgggcgttttttaaaatatgtataacagacctacttttcgccacttactgtcggtccaagtctttgacat

SEQ ID NO: 21064 - DNA, 4958 bp, Oryza sativa
  unsure (1)..(4958): unsure at all n locations
cgaaatggagataaacggtcgcagctataaggttttcaaggttgccgattggctgcgggtgcaccccgggcgaaccttagaagattacgatcttattcattcaagacatttggaggatatggctcgcttttggcgaaaccatcagaagactaaacgtcaggaaacgatctttcagcgtcgttatagtttagtctgtgtttcgccccctactcctcttaaggttgtgtacgatattagtagtgatgacgaacctagttcgcctgacccttccttagggagggatagtgattatgggggcgaagatgtaatttacttgtaaggtgaattgtatcgtgtgaaccttctattctttcgaagttaataaaaatgtgttttatttccttttcgctatttttcgcatcgtcacattttgtgcttttgttaggtcggaacatgccggcccctttgcgtatattagcgaaataggtgtactgacttttcagcttttcgtcgttcgttttcgatctgtagcgttctgtgttgaaagaaacgcttttgcttttatgttgatcgagcgtaacgtcgttcggctagttattttccgagacaagctgttgcggtttcaacgttcagcgagcgatgcttcggccgattcgtttcgcccccctggcctttttcgctgatcaggcgtttgccttggggtttttccacaaattatcaatcacacaaaaaataaaaagaaggcggaggacacagagattttatactggttcgggcctccatggtggataatagccctacatccagttctttctcttttttctctctatcttttttttcttgccgaaaggcttacatagtgccgaagggcttacataacggtatgtacatttttacaagttggcgatttgggtgccacccattctagacatagaagcgcttgagagaggcggcgttccaggaatggtcgaactcctcgccttcgagtgtcgctaggcaaaaggatcccgtcctggacttgtgtttgatgaggtactgtccttcccactttgattcaagcttgccaaccgctactaggttcgccttcttccttaggatgagatgaccaggcatcagctccgtcggtcgaacttttttgttgtaagttgccgaagtgcttgtggcgtacttgtgcatgtgctcgagcgcttcgactcttaccccttccaagagttcaagcgatacttcgtggccctcttcgcccccagagaacatcacccttggtgagttagcccctagctctgctggggtcattgcctcatcgccataaagaagcataaacgggctaaacttggttggtcttgtgggggtcgtccgaagggcccagagaaccgatagcaattcctctggccatttgcctttcgctgccccctcgagtcttttctttagtgcttctagaatcttgccatttgtacgttcggccgccccatttgactgcgggtgcgcgaccgacgcgaacctgatttccaggttaagcccttcgcacatttctctgaacttatcagagtcaaactgcttgccgttgtcagtaatgaactctttcggcactccaaaccggcaaataatgtttttccaaacaaacttctgtactgctgccgaagtgattgccccaaggggttcggcttcgatccaccgagagaaatactctatggccacaattacgaacttgtacccgtttcgcgctaccgagaacgggccaatgatgtccagcccccacctggcgaagggccaaattggcgcaatgggttgcaagttataatggggcgcagattggcttcggccatgacgttggcagctttcgcactttttaatttgctcagcacaaacttttaacacagttggccagtaaaccccttctctaaataccttggaggccaccgttcttgcagcttggtgcgcgccacatagcccctggtgtatttccctcgccatttcctcaccttcggcgaaagagatgcaacggagtagaggttgaagcgtcccggagcgataaagttggcctgagaccaacttatactttgtggctctgatttgcaagcgctttgcttctgcttcgtcgtccggaagccaaccagcttcaagatatttaacaaacggggttcgccagtcatttgggtcttcgcccagtttcacttggtcgattgccaagactgtcaaactgtccacaggcaaacttggtgtgtgcagtacttcaaaaaatatgccaggcaaatgcggtccgccacaagcagcagattttgccaaggcgtctgcttcctcgttctggcccctaggcaagtgttcaactgttatgccgatgaagtacttttccatggttctgacagcctccaaatattttttcattccttcttcttttgcctcaaaggttttgtcaacttggcctgccaccaacttagaatcggttcagattagcaagcgccgaactcccagtgctttcgccttccttaggcccagaagaatggcttcgtactctgctgcgttgttggttgtattaaattgcagtcttgcagcgtaccggactggtacgccattcggcgaagtgagtattgccgcaatgcctgccccgttgtgcgaccacgaaccgtcagagcacatcacctagggttgttcgacgggctcgggttcggaagcgaacacaggtgtccattcggctacaaaatgcaagtcgaacggggatagctctgccgcccatttgctaagcctacctgagatttccttgcctcggaggatttcgcccaaggggtacagcgaaggcactattaccttgtgggcctggaagtagtgcttgagcttgcgtgaagccatcactagggcgtaagcgagcttttccatttcgatgtatcttgtcttcgccccttgcagtgcttcggagacaaaataaaccggtttctggccagactctgtttcttggacgagggcagcactgaccgccaccggtgaagctgctaagtatagcagcagttcacttcctggtgttgggcttacgagggctggtgggctctgcaagtattgctttaactcggcgaatgctacttggcattctggtgtccaactgaactttcctgcgccccggagggtcttgaagaatggcagacctctttcggccgcttttgagaggaaacggctaagtgccgcaattcggcctacaagcttttgtacttcatgtacacttgacgggggcttcatttgctgaatggcatcgattgtctcggggttcgtatctatgcctctttcggaaactaggaaacccagcaatttgcccgcgcgaacgccgaagacacttctcaggattcagttttatgcccgctgcgcgcaagttgtcgaaggcctcctgcaggtcggacacatgatcaaaagccctacggcttttcacgacaatatcgtcgacataagcttctacatttcgccccagctggttgcaaaggaccttgtataccagtctggcgaaggttgctccggcattccttaggccgaaaggcatcctgaggtgacagaaagtgccgaacggggtgatgaaggctgtcttcgggatgtcaggcggattcatatggatctggtgatagccggaatatgcgtccaggaaactcatgagttcgcacatcccttccttccttcgcatccggtctcgatctggaagagttttgctcttcgtattaaccttagtcattactattaatcagtttgtttggggaaaaaatatttggggggagggggtggttcaaactgccccacgttaggtctgccctttttgtgctttgtatgtatgtatctcaatggcattgtgttggcagttttgctatctgttagatgactgagaactgtataaagaaaagatttagtcgagtttgcgcaccgtcgaatccatgtgggggatgtgtgagatttgtgctctagttgtcctctttagcggcatcctgcggtagggggatggcggcggcggcggcaccagattagggnttcatggtggggggattgggggagggggtctttgggcttatagcgatgactggagcggtggtggccgtggtggggtgttgaggcgacacctcggccttggaagaggatgagggcgagttccggtgatggcactgaggaaagattctcatataggctaagaggggtgggtgggtggttccggaggttcaagctggaggagacaggcgaataaatgggatgagggaggctctcaatggagttgaggagagggcaatgagatagtggtgatcgagggtggcctggtagggagggagtggtggcacggaggggctgaagattgggaggatgaggtggcaaaagaatgagagaaagagtaagggctaagtttgtgaaggctgcacgtctttgaacaatcgtggccatcaaaaagtgagttcagttgaccaatgaatagacaacccctaggttgattcaattgcatttggtaatttttgcgctctaatttgaatgtgaaaaattagtaccatggtgcaaaaaaagagaggaaaatatggttggaacattaaacttgattctcgtagcactggtgaagtggtaaggcaagtgcaggataagttcctcttgcattgcctctgctttgcatatataagtaccagaggtgagggggatgggacgggagtaagttcacccccgagtcaccagccaagtacacccacccaaaatatgtgaaatggtgagagtattgtttacatctgacccacccaaaaatccttgttctatccccctccccccctcgcttcttcactttctttctctttatcctccgtcttcgccctactttgtactatcccacacaggcccctcttgcgctaatttaaccattttgcttatcaaaaccagattagagtctattccaggaaaataatctgaaacgttgggcctccgtgtatacctgagtgtgcataccccactcattatactaaggctgtcccactagccagcag

SEQ ID NO: 21065 - DNA, 2981 bp, Oryza sativa
ctcatagttgaagagaagggcaacataaatcgtagataggtggatgtcatacaagaaaaacttgtttgcacccatggatcaagggtataagagttgctggttctacctgaaaaaagaaggggatatgccaaacttcagaatttcaacataacagaaagtcagaaactcataaaataccattatctaaatctgagagtggctaaatgctccatcgtgtaacaatctgtataagcaaacactcacagcttgtgcagcttcatcaattataacaacatcaaaagcacgagccatcctgctgaaaatggatgatccactaaaacttagcgtagaaaacacctacaaattttgcttgacagtcagaatcaaatattaaatgattcctggaatactgaaataagcaaaagaatgtgaaataagaaaatgaatgtacgatggctgcttcatcaagaatggaagatctaattcgatcatattcaccagcccctcgtctcccaccatctgatgagcgatccacaccagaaagtttttgttgtatctgcaaagatatcaacttatcaactcactgtaattgagttggacagaaaatacttagcaactaaaatcacgtacaaggtaatccatggaaactgctttaacagagtgatgcgccttcagtccaattcgcacaatcttaggattataggtgttgttattttcatcgcgtattcctgaaaggaagaagaataataatttagatgattgattttccgatcaataaattagtgaccagatgagcctaagaaatgttgtttagtttgtagcacatggatgcaattgaaagagtatttttattgtcagaacatttttctgaattggatcagtcagcacagaaacccctttacctgtttgcagaactcgcagcacaatctcatcaagtgctgagttggatggagcacagaccaagacatgggcccgatacttgcgattggaacttacgacctcaggtttctatcaagacaggtgtttaccatgtaacaaaaatacaaaattcatacaggcatcatggcaaatatagcaaagtacagagcacagaagcttactagctcattcccagtaggataaaaaccatcatcgccgtcaacaggcataattaaatctcgaggatttacaccaatcagccacggggaggccttcatccagtgtgcatgcctatcacatgagctctgcagtaagatagtgcaacagatatttgcagcagtattatgtagcaaataaaggaactgcataattccacagagtaagaaaagaaaaaaatacactgaaaagaatttctttatcagttcccatactacatataaaatccacatgctgagtgatcactaaatatgatagtacaaatgtaaaaatagctacaatcttctccctctaacaaacactaagagaagtaccataaagtaaggtgaatttgttatttccaaacaccatagagaacttgtttaaaggaggaaaaaagcaagcagaagaaatggacaaaacaagaaaattagctgaggatgaagcaattgaaaagagtccaattcattaacatacttgccctcaatatcaagctctggaccgtgttttttaacatcaaaaccacctctgcatgacaagaacgtaaatcatgtcagatacatgtagcttttggaaactgtattgaacacttatatttatgttttagcttctaatatctctttttttatatatcaaggtttctcctctccataacagaaagatactagtctacatttcactcagtaataaatatacacaggtgaagatattacttggtttgcattcttgcaggagcagaatggagaacagcactgaggagtccaaggatagtttgtgtttttcctgttcctgggggcccctacaaatatacattggagttctatatgaatggcatgtgacaacaagtagagcacatgtagctgcatatactctagttctcaaggcactagcatttctctaaaataggttaatgataaataatactgaaaaataaacaaatataactggaaataagcaaacaaacctggataagaacaaaggatctgcgagaaagacctgcctgcaagagataatgcattgatcaatcagacatctgatttttcttagaactaaattgagcaacaaaaaaggatattaagaataatgctcacgttgactgcatctagttgtgaatcattaaggtttgttttaagataatccataagtggctcagggacattccaagcacggttttgatcattcccaccactgttcttctcactagctgaaagaatcagatccttaaaaggaagtgatgctacagagtgcatgcccgagaattctcgcattatggtagacaagctgcaaatctgacaattttaaccataaaagaaaatagcatattcatatgtgttgtcaatgaattatgcaagcatgaaaactcaggcattctttattagcagttgaaactcacctttaaaatccagaggaagctctctgtagttgaaaaaatggaagcaatacgctgcagcctagaacagctcacaggctttgctacattaagattttttatttcacctgccacaaatgtccttagagaaatcgtttctctgccaccccgctgttccactaaggcaaaggcatatgcactgggggtcactccctcttcaaactacaaaagtgcagatatatatcaatgtgatgaattttcaatcataacttctttcttgaagagatatcgcatagaatcgatggagcattttgctagcctggcatattatctaaaaccatggaaagcactttttctggtgaaattatgtctcaagttccccatagcccttccaaatgtaggagcgcagataagtaactaacattgtcttgagttcttgacacgctatatgttccactaaattctgtagccatctataccttttgaaacatttcctatcacaccactaaggtgctaaagc

SEQ ID NO: 21066 - DNA, 663 bp, Oryza sativa
tctacaacaagaacaaaagtagtggaagaaatcaccgatgttcaatttgatgaaactaatggctaccaagaggggcacgagaatttggatgatgtaggtgatgaaggcttgatgagaactatgaagaacatgtctattggagatgtcaaacctattgaagtggaacacaagccatccacctccacttaagatgaaccatctacttccgctacgccaagccaagctcaaattgaagtggaggaggagaaggcacaagatccacctatgccaccaaggatacacaccgctctttccaaggatcactcaattgaccaagtgttgggtgacattagtaagggtgttcaaactcgatctcgtgtcgcttcgatttgtgaacattactcgtttgtttcttgtcttgagccaaaacatgtagatgaatctctttgtgatccggattagatgaatgctatgcatgaagagctcaacaactttgcaagaaacaaggtgtggactttggttgaaagacctagagaccacaatgtcatagggacaaagtggatctttaagaacaaacaagatgagaacgggttggtggtgagaaacaaggcaaggttggtggcacaaggtttcacacaagttgaaggtttggactttggtgaaacttttgcccccgtggcaaga

SEQ ID NO: 21067 - DNA, 797 bp, Oryza sativa
accatatgatcggcttgaattctcggcaatattactgcacctaggacaatcttcaatagatgacagcctcataccttcattccaacaaaatctaaagaactcacaaccccaatgaggatcaaaaccatcatcgtcttcttcatgatgcttctcctgctgcttgtcatacttcttctgacatttgtttataatcttagccgaattcatctgaaaaccccttacacggcccctatcagctgttcggccagctgtatgcaccatattaacaggaaaaggattgccatcaaccttcatcggcctcttagagtcgtcaaacttgattttgcctccttcaatagccgcttggatctgctgcctgaagaccttgcaatcattagtcgtatgagatccagaattatgccacttgcaatatcttttcttgcccaattcttcagccgatgaaattgtgtgaccggcaggaagttgaatctgcttctctcggagtagcaagtcaaaaatcttatcaaccttggttatatcaaagtcatacctttcctctttacctgagctctttacccattggcatggtataacattcttacttcttacccactcggctacagctatctcagaatcatcatcctcatcatccgatccatatatataagggcaaacatgattaacctttctagaatttctcctagcctctgcatacctttgttcatgcaaggctaccttctgtgtaaggtgtgacaagctttcaaagtattcagatgagaacttctccctaattggagcaatcataccctgaaaagcca

SEQ ID NO: 21068 - DNA, 2042 bp, Oryza sativa
tgggagaattggcaagtgggcatatgctttgattgaatatgatttggcttatgaaccattgaaatctataaaaggccaaattgtagttgattttatagtagaccatcatgtagatattgcttatgaagatgaggttttgcttgcttgatgttaacccttggaagatttattttgatggttcttgcaaggaaggtcaaggtctaggtgtagttttattttcacctagtggtgtgtgttttgaggcatcggttcgtttggaatattattgtacaaataatcaagtcgaatacaacgctttattattcggcttacaagtgatggagatgatcggagttacacatgtggaagcatttggtaattcggaattagtggtgcaacaagttgccggagtttacaagtgcttggacgggtcactaaattggtatcttgatcaatgcttggatattattgccaattttgatgattttgctattagacatatttctagacatgataattctagaggaaatgatttagcacaacaagcatctagctataatgtgaaaaggggattatttctgatattggaaaagccagtacttgatttcaaatctttggacgaaattggcaaagttacagaccaggggcggtctgaccggcattgcactaccggtctgaccggtgaccatgggcggtctgactggccggatgccgccggtctgaccggctgacccgagcggtctgaccggtcctgtgtggccggtttgaccggttctggacagggagctacgggggcacgattcattcaaaacggaggccgaattagttgtaaattcagatgtttgtgcccaggaaacagaagaatattggagaattcctttgattagatatttaaaagatcctagccttaaggttgatcggaagattcagcggcaagtgttcaaatatacatggcttgatggagatttatatcgccgaaatatagatgcagtgctattaaagtgcttagatgatgaccaatctaaggttgctatgggagaagttaatgaaggaatttgtggaactcatcaatcggcccataagatgaattggtttcttaggtgagcgaggttctattggctgaggatgattgcagattgtttcaaatattatagggcatgcgaagcttatcaacgatttggcaatgttcaattggcgcccgccgccatgttgaaccctatcatcaaaccatggccgtttcgaggttgggctttggatttcattggtcaaatttatccttcgtcaccaaaggggcataggttcgtgctagttgcaacggattacttcaccaagtgggcataggctctagaatatgactcatatggaggtaattgactttatattgaaacatattgtccatagattcggtatcccacaaacattgactacggatcaaggagcttcttttatgtccaaggaagtgaagagttttgccaaatcttatggtatcaaatagttgatttcttctccttactacgttcaagctaatggacaagccgagtcaagtaataaaacattgctaaagttagtcaaaaagaagattgaggaacacccaaagaagtggcatgaggtgttttctgaagcattatgggcacatagaatatcaaaacgtggtgctactaaagtcactccttttgagttggtttatggtcaagaagccgttttgtctgtctctacagttggaaatattacatgtgttctctacagttgcccgtctcagtggtcaaagctattgacactgcaaggaaaaattgtctctggaggggaaacaatccaaacttacgtaaaagatctcttgcttcatgggatttggtatgcaggccaaaggaaaaaaggtggtttaggagtcatcaacttgagagttcaaaatacaacacttctgcttaaacacctagtcaaatgggttcatttgatctggaatacttattatggctccaaagtgcctcatttggtttggataaaggctctttctagtggagagatatagtggttttgtctaatatcctcaggggaatttcaaaatg

SEQ ID NO: 21069 - DNA, 6884 bp, Oryza sativa
acggggtgcatggagttcaaggtgacggtgctcaggggctgtagcgaggaaatcttaatagtgacgtggcacaggactttttcaataacttccaagatcgggttgattacgctgtacatcatgctttgatcaatcagtctggggtgttagtcaataccctgtcaaacatgatgaagtcaatagccgatggttcaatagctgaacatcaggctgcaggcctggtctatttgcaaggaggtgtttttccaaattatcagtctttgattaccgacgttcagtcatctactcagccagttccctccgttacacccacaacttagccgacggcaccggcatcaactcccctacctgctacatcagctatagcgccaggccagccaatgaaccctcggctattaatgagagagcatccacagcatagtgggcaggttgcgaatcggccaacccaaggtcaagttgctgcaatgtttttgccgcctcaacatgcggttgatctaatacagcaacagccgattcagcaacagtcgattcagcagacaccccaaattcagcaggttgtgcaaccaatccagcaacagatcatgcaaccagcacaaccaatccagcaactggtcatacaaccagttcagcaaacaccaccaaggcagcagtctctgcagccgattcagcaaacgacgttgaaacagcagatcgtccagccgatccagcaccaaggttcagtgagcgcatcggccgggtttgtagcgcctggtggtcagcctgtacaacaacttttaaaccaagttgtcccagaacatttggttcaccacgtacagctggatagcacagtaatgcctcaggttgttcctgagcacttgctgcgtaatatccagccagaccctcacaattactaagggggcaacctgagttatcaatatcaacctccttccccgcaagcccaatatcggccagggggattggctcaacctcagtttgcatcccaatacggtcagttcgagcccatgcagcgacagtcacaaggcgcaactcagcaacgaccgtgggccgatgtaattgctgacgtaatgagggaacagtttgggcttaaaccaaaagagactagaaacttgtatcggcagccttaccctgagtggtttgaaagagttcctcctcccaatcggttcaaagttctggacttcttcaaattttcaggacaagatggtgtgtcgacttatgagcacattagccaattcctggctcagtgtggtgaagcatcggcggtagacgctctgaaagttaggttattccagttatctctgtctgaatcggcttttacttggttttcctccttgccatatggtttgatcaacagttgggccgatttggagaagcaattccacagctatttctacagtggggttcatgagatgaagttatctgacttgacggcgattaagcagcggcatgataaacctgtgcacgagtatattcagagattcagggagataaggaacaaatgcttcagcttgagtttaactgatgcccagttagccgatttggcctttcagggtatgattgctccgattagggagaagttctcgtctgaagactttgatagcattatagccgatgacggggggagatggcccacctccgttggggatcagtcctggggcatacttgatatccctgccgctgttgctttggtgagggggagaagattctgttgtctgcaaatcaggaggaaagttagctaagggctaatcaaccaagtagttattcaaataaaatcaagtgagttaggacttacttgggggacaatatctggaaagagatctatcatatacatagaagccaattgatggaataagtgtagcttccattcaccccaccatctgtcaaatactttgctcctaaaggttgccagctttatggtgtcaatgctgcctagaggaggtccttggagattgagcagccgatccatcattaaagatgatgagatttctcctcggcattggatcttatcggcaaagaataagccgattgggagttggcccattccaaattgtctcgcagaactcattggatgataaaactcgtaggaaacttggatgtttctcccttgatgaatgccgactggaaggatgcatggggtgattgcagataagaagatttctctgggcttctgatatctgtcattgttgatgtcttcgaatctgaagtcccatggattttccagaagtgttgagtcccatggacggccgtccgatcaaatggacggccaagatttcgccttcaccgctgaaattgctgcacgagtcaaaccctaaccctaatccccatttctcatttcatcttcctcccttttcctcgttctcttctccggcgagccagagtgcgagtaagagcgaagcaatacggcgggaatggcaatacggcggtccggcgaagcaagagcacgcaaggggcgtcgagcgccgagcggctccggaccttgccggctggggggcggagcacatggcagcgccaagccgtgttgcttttgcttcccgtccccgacagcaagcggcggtgacggtccagcgagcagcgcgcgtacgagcagaagggactccgccaggcgccccgtgctcgtcggctaggggggcgcgcccgagggcggcgccaagccgatgcttcccgttcccggcgagggacggtgacgaggtcctccaagacgacgcggatgcgacggcgaggaggtgaaggagcggcggcgccgcttcccggagggctccgacgagcttaggatttcgaatccggtaaataacccaaactcgaattaattggcttgccaagatttggaattttggttctttagggttcttctcaattttggggatttcgggtggattaatacaatccggcttatctagagttctacacccgaaattagggttcttagcttcgagattttaggccgatttgatcgggctgattgggtatttttgggaaattagggtttcgcaaaaccgtggcttaattccctcttgcttaacagtggggaatttcaatctagtttatccccaccttcttgattgctaagtgcttcccgaaaccatagctttggtctaggaaaatctaaatgcgagaattgggaatttcaatcttgtttatcccaatccttttcttctcttaaaaacaatgaaattaaactcttcaataattttgcttcttctactgttggccgagaccaacagtataacagggcttagccaattatgcaaccaaggcaaagagattaatctagtctaattaactcaaaattgcatcatgccgaatagcaattagggtttaattggcataatggcttcacttaaggatgatgggatcaagaaggctaagattaggctctgataccacaatgttggaatttaatccaactaattaattgagtcttagcctaaacataataccttatgcttatgcggaaattaattgatcactgacctgagatgaagccattgctcttcttctttcttctcctttgtttcttctgttgtgagatacctcacgaaccccttccagtgtctaatcgatcgggcgattgatttagggtttagggttggagagagttgagttgtcacccatcctccctccttctctttttttatatagcgacactggtggggctcgggggtttatctcaatctaaatttgaatctattttgtaccgatcacacaaaacagatttatctcttagtttgtttcttgttaggataggaaaatcggtggaattttaaccttattctaacaaaccggcattagccgataaaatcaaccaacatatcaattagatggtctacttgatccctgagtctgtccagcaaccagaagacaaacattttataggctgtgtttagatccaaacttccaacttttttcatcacatcaatctgtcatacacacaacttttcagttacatcgtaccaatttcaacccaaacttccaactttggaaggaactaaacacagccatagttgttgcaaattgcaatccacttttgacagcgggatgcctaacttggcacaacccacatggtcacagagcttggctttattattgttgttattatttgaaattagtattatatccgatagaacacttgtggccgtactataagaggaagctttcaatccgtagtagtccgtactttcgtcgagaggacctacagttttgctagaacgcaatcatcaggtaccacgtttgcttttgcgtcggcaacagctccggcagtgagccccttgttcacctcctgtattagcctctctatcactggattcggcaaccttatgggcacaatgacgcctgcctcaccaacctcattcctcccctcaaggtgaaacgtggccagcattgtcgtcgccggccctccatacaccggctttccccagccgaagtcgatggccatcagcccggcctgtgtcatgtccgagatgaggtacgtcctggccttagggaacggcggcctccggtgagccgcgttgaagttggccaccgactgcacatacccctcctccgacgcacgcgccttggcctgcatgagcagccgcagcgcgtagccgaagggcctccgccaaagctcccccgccggcacggacgcggcagcgaacacaatcgcgttgccgtagtagcccctcggcacgggccgcttgctccggttcctgacgcgggcgttcacgaacatgtgcaggcggacgacgtctcccgggtcgtaccgcagcgcggcggtgcggcagcgccacatgaacgctcccaccaggtcgaaccgggagctgacggcgcgcaggtcgggcggcgcctgcgacctgagcgccgcgatctcactcgccccaaagaagaagacgtggtgtgcgtacgcgtcagtgggggagagcacgtccttgccggggttgggcaggggtgtgtactccacgtggtcgcgcgtgacggtcggcggccatcgggcggtgagcacctcgcgctcccacaccgggcgcaccgtcggggctccgtgcacgccacgggcgaactcggtcagtgcagtcagaaactgcactatcccagagccgtccgccatgcaatggcatatgtgcatcccgaacacgaagccgccgcacgccagccgcgtcacctgtgtcgtccgaatgcatgtaataaccatcatttgttattagacgtagtacgtaccatgcatgaattttactacttcactgtaaaatgatttgcatgctaataacctgaataaacagcaaaggacggtcaactacatctgccgtcgggctctccggctcgcacagcaacatgtcatagcacggcaccggcggcgccagcgacgtcccgagctcatccatccggaagttggcgtcggcctcgacgaacacgacgccttcgccggtgcactccaccacaagcttcctagttggccgcagctcacggaaccgaccggcgacggggtagaagtgcacgagcgtctccgagatcgccgccttgatcaccttgacagggtcgaggccgtccttggaggggctgtggcggtagaagaggatgccggagcggttgaagcgaaggatgtcctggtcgtcgatgtccgacagcatcttgaactcgtacggcgtcggtttcgccggcgccaccagctcgcgctcgcgccgcctgacggagaaggctaaggtcggtgctccggccatttgcaccctaagtagctactaagccactgagctacgtgagagtacttgttgattataccaagattctttgatgtgtacttgtaaggtaattggaacataaattttgctctatatataggcgtgccacggcgtacgagccgagagagtcgatagattttgatctatattcgatgtggacagagaaaaaaaataagtttgtaaaatgatggtaaaaactagaccattagccgagagggtggtgaattcacaaattggctaaaccattaatgcacacataactacacgaggaaaaaaatggctaaatctaactaataaagaagatcacatttaacgtgtagttagtcgattgaaccaatgctttccagataagtgacttcgtgtctaacaatgcgatattacagtacgacgatgagttttcactggcagttcctataggcttctagcatcgtcctggattgaattaagcttcggccgcatgcgttcggtagatatatatatatatatatataatagttctgattccccgatgtaaccatcaagccatcgaattagtgtttttttgtcggtgtgaattcatgtcgcgttcattctgactgtccaaagaaatcattgtatgtctgtgtcgcttgatcattttcaaatgtggctccaaacgaatctgtagggcacaccgaatttataccgtctggtgtcatttgtgtctaccacatacttttgtatgagtgggatacatacacgcataaatagccaatcaaagcacatgtacaaaaagtgattttggggctaaagtcctatttattttcctccatctatttcctaccaccttcataaaaatttatccaaaatcataaaccatgccatttacatttcctttccttcctatttgagtgcttcaatataaatttccaattctctttagtatcctggaaaccctatttgaattctttgtcaacatccaaagagtccaaaaacaaactcccttagttttcatctccttgaaatcctatttaattttctttgccaaagttcaaaagtccacaactatttctttttaattttcatctcctttgaatcctattcaaatttatccatacaaaattcctagaagttaccattctttcgggctgaaatccccatcttttggcccatccttcttttcctctccctccaccctttctacttctcgggctggcagcc

SEQ ID NO: 21070 - DNA, 2707 bp, Oryza sativa
ctgtgccgttgtccttctttccacgccactgccaacgaattctccttctccttctcctttgcaaccgcctccaatcaccgcctctcgccgcttaaaagtagacgacgagtgtcacgcccagaaattcactaacccaaatttcaagcagaatgtgtattaaatctctatccaggaccagccagagtacacaaatgacaatttgatacagttccacctcttacaaaaataacaaaaataaaactcatgcgcaacgaaaaataaaataaactagacttaatcttcacaaccaaagcgaagcttcctccataaaccacaagaaatcatcgacgtctggaacaagctcaatccttaaagaactcaccatctgaaccaacctctgcttctggggtgggggaaaaataaagtaagaccgagtaccaaccaccgtactcaacaagtcataccaacaggaaggtatgatgcaaggtactctcaaaggaatggctcattggataatttgcagtaaaaacagcattatataaatcatattttgaagaagtaaaaacaatatataattaagcaatactaaatcatcactgtccaacgctaaaaccatgttgaaacaggcccaaccaaaccacatgaactacaccagttctataagtcatattattatagtgagactaatcacggtgagctggttgaccgccgaataaccgcgggcacagctattcgaatagttttaactctgatcagaggtgtacaactttacccacaagacacgattccacacatgttaccatatcccgaagcaccaccgagatactgcaaaaggggaaatcgtgacaaaaaccttgtgccaagtcaaacagtcccctctcttgcctaggtaaatccggctacaacagagaccaatatatagatccgaactgcaccatcgcctctacccttgccatgctatgtcagctagcttaagttatactctagatttagcctagtgcccatctagcctgtggtgagtatgagtacatcttccagggattcttgagaaccggtccttaattatgatgaaccctgagttccactcgacactcaaggctgttgttggcccgatctttcagtgagttgagataactatgatttgggagaaacgttgacaatccgactacaaccgtacgagacgttgtgctgcgccttagcgatcgatacacctttccgtgggttgttgatattgccggtgcagatcaaccctattcctgcaagcaaatcgaagaaacaagcaagaacaagataaaagcaatctgatattgcaaataggaatttaatacaaatgataagttggggtttcgaatacaagcagacgggcggtctagccggcacgcgcgctgcaagcaagtagcaatggctaaactttaatctatcaaaacccaagaaaccctgaaggggtacctacctatttataggggtgggaggacgaccaaggggtgccaagagtcgttctccacctggttggggcgcaccccacatgggccccacttgggccggggtcccagacgaagttacaagcccataggcccattacaggtgacgcagcaccttgttgcttcaaatgcggctcactaagatggaatttctcaattaggctggatctgttggaaagaggactccgagagctttccatcaagtactcacgggccgaaaacggagctcgtatggagatttggcggccgtttgaaatcagcagtgcagcaggtggccgaatcggattccagcacttggaggccttgaccttgatgtctacttgttcatccatgatatgagcaatgattgtatccgtagtagctatggtcacatgaaattgtcaagggcatgacttccaaaatcatgcatgtacccacaacccaccattaaagcatattttagttttattaaaccataaccatggtgctacatcataatataattaaggactaaattataatgagtcccattgtgagctaattgatctaagcatggctaagcattcctaaaccaatcatctaactcaagttatcaatggcataagatattcaatagactgagtacgataggcatccatcccacatgacattctaaaacaatgccatttgatagaaagcaagggattttgtaaaattggctcaatatgatcaatgatgtatgcgtgacttgccttgctcttgagctgactgaacctcggcaatcacttcgaagtaaactggatcactggaactgatggaatctaaacgacaaacaaagcacacaagaaatacaagcaataaggctactaaaacagaaaaagaaacaaattttaatggattctgttcattttaacggattcactgcaatttgaatgggttaaaacggagctcaaattattagttatgaattttacaagatgagctgtgttattactaataatcgaaaaaccttagtcatttattacatattattgcccatagataaaaagatcaatgaaaataaacctccggtaagcaagcctcacgaattaacgactcaacgagccaatccttcgtgacacgggactatccaaacggtcaaccgaaccggcgaacaaagcggcggctcagaacaacaaccgaaaactaaacatggtttatggcaaagactcggtacggcaaacgataggccagtaggaatttagcgatgcacctatggctttgcaacatggctaccaagatacgacaca

SEQ ID NO: 21071 - DNA, 2834 bp, Oryza sativa
atgtggtgccgtcttagtaaaagaacgtaaacggaacccgcgaactaaaacggtcaaggctcgtcatgcaaaacgaaaccgcggacagagaggggagtgaatcacgcactattcacgaccaaaggtggaggacaaagattattattattaattcaaatcttgacaaataaaattaacaacattaactccgatgctccgaatattcagctttaagtcctgttagtgattttagagccaagagaattcgaaaaaaaattctccctgacaattccgaatattaaatacatttgtaattaagtttttctcctggttaaccaaagtaatttctatagttcgatttattggtgaagtagaactacggaaatagggaaaactataagtgcgacaaacctacccccttaaacggaatctcgtccttgagattcggaagaacttgcgaagagatgcggatgggcggctttcaactcatcttctcttttccatgtcgcctcatcttccaaatgatgactccattgaactctgcagaacttgatcactttattcctggttctcctctcactggtctcaagaatacgcgtaggcttttcaacataagttaaatcctcatgtatctcaattctgtcgggacttgcctgtaactcaagtactcttaagcatttcttcaattgtgacacatgaaacacatcatggatactcgccatattgggtggaagttccaactgatacgcgacttctcctcttcgttcaagaattctatatggtcccacgtaacgtggtgccaattttcccttggtttgaaaactgtgcacccctctgagcggcatgactcgaagataaacatgatctctggcttcaaaactaagctctcggcgacgattgtcagcataactcttctgatgagattgtgcaatcctcaatctctctctgattgctcttaactttttccttagcttcactcaacacttatgttccaaacaactgacgttctcctgtttgatccaaaaacaaaggcatacgatattttcttccatagagggcttcaaacggtgccatctgcaaactggcttgatagctgttattataagagaactctgcatacggcaaattcttatcccaagatccaccaaaatcaagggcgcaaactctcaacatatcctccaaaatctaattcactctttcagtctgaccatcggtctgcggatgataagctgtactggaattcaaacgtgttcccagttcttcttgcaacttctaccagaattttgaagtaaactgacttcctcgatcatatacaattttctttggaacaccatgcaaacaaataatccttgccaaatacaattatgcttatcttttccctgtgtaagtagtgtgcactggcagaaaatgtgccactttcgtaagtcgatccacaattacccagatagaatcatgtcttgacgacattctaggcaatcttgttataaaatccataccaatttcttcccatttccattccggaatttggagaggttgcaacaaacctgctgtgatgttctgctttaactcgctgacacacaccacacatagctacaaattcagctatctctctcttcatactgacccaccaaaatttttccttcgtcttgatacaacttagtactccctggatgaatagaatactgggtctgatgagcttcactaagaatcaaatccttcaattcctcattatcaggcacacacaatctttctcccatccagattgttccttgctcctcttcaggaaaatcgcgggctttaccaacccgcataatcttcttgagttcggctatcttgctccacgagcgtaggttgtgcttccaacatagtaacgaaaccatgttccactatccccaaattcagacgctctaggtcttgaatcaactgactacttactcctttttcgaaacatgttgcattgcaataacttttccgactaaaagtattgtcacacctagagttttcccttcccttaggtttcaaatcattaaaaaatggcttctagaatttgccttggttaacccggagaaaaccccaattaacaatatatttaataatcggagttatcaggtgtaacaaacccaaaatttcaggacttaaaatttcttgtcaaaatagttagaggttaacttctccaatttttagagtcaaaaatttccgttttaatttaggtgatgaccaacttaaatcattgcatgattaaaatttgagaacaaaataaaaccttttcattcccaacattagactagaaatgtcaccaagtatatgagcatacatgtgcataatgcatgcctaggctcgagtctcatgtgcatttggattttggtcttgcttttcataatatgtctcatgagcataaactaaaagggttaaaattactaaacaaaactatagttaatcttgggtgataacatgtggacttaatattaaactcaaatatcgtcttctcagcccaaaagaagtttaatgtaatccctgtaacaatattaggtgcaattatgaagtgggaacacatatacaaagtaaagtaatcctaattctctaaaatattatgtgcaagttaaaatcatggaaaaaattagatagataatgtttagcacaagcaattcactataatattggtacaagttaataactaagtttaataccacaaattaatcagtcaaagcagaaaactaaaaggaatcaaattaaattttaattggctaaagccatacttcatccaaaagtacatttaactgctcataagtgaacatgtaaaataatttattcaaatactagattatttatcatgcctaaatataatttttctagaa

SEQ ID NO: 21072 - DNA, 11635 bp, Oryza sativa
catcacttcctccactgctccagccgagagagggagagattgagcgagccgacgcgtggccgcaacgtgtcgtcgatctcggtttcccttttctcgctctctactcctcccagacgcgtcgccattctccattcaccactcagagccgaagaaaccgagggaggaggttctctgcctctccattgccccaaaccttgccgccggccgtggagacgacgaccatcgccatcgctaattgggtagaggtcatctccaggtttttcgcgttcccttctctccacacagtgccgaaccatttctcttttgaccacctcccgttttgtgttttgtgcatcacagccaccggaacgcgaccacgccgacaacgccctggagcacgcaccggagcgccgccgcttcaaccatcgtcgttgtccggccattcttgaccacctcggagcaagccgctgcgccatcgtcatcgcctcaacctcctcttcaatacgcctcaagaaccccagccggagatgtgaaggactcggagaacgcatcttttcttcaccggcgccgatctagaatcgccttcgccatcatcgtcgattaccgctgcctcggtgagccattgtttgatttctcgcgcatacaccatctccttgacctcacaaacctcgtgcatgcttgcttgtagcagctcatcgtcccgttcgagccgtcgtcgttcacccgaggaggagcaccgtcgccgagccgttccacaagtcaccgctgccgccaagacctcgacaaccctagctcgacccacggtgagcatcctgaaggctagaagaccacatgcatgcatcctttttgttcggaatcgacttccatgcacacatgcgctttcaccccaagaaccaccgcagctcacactcgccatcggcgctactccgatatcctctaactaagaaaactagaggaatggaatcgcaagatcatgctcttcattttatcttttaaccccaactccaaccgagccaccaatcgccgccggtgaacccgggatcgagctcagccatggctgctctgcctctgtgcgtgtgaaaaaggagtcagggacttcattttgagaatttaaataaatataaggttcattacgtaatgttcccaatcaatgacatatggaccttggactgcgggttgatttcctgattccctaggggcctttttgcatattggcctgatactgacaggtggaccccatgagtttaaaatctgaaaatgtaaaaagataatactaaaagctttatattttcaacaggaaagcatgtaaacttataaaatccataacaaattgaaaacaactcattttagagtaaatcaaatttctgtgaactcaccaaatcaagaactttagagttattgcataaaactagacattcactgtacaaactttgtctctaaaattggtctaagataaatcatacataaagcatacacaaatttataaaatgcatataaaattcatctcaaatcattttatagaaaactcagtttctatagatccaccaatttatgttttcctataaagtaaaatgaaatagtatacatactttagatcaaatgcctctgaaactattatctttaaaatgactagttttaggtaagctgaattttagaaattcacataaaattcatcttagatcctttttgagtaaacccaagttctgtagaatcaacaaaacgtatacttccatgttataaaataaaattatacacctactatgtaataaaagcctttaaatatttatataagtaataaccaagatagagcaacctttactttgtaaaatttgtagaaaattcatctttagttcaaatgaaatgaaccaaatttccatagaaccagcaaatagtgagcttcaacataataaaataaaatattgcaccttttgaacatattatagctctaatctttaaatagataaccttggagttaatcacctagtaatggttaagcaaaatatatgtgtaaggtagttaaaaaaatgcattctagctatgaataaaccaaaataaaacttgttagaccagagaggccatagttccatccccatccactaaaacatagaagaacttggctcatataacaatttctaggttaatataatatattgctagtttagtttagagcatctctagtttataaaatatgaaccatagtagtaaagaccataaacatttgaactaaaaatgttttagttaaccaaattattccttttattcaacttaaacaggaagtagaatgttctgaacctacaacttaagagtcgtgcacatataaaacactatatgcctaaaacacgttgtaacttgtaaaatctataagaaaatcattgtaactccaaaaattgtgaaaccaaatgagttagtcttataaaacacatctctacacccctgtgaagtctaatctagtaaaaatcactttacaaaagtatttcataacactacctaagactatactactataaaccgataaaacttctaaaattcataactccctaatggaataagataaaataaaaattctttcacctaaaattcattttagaccagtacctaatcactgtgcataaataatgcattttagagcattttggattttcagctatttcggtgtttaattgcataacgtgtcctttatctagataattgcataatcggtgaaggagtggattaggtgctaacatttctctgatcaaggcaagttttctcctcccatcctttgaacacattgaatcccatgatttgaggaatgaaaatatttgtttgcaaagttgcatgtgaacttagactatattggtatttgaaattgggttaaggtagttatgacctatttgctgcataccccaccttgaataattgatcctcttgctatttgaacccctagaaatggttagagtacactctttgtgctcaaatgggtttatatatgctctatttgcaactacttgcttagccatgcttagaactatgcaaatgctcattccatctataattaaaatatgattttgatacatgaacctttgctggaataaaatgaatatgatgggtatttgcgaactaaaatgtgtaaaatgtgattttatacttgggcggcaagtggtgtgcatatggtgttagttgcataccgatagggggagtgtttgcccaagtccataaggaccgaacttgtgtcacccatttaaagttattcgtacatccacatgtgctagtatgggatggcctaagctgagtaatctatttaggactagccttgcattctggtaggccggtgtgtatgagttcgtataattcagaggggcttcctatttaccccgccgtggtagtttaggtgactaagcgtgtccaatacaacggtattgtgccacgtggtgggttcccgtcgtgtccgccaccacggcgttaagtttaaggcgtgggcccgccacttaacggttctaggtatattccaagtatgcctaggatggaggaacacgtatcgtgctggtgcaaggctaggctctaagtagtgtaaaggcttcgttatgacctctagatcacattcaaaatgaagagtgtggtggagtcttgcaaactcaaaacaaactagagagttcatatcatgtgggtaaagctgtacaaactctgcagagttttttaaactaatcgattagccgtgctcacggtcatgagcgctttggtgatgtgtcatgagtatagactatgttttaaaaatgtgatcatgtgacattggtttgaaattgatagatgtgttgagttgtgtgtgtgaggtgatatattatgacttattgtcaaaggatgacaacaagagattgattatgatggaattatgatgaatttaatattgaaacttaaaatttgttttgttaattgaagcatcaactcctttacaaaagaattgcgaaacaaaacttgctttatgctgaaaatgaactacatattgccttcctttgaatatatgccttacatgtagtatggtaggattgacttgtgcttgccagtacattaacttgtttaatgtactaactcttgctgttgatataaccttttatttgcaggtttagtcttagtctttgagtgatgcgggttccgattgtttcttctaggatgagaacttaatggggtaaacccctagtcggtgtgcttgtgattgggtaatcaagcttccgctgttctctaataagtctatttggccggtcggcctatgtaattattaagttgttgtaagtcttaagtttctttcatcttagttgtgtttgctatgtataatcatgcttaagatgaaagtgtggatctagtgcacattctgggaactagattcacatgagtatgagttaggaatatttgagaggttgtagatctttagccatttttgtcaagtctcctgaatgtgcaatacatctggtcgccgccttcgagtggtttgacgggcacatctcaggctgaagttgactggcaggctaagggcccagcaatgtctccaatattcctctctcgaggcgtcggatgtttcattatatttgtttgatgacttgaattattcacttcatctctcaaatataatggaaggtctggagagcctacgacatcagggagaatttttttcgaaatctctttgctctgaaaatcactaacatgacttaaagagtaaatatcataacaccggaggccgtgttgctaagtttaaaagtgtcaagactcctctaatagtagtttcttcctttgcccttggttgtgaattgtgcccaattcactcccctctcaatccgcggtttcgttttgcatggcgaaccgtatccgttttcgttcgcgggactgtttccgttcttttcctaaaacggcaccgcattgattttcctttttgggaaagtcctagttccctcctctttcttttttccctctccctctctagctagccgagcgcccctctccccctcccccgcgcgcgccgcccctcctcctgcggagtcgtcctcccaatcctactcccactaggattcaccctttcataatctaatcctcccctgtataagtaattcctccccttgttttttttccttttcccaaccaatagctctagtctccacccaagccgctgccgccttagcgccactgctgcccagcgctgtcaccgccgctggttgccatcaccgtcgtcgctgtagcgccgccggtactctgttctcctcgtcctttgatgtaattgcttctgcaatcatcaatctagcaacctaagtttttcccctttttgcctccctctagcgtcgtcgtcgatctcgggtgctgcccccggaaccgccgtcgctgccgtcgtcgtccttccccggtttttgctcctcggtgaggaatccctcctgtttttagggttttgcttccgtgtgtcgtagattaattgtctaaaccaaacaacacttttggtcaccgtacacacttcgtaatgacccggtgcaacgcacatgcacttttgctagtatattgtaaaatacccttctcaaaaaaatagacttggaagatttgctactccgtgcaggcagtggcggagccacatggtggtccgtgtgggccatggaccacagtaaaatctggcccaaatgcctattacccttgttctgatccaaacatagaaaagaacgatgcttttgtttcataagttgatttgctttatcgagttgttgttccggtttccgtccttcctagttcccatcctgactacgccatcgatcgtgcgagtgctgctttcataactcgacgactcaacgcttgggattgggggcccatgtccaatggcggcaacaggcgtctggcgactaggatcaagagcagtgttcagcaagcaggtatatcactatattagtttcggttcgattttgggaattccgattagaattggattgataaatccgttaaaacaatgcataatcctattgtagatttgttgaagcagttctatgttaatagtatattaacattaatagtgttcagaaaaattatgttaattaaattggaccaccctaatcctagctacaccactgcgtgcaggcaccgtcaattagttctatgttgtgattagggcttggtgagtggaattggattatttgctactcatcagcgtcatcggtgtttgcggccttggacaaggacaatgacggcaaggtttccgcgttcgagctgcgtggctgcatggtggtggagcttggcgaggacgtgttcgaggaggcggcggcgatcctcggaaaggctaaggggtgatcgatcgcccctagcgcggttcccccaccctccacgtaattttctttttcggcaccatattacttttctattttagtaaatttatgcacctaaagtttgtacatctcaagtttacacatataaagtttagagatccaaagtttataagttaaaagtttatatatctgattcaaatttgaatttgaattcaaatatttttatatatagtatttctatacatctaaagtttatacacctaaagtttatagatccaaagtttataagtcaaaagtttatatacccgatttcaaatttaaatttgaattatatccgatttcaaatttgaattgaattcaaatattttttatatatagtatttctatgcatctaaagtttatacacctaaagtttatagacccaaagtttataagtcaaaagtttacatacccgattcaaatttgaatttgaattcaaatattagtttatagacccaaagtttataagtcaaaaagtttacatacccgtttcaaatttgaatttgaattcaaatattttttatatatagtatctctatacataaattttttcaactttgtttttttattttttaaaaatgtatggtgtagtaagaagagaagagggggtaggaagggagagacagtagcttatagggggatggggggtgatcgcctggagcggtcacccgaccattagccgaacccggtgatcctcgctacggccgactacgacgacgacaggttgcggaaaagaatatattctttcactgatttgcgggttccacatggattttatttttttgtttcttctagtgccacgtcaatgccacttcatccaaaaccactctcaaaactgccttgcgacctaaagtgatccagttttacaagattatggatgcgctatatctggtatttcggtgtagggatgattttcaaactctgctacaagatgagagaccacaaatgaactttttccgaataagatagagcggggaacttaatgggctaataccaagtcaatgggccagatggtaacgggtcgacccgtcccggcccatgtgcaggccgtaccgttgcacggcacaccgttccgtaatctccctcaaatcgaaatcctatttgccccacttctcccctgtctcttcctcccacaactcccctcccgaaccctaaccctagctctccccccgcgccggcggcggccatggcgctcatcaccccagctagcggcgggggcggcggcggaggagacaaagccccaccgtccgcctccgacccgagcctcgggttcctcactaagcgcgacacggaggtgaagctgccccgggcgacgcgggtgaagaacaagacccccgcctcggtccagatcaccgcagagcagatcctccgggaggcgcgggagcggcaggagcccgagatccgcccgcccaagcagaagatcaccgactcaatcgagctctccgagtaccgcctccgccgccgcaaagagttcgaggacgtcatccgccgcgtccgatggaacgtcaacgcctgggtcaagtacgccaagtgggaggagcagcaacgggacttcgcccgcgcgcgctccgtctacgagcgcgccctcgacgtcgcccaccgcgaccatacgctctggctcaagtacgcagagttcgagatgcgcaacaggttcgtcaatcatgcccgcaacgtctgggaccgcgccgtttctctcctaccccgggtggaccagctgtggtacaagtacatccacatggaggagctacttggcgctgttgccaacgcccgccaggtgttcgagcgctggatggcctggcgtcctgacacagctggctggaactcgtacatcaaatttgagctgcgctatggtgaggtggagcgggcaagagctatttatgagcggtttgtggctgaacacccacgaccagatacgttcattcgatatgccaagtttgagatgaagcgtggagaagtggagcgcgcgcggcaggtgtaccagcgtgctgcagacctgctcgcagatgatgaggatgcccaggtgctgtttgtagcctttgctgagtttgaggaaaggtgccgggaggttgagcgtgcccgagctatatacaagtatgcacttgatagggtgcccaaaggccaggctgaggagctgtacaggaagttccttgcatttgaaaaacagtttggtgaccgtgaaggaattgaggatgccatcgtgggtaagaggagattccagtatgaggacgaggtgaggaagaaccctctcaattatgattcatggtttgattacattaggctggaggagagtgttgggaacaatgacaggatcagggaggtgtatgagagagccattgctaatatccccccagcagatgagaagcgttactggcaacgatacatttacctatggataaattatgctttgtatgaggagcttgatgcaaaggacgtggaacggaccagggaagtttacagcgagtgtctcaaattggttccacacaagaaattcacttttgccaagatgtggctcatggcagcccagtttgagataaggcaaaggaatcttaaagctgcacggcagatactcggaaatgccattgggatgtctccaaagggcaagatattcaaaaagtacattgagattgagttgtatcttggtaattttgaccgttgtaggactctctatgagaagtatattgaatggtctccagcaaactgttatgcctggaggaagtatgctgaattagagaagaaccttagtgagactgatcgtgctcgttccatatatgagcttgctattgctcagccagcccttgatacaccagaagttttgtggaaggtgtgttgttctttctgttatcctagtatatcctcttttttagggctttcaaactagaagtggtagatatgtatttcttatttctcttgttcctcaagtggtaaatggttctatagtgaaacgtatacaagcattgttttaatttctaaaatcagttgatttcatattgtagtgaactgttgaattgacattgtctgagacaccacccactcatcacataaaaactttttcctcgttttattggtattgctgtggcgcctaagcattccaacatttatattttataatgtatctgaatatccatagttcaacaatgtatgtattttcaatgtaaaaaagggacaattatattcaccattgaaaaatgttttgattatcaagttaaagaaccatcataacccatgcctactttttgaaaccatgccaattcaaaacacattctgtaaacaacagtagtgggatggttctacctaatacctataccaattcttctatggctgattctttggtcctaaaatacattttacttgataatattggttcatatctgctcatgttttgattaaaggttctgttcatttcatgaatacaaagcaaagttgatatttaccgatcagctttgtttctagatttcaatataatgctataatgtgtttgacatactagctagagagtagaaaataagcttgattggtatctttcttggttgttctccataatatggaaggtgtaacttttatgggcataatgggcatgctgcataactagtcccatttttcttgttttgaacactgaatcccaatatttatttcttttttgagatctaggctttgtgtgttgaagtgtgtattgttttaccattgatctttgcattattatattctggcactcaaaaaactgtggcgtgattgttatttgttgtctattcttcaatttctattctatcagatttacttcagcaaggctagaagcatatttctcttcaactatatgataatatctgctatttcacagcagtggcatattgatgtagttatattattcaatgtaagattttgacatacatgcttatttagaataagcatatctattttagatgcctcatttgcgtaaatcaggcggcactttttttggcattcttgtactcttttggttttttggctcttattcccccttgaaaggtgaagggctgaaccatgtgtatagtactaatgccggctaataggaaactcttttacgctcctttatggtcttgaatttcctcatcctttttttacttaggagaaaatgtgatggactatcaacattttacatttatgtccagaatacagagagcacattctgaaaatttgggccttctattaggaagtttttcaaatagttaggccctgctgtgatggtgaattaaaaaaaaggcagtttctttcagtaatttcactagaataattggaatatttagttactgcaggaataaggataaaattctctatacaaaactgtgcatgggcattgggccgtaaggcgcccatgggcagcccataccaggcaacttagatataagattattagttaggttagggataatacatcagtaagagttaaagataagactaggtcgagtccttacttaagagtccaattattccatctatataaggatgggaagtctattatcattaagcaatgatgaatatcacttagtctaatctctccctccccataatgttcttctccctagcctaaatctacatcccttctccaggagctgatgacgcacgtctatcttcctggctgtgggtatcctgtcatgacctcaggtcgtgacactgttatacatgttacaactgagagagccatcaagcaatggtcttagaaaatctacagatactgacttatttagtccatcctggagtttcatgtgtttatttgctatgtattcttaatcatttcctgttttgtatcttacaggagtacttgcagtttgaaattgatgaaaatgaattcgataggactcgcgaactatacgagagattgcttgatagaacaaaacatttgaaggtatggataagctataccgagtttgaggcctcggctggtttggctggggaagacggtgagagtgaggagattaagaaagaagttagttatcatgaacagcagatagaacgggttcgaaggtgccgaggtaattgagagcaaatttattcatgggtaattgaagttaggcaggtacctctgttccttttgtcattcaaagtgcaataaacctaacttatatttccttttttttttcaatttcagcaatctttgaaagagcattcgaatacttcagaactagtgctccagagttaaaggaggaaagagcaatgctccttgaagaatggcttaacaaggaggtgagctttggtgaccttggtgatgtcaccttagtgcagaaaaaggcgccaaggaaagtgaagagaaagagaccaattcctacagaggatggctccactgttgcgtatgttccttactcagttatttcattatgcta

SEQ ID NO: 21073 - DNA, 1948 bp, Oryza sativa
attcctgcagccccctgttttccatttaggttgcctgcaatttagggaacaaatgtattgatacaatattttgttaaccttaggtatgaagagtacattgattatattttccccgatgaggttgcgctggctccaaacctcaagatccttgaagcagcctataagtggaagaagcagaagacagatgatactgatgatgtctgagctaaactgccactgtttctgtggtcacgaatgagctaatcgttgtcaaaattagatctgaaggtcttctacaatgctgggtaaagttgtgaatgtgccctacctgatcatgtggtgtggtgctggcacttcgatcaattcagttttacatctgtatgtctgatggatagaaactgaaacaagttcatagtctttaatttagttttggcatgcatgatcttgtttcttgctcacgatatttgtctctaaggtccaaaataggagacggttgttccttttagttttcttttatttatacatcaataggtaggcagctccagccatattagtctaagaatggcgcattttgtgtaaagaagctgcctgtaaggtgcggttgtgtaccagtgagatggactgtgaaaacttgtcttgctgatggtatccaattttcctgagcgaggaccgaggagatagtgcatattaatctctctaaacgtcgtgggagcgctggagatttagagtgccatgtcatcgacttttttcagaaaaacccttgctctttccgctaatagtatgtgcatccctgttaacgtggcccgtcagatcacgtgctaaggtcgatctgaccgtccacgtgtcctagcctggctacccttccaccatcgtctgatcgacggtatggatttgccaaaaaccctagccacctcaaacctcgcgccactcaacgcgtagctcggccacccgacgttcttctcacccacgtcgcctcgcccttctctcctcgcgcgcgctgctgccttgccctcctcctgccgcaggcagcccggcctcgcctctctcggtctggtcgctgcagctaccaatgagggaggccagcctccccacagatggatcagaccgcccagatgaaagagatgtgagccgcctccaccttcttcttcgtccctcttggtgtagcgccagatccgttggcgggccatcgatggtttggtttcccaccggtggatccggttgctcggagccttggaagcgagggagcaagctgtcgctgccaccctctactactctccttctctgcacctccaccgcccctctccttctctcagctccaccaagtgttagattcggcttatagaggtcgccgggtttggtaggaggagaaggtaggagcggtgcagctgttggggagaaggaaggaggagggtcgcggcttggccattactgtgatgacgacggttgttgctcggtcaggtcgatggctagggatggcggcggctagcggcttggttaggacgatggtagggaatagcaagtcggcaatggctcagtctttgcttttcaatttatttttctttgggagaggaaacctgatattgacaggcaattaccgcgaaaataatgtcatcctgcctggatcacctggtgatgcttgtattggagtcacatcaaggagcccagagtaattccattctctctctatgcaatatgtgattcttaattcattgtgaatttgtctaattttatggatctctgaaatcccaatttgcatgtccaagatacacagacgaagcaagagctgttcatgaatgtgatttgagcaacatataacaggtaggttgtgttcagattcttttttacttagctcatatgggaaagacaaggtatgcttctttattctctcattggtacttaaaaaggatcagctttacctatttatacatgagtgcttgcagtactaatacaaatcattgccatgggttaa

SEQ ID NO: 21074 - DNA, 15581 bp, Oryza sativa
atattatatattgttagtttggtggaactatttcagtgattatcatatgtctgagatattatattgttgattgcacatttttgcaaatggctgaaacaattctatttttatttaattgctatgccttcgaaactacattattgtttcagactttctgaactttcttgcaagatatcagaagacttttagcattgcccacattcatataaatgttaataaatctatacatacatacatacatacatacatacatacatacatacatacatatatatatatatatatatatatatatatatatatatatatatatgtgtgtgtgtgtgtgtgtgtgtgtgtgtgtgtgtgtgtttagattcattaacatctatatgaatataggcaatgctagaaagtcttacattatgaaacggaggaagtagacaggagtgcgggttttgtttttgtaggcatacatgtcagttcatggagagccccatggacaaacaaagtctgtcctgcaaattctttgggtggctgtcgctgctccataattgactatgaacagcgattgcttgcaattgaggggttggctaaataattatctttttgccaacattgtgggaggaatttagagaccgccgaacagtttaacttgttcctgcattgcctcttttaggaaactggatgcctattaatagaggggatgagattcattattgtacacttgaggaagagagtgaataagaaagcatgtcactctaatatctttgtaaatgttatgcactctctctctctctagtactctcttgcgggaggggttgcactggttgtacaatagttatcatcatgatgttttattggaactagagcagctagttgtaccagttgagtttctagcatcttattaaatatcagctggttttagaaagcgaaagctaagccgtcagttgattaaagcacttattgacagttagcttcttgcttaaagcatcagtagttttagcttgggcaaaaacaagatctttcaagggaggttgattattaaaattaccgttgttgccattgcctccttggtagaacaggcagggctggttccacctgtggcctccttgcggacaatatctattgttattcatgaacattgcttcctcctcacgggtctcgagacagtctgtcccggaatgacctgcattctcgcagacctcacacgtgatgtacgagtccaaggccttgactgtgcctcagcttgttcttttcctagtcgtccaagcgcttcattaggaagtccagttttgcagctaggatttccatctccttgatggtatgcatgccacgggtctggagtcgttctttgctccagcccatgttcgagaccatcttctcaattaagtcgacggctcctctgatcgtctttgagaagaaggctactccagcagacgcgtccaaatggtcccgggacgagggggtgagtccattgtaaaaactcggcaggatcagccagtcgtccatcccatgatgaggacaggcggcaacgtactcttgcagcctttcccaggattccggaatggactcgtcccttctgctagaagcttgaaattctcccacgaagggcattggtcttgcccatcggaaagaactttgataggaatgccgtagagcattagttccaagtgtctatctttgcacggttggcataaaatcactgctttgctttcccatagagggaaaacggaaacagtctaagcctgccggtgtctgggctgacgcctttaatcgtgctcgtgctacagatatccaagaactgttgaagatgagcaccggcatgccatagaatgagcttgcctgtgccatcataatgaggctagtcttcaagtcaaagtcgccatctcctaagttgacgtgcggcccaatgggcacattgtcagcggagggagcaacgaactcacggagggtcttctcagccatgttcttgaagctcgatgacactgggatggttggtttctttgccgataatgttttctgcgaagggacaactcgcggtttgacaatcctaaagaaaacttctaggttgtcttggaagtttttcggcaaattgaaaccggtcatacactaccctgttttcacgacaaaagtgaaaacaaccaaggttagcctgcaaaggacaatgattatacataggtaaatataaagttattaccatataataatctcttaatcattaatcttccctagcaacggcgccagaaatgcttgttgatatttcttaacgacactactagaaatataattcctagcaatggcaccgaaaaattctttgtatattattgttgacggtcattatagaccaatttcgaccgtcaatataactaaaataaaggagaactagctatacttgcaatgcatatttgttttagaataatctatttctaattgtacttggattttattcgattgcagagattgctacacaaatgaaggagaatcgacaggaaaactaatgaatgatcaatcagacgctgttgagaagtaggcttatgagtaaatgggcctaaaaaaccagagaaataacctcaaaaggcccaaactccacatcactgaagtgaggagccaacagggagatggcctgcaaaaaactaggctagttgggccagcccaagcacctgctctgttggatgcagggtttggtgtggacgtttccgacctttccaaccatctcatagttcagctataaaagtacctcaccttctccactccaacacacactcaagcaagaagcacttgatctttctctcaagtttagtttagtactctagtgctagtagagtagaatagaatagttttttttttagtcctctagtctctaggagatttcgggtatggctctagcagtttttctctccttttgtaggacttgtcaaattaatagaatattcttctttatatatcttcggtattttactttatcttagtaccggctttattttatatttgtctcgatatagttgtgtgactagcttaccatagaggtgcaatggtgtgggtttaatgttcatgcaaatgattgctctatgtcattctagaggatatggagtagtatttaataatgtaaacatggtgcttagatttatcattatttgggcatatatggtgatagctcagtacgggtattcctctacgttagtatatattcctaagacactttccttgggtgggtactcctccgtatttgattctggtaggatggtcatgacaggttgtcgtaataaactccgtatttgatcccgattggatggtcatgacgggttgtcgtgagaaactcggcaatcagggttggtctctcaaaacaccaggaaggcactgttagggggtattggttgcatagctatatactagcaattgtaaactaaagatgcatatatactagaagtataggagtgatttgttttctatttcgttcttcacatagcctagatttatttaatatagcctagatttatttaatgagagtatgagtttttcttacatcgtgtcactctacccagcataaatgaattaacccctgcttagactataatgtatataagtaatatataaattattagcatagttctctcttataaatctttctcttgtgtcggaggatgtatataagtaatatataaattaaaattctcttgtgtcggaggatgtatataagtaatatataaattaaaccttctcttgtgtcggaggatgtatatgagtaatatataaattattagcatagttttctcttataaatctccccttgtgtcgtaggctcttcggatctcccattatatttgagagatgaagtgaataattgaagtcatcaaacaaacataatgaaatatccgacgcctcgagagaagaatattagagacattgctgagcctttagcctgctagtcaacttcagcctgagatgtacccattgaaccgctcgaagacgacgaccagatatgttacacattccgagacttgacaatggctaaagatctacaacatctaaaatattcttaattcatactgatgtgaatctagttcctagaatgtgcagtagattcacactttcatcttaagcatgaagatacatagcaaaatacatttaagacgaaagtgatttcaaattacaactacttaataattacaatggccgaccggccaaatataattatattagagaacatcggaagcttaactacccaaacacaagcacaccgactaggggtttaccccattaagttgaaatcctagaaaaagcagtcgaaacccgcatcactcaaattatgccaagtctattccctgtaaaacataagttagacaaatcatggcaagactcagtatattaatttgattaatgtactggcaagagcactatcaaacctgtatacatgaaagctctaagtcaaaggaaggctatttgtggttttaattttcagcataaagcaaattttagttcacaaaccatttgcaacgtaatttaagcaaaacatttaagaaatatgtaaagcataataatcatggcatggtcaacatatgtagataagcatcattcccttaccaatccgaaagtaaggcaatcatacttgtcggtgatatgggaccgggagtatcgtgaccagaggcttgaggcagacacaatcgcccacgtggcctggcaccttcggggacgtcgggcccgagggtgaggtgtccgccctcctcctgatttccccgagggggggtcgggtgactcctgcccggccccgagggccgaggcgccccgaccccttgtggagttagcgccacatgaatgggttgggtgaacacggtaagcctcacctaaccatatttattgcagtctggtcgaacgtgtcacgctgcatgcagcgtagtgcagcgcgttcctttatccggtctgtgaccagtcacagaccggtcagatcacgggttaggtggcgactggcggtctgacgcacgccttgccccatcccgtcaagacgaaagcctctaggcactcgtctcaagccggagctagcgtgtaatctcttggagatggcacgttagccctggttagatttataccaggcttcatcccaaccattacaggcaagatgctacatgaagaagggcaaacatgcacgttgctaagctgacacgtggtggacaaggatgactgatttgtgaccggtctgacactggtcgcatcatcaacagacagccataatcccacgtcgcacctgtttccggcggaagtgggggtagatatgggccgtcccatcagaagggcacccggagaggaaccgtaccgatctccgtccatttatgaagagaagaacagtccagtttggagaggggcatgtggtatccccttgagatataaaaggaggaccttgcccacttagaaaaagagaggacttttggacacgaggccttggccagatccgatcccagagcaattgggggctggttgacactttgttacttgttcacacacaaatccaccaaaacacaggagtagggtattacgcttcccagcggcccgaacctgtatacatcgcccgtgtctcgtgtttcttcctagctggcgatctttccacataccgagagagcttgagatttcaccctaagcccccggccgaaccggcaaagggggcctgtgcggtctcccggtgaggagccacgagctccgtcatctggcgcgccaggtaggggatggtgagtcacttcgctcgtacattcagcggttttgccaagtccgcaataccataccatgcatccctgcacacgcggtgatctacgcgttcagggggggggtgtgcggcacaaccgcatgctcgaaaagatcgcttccaaagagccccagactaccgcggagctttttcagctcgcagaccgagtggctcgtaaggaggaagcatggacctggaacccctccggttccggagtggcagcttcggccgcccccggatccgccgctcagatagggcggcgtgacaggaggaggaagaagaggtcggtctattccggcgacgagggtcatgtcctcgccgtcgagggcgctccgcgggccacccgaaaggggaggcctgcgagcgacaaaaagaaagaggctggtactcccatcagggagcgcccagccggcaagtggtgctccgtccacaacacctccctccacgatctcgcggactgtcgcgcagtcaaaaacttggctgagcgaacaaggaagtgggaggaggacaggaggaaggaacgccgtgagggcaagtcgccggcaactccctccggtaaacggcgaagtgaggccaagcagaaggcccccgctgttgacatcgatgacggtgatgatgacctaggtttccaagaacctggggccaccattgccactgtcgatgggggagcgtgtgctcacatctctcgccggagcctcaaggccatgaagcgagagcttctggccgcggcccctactcatgaggcgacgcgccgggcgcagtggtcggaggttgccctcactttcgaccagaccgaccacccaccgtgcgtcgcccggggagggcagattgcgatggtggtttcccccaccatctgcaacgtgaagttggggcgtgtcctcatagatgggggagcggccctcaacatcatttcccccgcggcttttgatgccatcaaggccccggggatggtgctccagccgtcccaaccgattatcggtgtgatgccggggcacacatggccgttgggtcacatcgacctaccggtcacctttggtggatcagccaacttccgcacggagcgggtgaacttcgatgtggcggacctcagtctgccctacaacgcgatcctggggaggcccgcgttggtgaagttcatggcggcggtccactacgcctacctccagatgaagatgccgggccccggtggccccatctctgtccatggcgacctgaaagtcgcgctcgcttgcatggagcagcgcgcggaccacctcgctgctgcgtccaagcccgagggtggtgacgagaggcttggcacctccgcccccaccgccccgaggcagcggattgtcacatgcgccgaggtcccggtcaaggaggttgccctgggcgacggcccatccaagaccacacggattggtggtcttctggatggcaaataggaagacgcgctcgtctctttcctgcgggcaaacgctgacgtcttcgcatggagaccggcggatatgcccggggtccccagggaggtgattgagcaccgtctcgccgtgcggccgggcgcaaggccggtccggcagaaagtgcggcggcaggccccggaacgtcaagccttcatccgcgaggaggtggcgagacttctggaggccggattcatccgtgaagtcatccatccggagtggctggcgaacccggtggtcgttccaaaggcgaacggcaagcttcggatgtgcatcgactacaccgaccttaacaaggcatgtcctaaggacccttaccccctgcctcgcatagatcagattgtcgactccaccgcggggtgcgaccttttgtgttttctagatgcatactctggttaccatcagattcgcatggctagggaggatgaggaaaaaactgcgttcattacccccgtaggaacctattgttatacatcaatgcccttcgggttaaagaatgcaggtcctacttttcaacgtactactcgaatttctttgggtagccaaatagggcgtaatgttgaggcttatgtcgatgacttggttgtaaagacgcgcaaccaagagactttgctcttagatctagcggaaacttttgaaaatctccgctccgcccgcataaaactgaaccccgataagtgcgtgtttggtgtacctgcgggcaagcttctcgggttcttggtctctgcccgaggcatcgaggccaaccccgagaagatacgagctatagagcggatgcgcccccccagcaaacttagggatgtgcaatgcgtcaccggttgcattgccgccctaagtcgtttcatatcgaggctgggagagaaggcgctacccttatttaagctcctcaagcgctcggggccgtttacttggacggaggaagctgaacgtgccctcactaagttgaagacatatctcagctctcccccagttctagtcgccccggggccaaatgagcccctactactctacttagcggcgaccccccaagtagttagtgcagcgttggttgtggagcgcgatgaagacaatcctcatttcgcgcacccccgccctgtgctgacttggcccgggagcgagcagggaggagaagcccccgagtcgaacggtggcctaaggcccctgacgaccggagtcggccctctgcccgcttgtcagacggtgctgggtgcccccgaccctcaggaaggccccgaggccactgcgggaaggccgcacctatcgccctttggccccgaggctaaccttgtgctgactcgacccgggagaaagcagggagaagaggcccccgagccgaacggaggcctgaggcccctgacgaccggagtaggccctttgcccgcttgtccgacgacgccaggagcccccgacccccaggacggccccgaggccactgtgggaaggccgctcctgtcatcctccgaccccgaggtcatcggcacagaagacgagtgcgccccgagaggccacttggacgaagaacgccccggggatgcggcccctagcgaagaggatcggccccgccgaaaggtgcagcggcctgtctactttgttagtgaggccctccgggacgccaagacccgataccctcaggcccagaagatgctttacgctattctgatggcctcgaggaaactgcgccattatttccaggcgcatcgggtcactgtggttacgtcttaccccctcggtcaaatcttgcataatcgagagggtacaggacgagtggtaaaatgggcaatcgagctttctgagttcgatctgcactttgaaccacgccacgctatcaagagccaggccctcgccgattttgtggcagaatggaccccggctccagagaccgtctcaatccccgaggccagcacggacccctctcagctgcctcacaccgcccactgggtgatgcagttcgacggttctctgtctctccagggcgccggtgcgggggtcacgttgacctctccgaacggagacgtcctcagatacttggtccgtctcgactttcgagcgactaataatatggcagagtacgagggactccttgccggactcagagtggcagctggactggggatccgccgcctcctggtgttaggcgactcccagctggtcgttaaccaggtctgtaaggagtaccggtgctctgacccacagatggacgcttacgtacgccaagtgcggcgtatggagcgccattttgacgggatagagcttcggcatgtacccagacgggataacatgattgccgacgaactctcacggctcgcgtcctcgcgagcccagaccccaccgggcgcctttgaagaaaggcttacccagccgtcagcgcgacccgaccccttaggggagacggatgcgcctgaccggcccccgaggcccgtcggagtccaggcctcgggacccgaagggagcgctccaagctcccttagattgattgcttggatctctgagatccaagcatacctcacagataagactctacctgaggaccgtgaagggagtgaacgcgtccaacgcatttccaaacgctacgtgctggtagaagggaccctctatcggcgcgcggctaatggaatcctcctgaagtgcattcctcaggaacaaggcgttgagcttcttgccgatatccatgaaggcaagtgcggagcccattccgcctcgcgcaccttggttggcaaggcctttcgtcaagggttctattggccgacagctctcaatgatgcagttgatctggtccggcgatgcagagcgtgtcagtttcacgccaagcaaatccatcagccggcccaggccctgcagatcataccactttcgtggccatttgctgtctgggggctcgatatcctgggaccgtttaagcgggccccgggcgggtttgagtacctgtatgtcgcgatcgacaagttcactaagtggcccgaggcttatccggtcgtcaagatcgataagcactctgcacttaaattcattaagggcatcacggcccgttttggagtgcctaaccgtattattacggataatggcacccaattcactagtgaactcttcggcgactactgcgaagacatgggcatcaagctctgcttcgcctcacctgcccaccccagaagcaatggccaagtggagcgcgccaatgcagaaatcctcaaaggccttaaaaccaagaccttcaatattctcaagaagcatggcgattcgtggatcgaggagttgccagcggtgctctgggcaaaccgaaccacaccaagccgagcaaccggggaaacgcctttcttcctcgtctacggcgcagaagcggttctcccatccgagctcaccctgaggtctcctcgggccaccatgtactgcgaagctgatcaagatcagcttcgcagagatgacctcgactacttggaagagcgaaggaggcgtgcggccctccgagccgcgcgctaccagcagagcctgcggcgctaccatcagcgccacgtccgggcccgatcactctgcgtcgacgacctcgtcttacgccgcgtccaaacgcgtgctggattgagcaagctctcaccaatgtgggagggtccgtatcgagtgatcggtgtcccccggccgggctccatacggctggccacgggcgacggcactgagctgcctaacccgtggaacatcgaacaccttcgtcgcttctacccctgaggggggggtcgagtgtcaggttttggctcgggccaaccccgcacccccctcgggtgtgcagggttagccgggggctaccacgcatgcacattcttatttctcttatttcagcatttcaataaaagcagtttcaatttcctaaaggttgtgtctgtgccgttttttccttttgaagaatcttgacttgaaataaggtcactcgtactcaaccttgccctcgggggctcggttcggtcagctaaaatcgccaaacggggcccagaaccgagccgtgccccggggcgtggtgaacttcgggggggaatcggcaaaaacccacaatcgggtcacccataaccctcggtcaccacgttcccggcctggccagcctcgacatgtggatctccccaggcactagccccgacccgagccattagaggactgggacttgggcacgagcccttaaatcaagctaagacacaaaagaggaccacggcacagatcatcctcatctcatacgcatagcaaaataaaattgacacgaattttttcatcatttttgattgcagattaagttggtctatacaaaaaagaggcatgaaggccttagaagaaagaaaaagaaaaaactggagtctggagggggcctgggggctcagtccgatgcgcccgggtcgccggcctcgtcgtcacgatcgtctgcaccgctggcatcgccctcctcgtcggagttgggggcgaacgcgagccgaggggccgacccctcgaaactgtggacgatgtggtcggcggcatcccggacccgcgcgcgcgcgtcgtcctcggtcccgggagggaactcttccagcgccatccatggagagaagttggggtccctggcctggtaactcgctagtacgagttcaaccgctccttgggcgaggtccctcgaggatgacttgatggtcttctcgagctcctcggggagttgttgaagagcccaggccatcttcgtgaggtgcggagcgaggccttccaggtcggtggagtgcgtccttgtctggcctttccagaggcccgcttgccgaccggcgcgatccaggcgggagaccgcatcccaaagcatgccgggccctatttcgcccgccaagcggagggcctcggcttccccggcggatgagtctagcgcgcactgcatgtcggcgacggtgagttcggcagctgcgaggcgggcggctaagtcgctttcgcccgcagccgccccgctgatacgcgccctcgcgtccagctccttttcccgcgcctcgaggtcggcagcccgctgctccagtgcggctctctcggcgcggacggattccaaattgcggcgtgcctgctccgccaacgctgcctcacggagggaaaggctatccgccaaccgttgcgccgcggcctcggcctcttcgagagctcgctcccgctcagcgagtgcgtcctcgcggaggcggagcgcggactcctcttcggcgcaggcggcctcgtgcaccgccagcgttgtctcccggatagcggcggcggcctcgcggtccgccaagcccctctccacggcgccggcgtgttcctccaatgccatagcacgggcctcaagggcctcctcgcgccgccgggacgccgcttcgatctccgttgcccgccgctctcgggcagcggcggtgtcaaggaccccttgggcggcgtcgagctttttctttagctccgcctcccagctcccgtgttgaaggcggagggtgtcctgcgcctcgatcatcgcggtggtggcaatgagggcggcctcccgctcctcctccacctctcgggcgatctctgccagcgccgctttgcgggcttcaagctccgagacgtgacggcggtgagccttacggcccacctccaccatgacatccaccgagcgctgcccctcctcgacacgcgcccatgcggcctcgagctccgctcgttccgctcgcagggcctccacttgggcgctgaacccatctagcaccgcggtgtttgcggcggccaaggcctgcagaaggggctcggcgctcagcggggcgacagaagacgaggggaagagccgccttggagagaatgcgacgcggctcggcccgccggaggacgcgctgggctcggggatgtcccccagacccgtttggtcctgggcgtcgcctggggaagtaggcccaagcgacgcgccagcagctttgtcgtgagctgcctcggaagacgccatcgcctcagcctgacgagcccgggcggcctcctccttagcagcttcttcggcttggcgagcccgggcggcctcctcccgagcggtatcctctgcatggcgagcccaagcggcctcccgggcggcctcttcagcttcccgaaggcgatctgcggcctctcgccggtcagattctcgcctccgttcctctgcggccgccggatcttcggcctcggactgaccggacttgggatggcgggaggaacgtgacgggacatcgctgaagcaaaagaaaaaaccagaagacaaacaagatgggtaagagaaaacttgcttttgggataaaagaaagacggtcgcaaagagagtgggacgaacctgcgagggggtcggttaaatgaccaccttggaggggaaatcaggtttccccgggatggttccgtctcccccatcttgcggagccgcttcttcttgcgctccccctcgggctgcgatgtcggcgcggccccctccgggtgccgactgctggcacgcaccgccccgccccctcggggaggagatgggggaggtgttcctcccagcttcctcttcccctgggcgtcggcagggcggctgctccccgagcccccgacgcggggcccagaagcacgaccccctcctggggtagattgttccccccggcggctctcgcccgcgccgtcgtggcccttaggagtttcctcctctgaggccccgacccccatcataatggtcagaatggaggcgcggtcgggatcgctgcaaagggggaggattccttgaggaatgagagacgcctccacggagctgagattcagcaccctttggaccacgatcttgaagtcctcgggagcccaatcccatctgactccctggtgggtccgcatgtagtcttcggacccggtgtactcccaggcgccccgggcgcgccgttggagcggcgcaatccggcgacggaggtagtcgccgtacaccatggcccctgtgagcccctgggatcgcaggcccgccaggcggtcgaggacggcgtcatagtcatcccccagatctaccggcgcccgccagctggagacctgcgccgggggctgacttggaagtcggaggcgcgcttcgttggcgaggggggtgtagaaccagtcgctcttccagtcgtcccacttcttgcggagggcgcaggggatgtagcggttcaacaccggcccccgcggctggaagtagcagccaccaaccaccgacggcggcgacaccgactgcacggtgaagaaccaccggaacagccgaagagatgggcgcaccccaatgaacatctcgcacaggtgcgcgaagatggccaatgtcatcactgcattgggggtgaggtgcgccatctggagatcgtagaaatccagaacatccataaagaaagaagaaaatggcggaaccagccctgccattgcgaaggggaggaagaagacggaccgccccgggtagtctggtgccgggcgtccctcgcccagcatcactatctcccggccggtggcagattccggcataaagcggcgcggcagcccggcgtgcctctcgctcacgatgcgagaaggcggaagtacgcttccgtcgagcagagcggaaccccgtgccatggcgccggaggaagggatgattgagaacgagcgcgtgtggcgaaggaaaggcgcagcagagaaagagttagagctcaagcagcgaaggcaaggggaatagtggcgaaaggaagggagcaaatcctttcctcggtgtctttatacctttgccatcgctgtgcccggctcctcgtttctcgcgcccactatctcgctccctcgtttctcactatctcgctccctcgtttctcgtgcccacgcttccactaatcctattcgcctgcttgcggcgcatgaggtggatatgcggttgtggcagtcgagatagatcgtatcgtgcgcgcgttaattacgctcgccgaccgaagcaacgttaccatatctccaggcgaagcaaatcggctcacccagattcgtacgtcgctcaagtaatgtggcagtcttgaagagaccgcccattatggacagccaagtcaccgttaccgatgtacatgatttgagaccgttgggtttctgcccaaccatggagaccggtcccacctgtcaccaagctttaggagtggcgtcacgcccgaccgcttcccttgagaagggcgatcgccctggcataacgccgggggctactgtcggtgatatgggaccgggagtatcgtgaccagaggcttgaggcagacacaatcgcccacgtggcctggcaccttcggggacgtcgggcccgagggtgaggtgtccgccctcctcctgatttccccgagggggggtcgggtgactcctgcccggccccgagggccgaggcgccccgaccccttgtggagttagcgccacatgaatgggttgggtgaacacggtaagcctcacctaaccatatttattgcagtctggtcgaacgtgtcacgctgcatgcagcgtag

SEQ ID NO: 21075 - DNA, 3318 bp, Oryza sativa
ggcccgaacctgtatacatcgcccgtgtctcgtgtttcttcctagctggcgatctttccacataccgagagagcttgagatttcaccctaagcccccggccgaaccggcaaaggggggcctgtgcggtctcccggtgaggagccacgagctccgtcaatactacttatatataacaatctcatcatcattctcaaacatttagttccaaaagcatttagaaatcacaagattatacccatagtataccatcatgccactgatgatcgtgagcatggctaatcgattagtttttagaactctgcaaagtttgtatagctttacccacatgatatgaacactctagtttgtttcgagtttgcaaggctctaccacattctacacgttgaatgtggtctagaggtcataacgaggcttttacattaagtattatctaaccttgcatgagcacgatacatgtttccccatcctaggcatacttggaatatgacctagaaccgttaagtggcggggccacgctttaaacataatgctgtggtggtgaacatcgaacggaccccaccacgtggcacaataccgtagtattggaaagacatagacgcccattccgtgaggcagaacattacactcgtcccctcacggaaaatacacacgtagggaatttatcatcgtacgatcacacacacatatgggtagtttctataggtagcccagcatacactcgtgaccgctacctctactacaacggcctcccaaatgcaaggctagacaagtgtttaacttaataggccaaggtcccccatagacacatgtggatgtacggtaaacataatgggtgatatgatgtttggtccttaatcgactcaggcgaacactccccctatcggtatgcaactactaccatatgcataccacttgccgcccaagtctaaaaatcacattttatctcatttgatttcacaaataatcagagattcacctctgtccataatattcaaaaaagccttaaaaaaagtatagtaagtgacccataaccatgtttttactttttatttatcactaaccatttgcactttataaacacatagtatagtcatatgagcacaaataaagtactctaattaatcctaaggttcaaaacagtaagggagtgattttaaaaaggggattcatgcatctttaggacataactacaacttatagtttttgaaagtttcgatagttagaaatacacgtgcaactttacaaacaaaacatttagcccgaaaacataggattcaatatgttcaaagtaagggaaaaacttgccttggttgacatatgacctccctaagattaattataattcatctccttcaccggtattgatttcatacttttaaagaaaataatggtaatgataaataccaaaacatgtaaaaattccaaatgctcgaagatgcatgatttgtgcacagttggtaggttctggtctaaaatgaatttaggtgaaataatttctattttatcactttttatttgggatttacgaattttagaagttacatcgatatagtgtagtattggcttaggtagcattatgaaatttttttccatgtgaattttattagatttaacttcacagaggtgtggtggtgttttttctaagactatacatttggttttacaatttttgaagttataatgattttcttatgaattttacaagttataatgtgttgtaggcatataatgttctacatgtacatgtcttggaagttgggagttttatatccagaacatgttacttattgattgagttgagtaaaaggaataatttggttaactaaaccatttttaattcataagtttatggtcttatcatggttcatactttataaactaggggtgctctagtctatgctagcaatacattatattaaccttgaaattattatataagctaagtgcattaagttttggtgggagaggttggagttatattttctctggtccatctaggatccatttggtttatttggagtttggatgtattttatataatttgcttaacttgtagtatgtgattagcatctagtttatcaatttaaagtttagagatatatttagtacggaaggtgccatattctattttactgggatgaagctcacttcttgctggttacatatatacttggttcactccatttggattaaatatgaattttctaaaaaattttacaagttaatgtgtgctctatgttgattatctcctcacattaaagtttaggagattttcatgtactgtgaatgtgtattcttaatttatatcattgaagtgcataatttttgtgattctacagaacttgagttcatctaaaaaggagttgagacaaattttatttgaatttctaatgttcagcttatccaaaactaatcattttgtagataatatttttgtaggcatttgatgtaaagtatgtatactattttattttactttatagaagaaaataagtcggtggatctgtagaaactgatttttattcattttgagttgtaatgaattttctatgcattttataaatttgtgcaagttttatgtgtgattttacttagatgaattttagaggaaacgtttgtacagtgagtgcaagtttttatgccataacattaaagttaatgatttgttgagttcacagaaatttgatttaatccaaaatgagttgttttcaatttgttatggattttgtaaatttacatgtctttctgttgaaaatataaagctttaggcatttcatttagatttttctagaaatatgcaaaaagacccctaaagttcgaagggaatagaccccgcggtcctgtgactgttctctgtgtgagcgaatgtttacaaaatagcacctagagttttgattcttctcagtagaggtccctgcgacctgtacaggggtggcatgaatggccggcggccatatttgggttcgccggtggcgaacggtggccgatatcgccatgtgtccaaaatagaaaatgtatctaaggtctagagcacccgtttgtagttgaatcacggctgatggtgaccaaatttgattgtagcggtggcgcaagcggcggcggctctcggggtgatggtgaatgtgaaggtagagcatcgatctagatgttttgctacatgcatgtgcctctatgggatcctaggatgcttaccgtgcgtccaatgaaacttggcgaggtgttggtagcggtgaccatgcgcagaacggttcggcgacggcggggagcttcgggtgaacggcgacgactcgatgccctcaaagaactgccatacaggt

SEQ ID NO: 21076 - DNA, 7043 bp, Oryza sativa
taaattatatcaaaattacagtgagttgtatgtgttgattagagcctatatgaattttcccaagattttatcttgcacgaattattttatataattagcaagaattatatatatatatatatatatatatatatatatatatatatataaacttacttttttccaatctttttcaaaaaatctattcatgctttttttatccagtttcgattattctcctcaaaggattctatcttaaaatatatatatatatatatatatatatatatatatatatatatatatatatatatatatatatatatatatatatatataaaagagagagaggacggctcttcagtacacctaggtgtatgtactcctcctttttaatggattatccattagcaaatcactgcatgcatgtgcacagttgctcaccggatttggtgcacatttgaacgagagcgttggcatgcaattgctttcacccctcccctagaataactattctacacccccctctccctcaactcccgatccagcccagcccacccctccttccccccagtccccacgcgcgcccccctccctcccggtgaccccaccctgtcctggcgcgcgtcccctcctccctccattagctccctcccggttcccagcgaccccacggccccacccactcccggcgcgcgcgccttacctccttcctctcgatctctcgcccgatctctccttcctctcgatctctccctgatctctccctcctttttttcttctccctcccttctcttatttttcctcctattcttttcttttcttcttctccctcccttctcttatttttcctcctattcttttcttttttagaaaaaataaaaataaattgctgaattcaagactagaacccatgatctcatggttcataacaaactctcctaatcaattcaccttacaacactttgtgatttaagatcattgttttctttctctatatatctactcaaattttatgaacacaaacccgttatgttattgtaggaaatcataccttgttattatgattcggtagtaacattattgtagaactgcagtaacacgatacattactgtgaaaattataggccgttactgcaaaattcataggtcgttactgcactttttgcagtaacatcatgatgaaattgcagtaacagagaacatatggtatactactacagtaccactacttgcgcatagctaaatttttaaatctcaatcttatacaaaatacaagtgctaaaaaagtgtatttgcatggtcacaagttaacacaagtgctaaaagtacttctctttatccatacaaagatacaaagatacgtagtagcaagcttagtacaagtgaacttttagaattgaagtctttaaacaataatatctctcacatcgtaaattattttttagaaccgttttcaccataatgctttaaaatgatgttacaacgagacaatagtcctattactacacgatgatcgagacaaaaatgcttttataacgttgttactacggaaagtagtcgtgttactgcatattgatcgtcgcgttactacgccgttccaacgagacgagaactgaaaaaaagtaaatctcaatctttaaatagcaatatctctcacgttatatagtatttttctaatccatctgcactatgatgttcgtaaaaaaatacttaacaaaactagatccatcatgactattttttgatgttgttactgcgagaaagttgtcctgttactgcatgatgaccgttatgttactgcggatttcctgcgagacgtgaacagcaaagtggtgggcgggggagggagtcaatgggcggtttgactcgggtttgaccgtcggaaggaggcattgaccagcctttgactgagatgggagggagatttgggccctacgaatggtgggggaggtgggattggctacacacaccgccgcgcgctagaaaactttgtagcgctactcacgatagtctccacatccggttttcccgttcctctctgctcccacgcgtgcccgatctcggtgaaaaaattactctcccctgtccccaccgagcgtgatttctgtttctgttttgacatgagattcaattccccaccgagcgtgatttccgtctgttttgacgtgagattcatcttcctgatccacacgtggcaccatggtccccacgtgtgctccccaaatttcttttttcatcattgttgcatggtcagtaaattaattcccagcaaaaatatacctcggtaaaattttcactccctatatattagctactcggtaaatctctctaaactcagtaaaatttttactctcatacagttctcagaaattcttctgctcacatatattttacgagttctcgtagtaatatttttactcggatatatttttctcgtagtaaaattttttctagtacatcctcgtagtaatatttttactcgtgttattgtagtaaaaattttactcttgtattttcattgttattacatcattaatcacagcaaatatttgaactaatactattttaccatacatatagttacatcgttacatcgtattagccactgtacgggtaaaaaaaaatgaagagagcaaacaagaaacacgttctgagcaagaggccatgaccagttcccccgccggtagccgatggacctcgtcgccatcgcctgaccaccaccggatatacggcagcgccacctctgccaccgtaccgcatgaccgcatccctcctacacaggcaccaaacgaccaagggcacgtggaaaacgaggagatcaccaccgttcaccaccagtccaccacgtccgccttctatccagggtctgaccgctgcctagctcctcccggccggtgctgctgcaggagatgcacgatggaggcatcggcattgtcgtgcttgtccccgaagcagaaattttccccggagcggcgattgtccccggatgccgccgatgccctgcccggcatggtggccctcctccccgaggtgtgacgctccgttgggtctgggcgccgctgtcggccaccacgccgcctccctcccacgggacacgcagaagatgaggagatcgccgccggctgccgactccacgccggatcctgccgcccaccaccccaacgccgatggacgcctcgtcccgcgtggtgcctctcctccgctgcccctctagatccggagaaatcggaggaggtgggtgaaatgttttggaatataccgtactgtacaaatgtgtgtatatataggcaggtatattagtgttaaaaaattactactaataagttggataacatcaaataaaaaatttactcagactatgggagtaaggggaggaggcgcacgggtgggatcgagattggtcatcggtgagttaaattttaactgcgcactatagatctagtggggagctgtatcaggtgccgtttaatatgtagcgaattagggtgatatatatatatatatctcccccccccctactaccaggtgtagctactccaatggtccgttcaatcgttaggatgtgcactgtttttttataataacgggtctaatcgagttcaatggtctaacccgattcatttaagcacgtctaattttctgaccaatcgtttaatatttatattattcgtggcatttgaaaattgaatgaacctatccgagtttgttagctttggagtaactaaccagatatttacccggcctcttcgaacgtattttggacgtaatttctagaatatgttctgctctttgaacgaattgttcttcagtagtttcgttacagagacaagacgagcaattgcacatcacaatcagttccaaggtatcagacagaaatcataccaattttattatactgaccaacaagcagatgatacatatgctctactcaaatctcactatctcagttgcctttcaatgacataatttaaaatatcctactacatacaactactcgaacactgaactacaaactataagcaggcattcagaaagaacgctactatttggaaattttcctttgattggctcggtgtctacatgggttcttcattggcaaatggtcatgtgctttaacgctacaccggatggaatcgcgcctagcaaaagacaccgcttgaaatacaaatatctagcaatgaacaccatgtccatctcttctcagccttacttgaatctgctgctatatatctgaacagcacgatcgatcatatctctcctgtaacaagttgccagaccaccagcagagaactatccctaagatttgaacagaacacgcttcgttacaaactgctgagagaactggaacaaaaaaattgacagactgaacgcatatccattggctcctctacgaccacatgcacctgcgtcaagaacctgctgccgtccctcacctggttctgctccaaagcagaaaccagcagaaaccaccgaatatgtttctgcttcctccttgcatggtttcttcaccatcgacttcagagcattctttttcgacgatattctgacagaaccaagaacaagaaatttaacagaacgtacacgtgccaaattggaacctccacgatcactatagcgcctgcgtcgagaaccttctgctgtccctcaccgccagccagagcagaaaccgttgtcgatgtttctgcttactcatcgagttgtttctgctccatcaacttcagaggaaaattagtgcttacccgacgatattctgacagaaccaacaacaaaacaattttgacagaacgtacacataccaaattggatcctctagcggctgcgtcgagaaccttctgctgtccctcgccgaaccaccggccacagcagaaactgccgacgatgtttctcctccgtcctccaacgggtttcgctccatcaatgcttgccgacgatactgtgccgcagaacgccagctgcttctgctctacacgactactcgccggcgatgttgtgccaccgcgcaccctctgtttctgcttctgctcttgtggtatgttgagtaccaacgatacctccgggtcaaacgggcttgcattcatgcagaaaatgcaccggataaagctcgtgcagttgattgattttttttttcaaaacttcaaatttaatattttattttaatttctgccgcctataggtcagtgaatactttctgcttttggtgagtgatacaggacccgaacccggtaagtgggacacgtgttggatgtctattgcaggagtagctactctcgggagtagtatataggcttcatatatatatatatatatatatatatatatatatatatatacacacactcaagggccacacccacctccccattcttttcaaggcccaaaaaccacctctcactgcggtcaaacgccggtcacagcccctcccgccggtcaaagctcagtcaaacccgcctactaactcccctcaccacccatctcttctcagctctcgtctcgcgaaactgtgcagtaacgcgacggtcaccgtgtagtaacactatgttttacgtgcagtaacaacgctcaaatatagttgaaatatagtcatgatggatctacttttgataagtatttttttctagcatcatggtgcaaacaattttaaaaaaccatacatgacatcaaagatattgttcttaaaagcttttctttttggaatttgactctccacaagtagtaatacaatagcattacttgttactactgtacgttactacagttctatcacaacgttactataagagtctagtaaagacaataagctttgcagtaacaaagtgtcttgcatttcttgaatagtattactacataaagtaggaattgaaacaaaaatatatgggttaaagcctcacatgctaaccatatatttgttactacacataagtagaagtgttactacataataggtgcatgttaccacttctaagtagctatgttactgcatgataaatgcagtgttactatgtcatttttacgagatgaagatcgaataggtgagccataggtaaagtttgtaggtggctttgagcaaggtctgattgatgtaggagtgttttgaacaattttatacatttggtaaaaccatgttactgcatgtatatacccttgttactataaattacacattctgttactgcatgtggagggctaaagttcaaaatgtcaatatttgaaaagcaatatctcacaagatatgtattattttttaaaaccgtttccaccatgatgctatagtgttactgcatatggaggattaaactttaaaatgcatctacgtactcccctcctcaagaaccgttcttcctccctcttctcaaaaaaattggtctcctccctccaatatagtgttactgcatgtatatgacgttattgcacttttgaccgtaatattgtggtgaattgcaataatttaggaattgaaacaaaaatatatgggttaaaagtcttagagctaaccatatacttgttactgcacaaaagtctgcacaaaagtaaaagtgttattgcacgacaattacacgttaccacgtgtttatgcagtaacactactcaaaaaatgtagttagacgctttgttactgcaaaacttatagtcttgtagtaacgttatcgacactatgttatgtgaaacttataatcgttactacatcttgtagtaatgacatgatgtgattgcagtaacgcaaaacaggcagtagtaaaacttttgatatagtattactactagtggagagttaaatcttcgaaaacaaatctttgaagggtaatatctctcacaccatgtactatttttaaaaactgtttgcaccatgatgttaaaaaaaatgtttaccaaaagtagatccatcatgagtatattatgactaaattttaattttgttactgcaagtaaaacattgtgttactacacgatgaacaacacgttactatgtcattccgagacgagagctaagaagagagagggtggtggggaaagtcaccgacgggtttcacactcatatggggcaccatcatggtgcccgggca

SEQ ID NO: 21077 - DNA, 2856 bp, Oryza sativa
accccccctacccttctcattccgtatccctccctccctccttcagtcgctccccctccctccctcccgatcctctctctctctcttcccctccctcctcccgccctcccgatccccctcccgccttctctctcgatccccctcccgatctctctttctttttttcccttttttctgttttttttcttcctgaaacattttttctcttttctagaaaaataaaaaataaattgctaaattcaagacttgaacccatgaccttatagttcaaagcacattcttctaaccaattcatctaatgattctatttgtttcaagaattttgtgagaaagtaatatgattatcaattctaatatcttttactaccgaaactcataacatgttactatgctcgaatagtaatattgttataaaagtacagtaatacgtgacgttgttgtagaacacataggatattactgcacttttggcagtaacgtcgtagtaaaattgtagtagatcaggaatcgaaacaaaaatatatgggttataaccatatacttgttactgcacaaaagttgaagtgttactacataataggtgcatgttaccactttcaagtagttatgttactgcacggtagttttactatgtcagttttacgagatgaagatcgaataggtgggctataggtaaagtctataggtggctttgagtgaggtctgattgatgtaggagtgttttgaacaattttatacatttggtaaaactatgttactgcgtatatatacccatgttactgtaaattacatattctgttactgcatatggagtgttaaagttcaaaaatgccaatatttgaaaagcaatatctcacaagatatgtattattttttaaaaccgttttcacaatgatgctatagtattactgcatgtggaggatagaacttgaaaatgcatctacatatttccctcctcaagaaaccgttcttcctccctcttcttaagaaaaccggtcttctccctctaatatagttttactgcatgcatgtatatgacgttactgcacttttgacagtaaatcaggaattgaaacaaaaaatatatgggttcaaagtctcatatactaactatatacttgttactgcacaaaagtaaaagtgttactgcacggcatatacacgttaccacctgacagttacacattaccgcatgtttatgcagtaacactatccaagaactacagtaaagcactttgttactgtagaacatacagaacgttactgcatatttggcagtaacatcgtggtgaaattgtagtaaactagaaataaaaaaaaatatggattaaaacacacgagtaaaccgagccaattccccatattcttgtagtaatgttatcaagtaattgcagtaacacactatgttaatatgaaacttataatcattactacattttgtagtaacgacatgatgtgattgcagtaacgcaaaacatgcactagtaacacttttgatatactattattgtttgtggagagttaaaattttaaaaacaaatctttgaagggcaatatctctcatatcatgtactacttttaaaaaccgtttgcatcatgatgttcgaaaaaaagtgattatcaaaagtagatccatcatgactatattatgactgaatttcaattctgttactgcaagtaaaaacacggtgttactgcacgatgaacaagatgttactacgtcgttcccggacgagagctaagaagagagggggtggtggggaaagtcactgccggtttgaccgagatttgaccgacgtgggggacctttgactagcctttgactgaagtgggaggtgggttttgggcccttagaaggagatgaggtggtttagagggagggggggtatagaatagctattctatatccgggtgtagaatagtttatatatatataatgcacaaaattactcaaatttttcaaaattttcaaattgtgagtatatacctagttataataatttgattcatacctatacttatcaacaaaacaactcaaatttaactttatttcacaatccatgattacatacctaactaattatatgtatggatgctatatacctagaatcaaaatctaacaaaaacaagttcaaattcagttcaaacttgctttaaactagttagtaaagtagttaatgttaatacctaagtaattgaaaaagtttcatactcatttgaattgggtatatactcaatttcaacaatggtgcccgggctccatggctatccaccatccaaatgttttaagatccgtgcaacgcactagtggataacatattaatattagcgggtctaacccaataaaatattgcatgcacatactttacatatccatttttaaagtattgcgtgcatgtgtttgcaaatttagtatcctcaccaatcatgcgaggcactttccattttctatatccaatttttcgaaatattacgtgcaagtgtttccaaatttcgtgccctataatcatgcccaccaattataatgagcactttctattttctatcacattttccatacaatgtttgcatgcagatactacctattgaaacatgaaacatgattcttgaaaaatgatgacatctaatcatgtccgctaatttcaattattaccttccattttcatggttactttccattttctatatacatatataaccggcgacggtattccatattttgatttttcttggctacgctggtaggctcacggtcgaagagctatccaccaaacaccactgagctacctcgctgacgacatttgctcgcaagctctgtgatcttcatcgccacgctgtgaagagggcggacggccc

SEQ ID NO: 21078 - DNA, 605 bp, Oryza sativa
gggggtgtttgctggatgggttgcacaacctgctgccttggtggtgtttgctgaatcggctgctgctgggttggatcaacagtgttttgaggaggcaaaaacatagatgcaacctggtcttgtgttagccgatccacattctgtccagcgtgttgtggctgttctgttatcagcaatcggggattgtccaattggccgggagctgaaggtggtagagtaggtgcgggagccgatgctggtgccatcggctgagccgatggtgcaatagaaggagctgcttgaacgggtggatgagtattggtgatcaaaggccgataatttggaaatactcctccttgcaaataaactggacctgtagcttggtattcagctattgtatcatcgaccatcgacctcatcatatttgacaatgtattgactaacacaccagactgattgatcaaagcattgtgcacggcatagtcaacccgatcttggaagttattgaaaaactcatgtgatgcattacatcctgattaaaatttcctccctgcaacccctgagcaccatcaccttgaactccatgcaccccatcaccatgaaccccatggactccttgagaattg

SEQ ID NO: 21079 - DNA, 6762 bp, Oryza sativa
aatttaacttcaagcttttcatctggtagcaacacatgagtatattttcacaattacatcgcatagagtacaagataatacaattctgtgtcatgattcggatgtgttgtctgctcaattccactttttttaggtttatctactttaagaaaataaaaatttttccgttcatcacacaaatttcgatccgtcgtctcctgctcaaaagcaatcacgttgttcgctcatttgttcctcccatattctaaaactatcaggcctcgtgtcacaagcatcgtccacatcccgcaaaatataaggcagattaattgtccaagaacaaaaatgactttttggtcattatacacattgctgatgcctatgattatgcttgggtgtttcgataaataattgagatcaacttcagccacccatcattacccggtgcatcgcacaggcattttgctagtaaggaaaatactaaaatatactgtttatgggcccacatgttagttttctttttctctttcttctctcgtctttttcctctcaccttagtccatctcttccttctgccgagcaacataggggaggtatagaggagggcacctgtgctccggtggccggggattggtgacgtcggtggcggatgatgttcccgagcgacacgcatctagggagggtggtggctggtagagagagatggttggaaaggcgaggacaaagcttggtctggctaggagagaaacctccggtagggcttgatacgggatgaaagtgttgatgtgaaaacacgaggcctgggagatctgcttaactccagtgcaggtccaaaactcgcattcgggtatgttagcgtgccagttgatttgatcctgcaatcaacaagaaacaaagacaaagaaaccgcggttaaatccataaacgatagccgatcggctaggtgccgatgacatatcatttatctttgagccgatgtcatatatgcatcgatcagcaggcattaataaacaagacagaactaaatctactcgatcggctgtagatattaacgatatataatccttatatcgatatatacttaaatcaagtgattgggatatatcggtcgccatgccgagacaatataaatcacttagatcaaaatatatattaataatgagattatatatatttatagcgtagccgatcagatagatctagcatgtatcggctaatactccgataccactctatactaagatatcaaagcaagtaaaatatatcaaacaaaagcctaatatacttatatgcaacaagatcttaacataaagggcagatttaacatatcaacgaagcatataaggtaaatatagttaaatcaggtaagatcggctgaaaccctgatactaccctaatcggcaaccaagaagcaggctagagattgagattctaatcacgactcataagatcaaactcaactgatgcatcattaagtatgacaagaaggacaatatctagacaatcaagccgctgggagtttcatagagtggtagatatcttatataatctaaatcaacgtcaaaatctaacctaatcggctgccctctactaatagatgttagccgattgtaggttagatagcgatattgccagagattatgtaagatatatgataactcgacgaattacataaacaagattagagtatcataaagatggaagcactaatcccgagaacgcaagccgccataacaagttttacctcttgttgaagatcgaaaccgatgcagctcaacccgaaagcaagaactcgttgaaacaaaacaaaagcaaaaagggtggcgatgcgccgagattgtattgaacgtgtgttagtttgattacatggggctcggggtctatttatacccgagattacaaaacatgtccatatcggacacgactcctatctctaacaaactctaagataccataagtctttgcggcagacttttgcccaagcatatctctaaggaaattacataaaacatcctaattaatagatacaattgccttctcaggactctatccatacgtggcaatcctcatgaagcacatcaacccaacccaacaacatatgccgtgtcatattgtcagattcggctcaatcggctaaccttgtccaactcggactctgccgatcttggcaacagccgattcggacattaaccgatcctctctctgtttccggagcaatctctatctcgaactccgcttcaattccatcttcttctccgatacttggattaccaaatttggttgttaacagaaagagaagggtaaaagtagaaaaatgggttcgtcggagtagagatatgctaatggtgcgaggctttggtgtgaggggagccggtggaggagattggcatggccggcatgggaaagagaagaaagctcaaagagctcagttgtggataaaatatggggagctcgtgtcttatataggcggcggctaatggcggtttggaggagaagggcgacgaggacatgatagcgattggcgccgactcttgtccgtgattggctggcctgcccggccatggcggtttggcctggtggcaggcgtcggtgggagcagaacagcgggtggccggcagcacgcccatggcgcacggtggcggcacccactgggatgacgagcgtctgcctctactcggctaggctggctagctaggtcgacttgggccgaagggagacagggtggccggttagggttaggaaatgaagatgggccgagagaagagggaaaaggatttcggcccaaaggaattgttcgtgaatttgaataattttgatttgcataggatttgtatttgaagtgaatttgaataggagattttttaagggaatttatatttgggataattttcagaatgggtatttttcaactttatttgagtgcaacattttagaggtggaatttgagggaatttatttggaagcactcaaataagaaataggaatattttgcactatgagtagtagagctcctaatttggatatatttttgggaatgtggtagaaaatatatgaatgcagataaataggatttttcccccaaaaaataggtggcatggatttagagaaatattttgtggctaatatggatttagaaaaatttggagtttttggaagggatggattgaaagttattttcttaggacaagagctgaagagcaattattctaatatttataatattgctattcttgtgctggggagacttagtttctggaaattagaattggaggctagatcaaaataggagcttcacgaaagaatatatgatagaatattttagatggagaagaactaaggagtttcagcgatgggtctagatggagagtttgatcgaggattaattccagaaataattggcactgtgtcggtctagtttgaaaggtaatattagatgatttcttggaccataatcaataaagtaaaagaagttttcaaataaattgaataaagaaattttagtcgaaataaggtttaaaattcaaaaataaaatccaatctggaaatacctcaatttactaagatatatttttaaatgaaaaccacaaaaaaaattaaataccaaaaattttttgtgtaagttagttttaggaggttacctataattatattttcctaggtttaggaagttattaaaaaataagaatcaacatgatgcaggattagaaaatagttaattttcacgatgttacatgcgaacagcacgaacgggtcgacgatctgccaaagcgaggcatgtatgagggtggtgaggtcatagagacatcaaatgtacagggaatcaaacaatggctcaacggcatagacggaatcgatgatggaggtggcagccggtgacgaggaagacggtggctgatcaacgcatttacttgatctttggccgtggtccttggccaggacaatggatcaccggcatagactatcacgcccagaaattcacgaaccagaatttctgagctgaatgtgcattaaacccctgtccaggaccagcaagtgtacacaaacgataattgttgacatacagatccacgtcttacaagaatataaaagattacaaatgcagcggaaaaagtaaaagcgagctaagcctgaagacttgactcctgcagcgggcgactccattccacaggcaatccttgacagcagcaacaaaaccaacctcaacgagacagctccaactaggaagatcttcagctctggtgagggggaaaagagagcaagactgagtactacccactatactcagcaagtcataccggaagaggaggtatgatgcaggatatatccaagggaggctaaaggttcttttgcataaagctagcatttaaaagcagtagttgaaagcagtaaaacagttgtagtaattaatcaatattaaccaatcactgtccaacgctaccccacattgcaacaggcccaaccaatcacctgaactacaccagttcaattagctaactaggggtgagactaatcacggtgaatctggtcgaccgcccataaccgcgggcacggctattcgaatagttttactctgattagaggtgtacaactgtacccacaagacatgttcccgtgcgccgacatgccaccacgacataccggaaagaggccgtgacaggacccttcgcataaccccctctaaccgatcgcaccacaccacaaggttcgcccccgtcctcagcaggcaacgggcagcccccctctcgtgccacggtgaatccggaagccgatcaaccaaacaccccggccgacccaactccatcacgcccaccctaacctgggtacgtcggctagaggaaagctacacaacaagcccagccattgcccacgctggcttgtggtaagtacaataagttcttccagggcatcccgcgaaccggtccttaatcgccatgggcacgactagcaaaaccatgcacccacagcccaccatgtagtgtattttaattaactaacaccattgcggtggcactaatccaaagctatgccaataatcaaactctatgcattaatgtgttttcctcttttgtgtactagttgaactaagcatggctaagcatttcctaaaccaacatctaatcattttaatacccaagttatcaatggcatgaggtgaacaatatatggctgggtagtaggacccatcgcacatgatattgtaaaacaatgcaacatttaatagaaatgcgggacatttgtaaattgggaacaatatgatcaactgtaatgcatgacttgccttgttctcgcactgacgagatcacaacaacgtcttcgagggatcgcggatcgacaaaacggctgaaatctatgcgacaaacaaagcacacaagcaaaacaggctataagactactaaaaaaagaaaacaaaaccatttttaatggatttattctactttcacccctgctatcctagagaagtattcctgtcaaactcttcttgaccatggagcaacctctttttgagttgtctgctcctcggggcgaactctatgagccacctccttcatcggagtcaatttatacaactggctatgaaatttgtcctgaactaattagtatggttaggaaaaatcctttttctgtctttgatctagaaaatccctaccatcatctgtgagactttgaacaagtctgctcatgccttaagattcgtggcatgagacaagaaactatgtggtggaaattgttcccgttctctcttcaagagagagcaaagcaatggtacacctctaccgttggatgtgtaaacggtagctgggaaaagctgcgagaccaaccctgtccttacccgagtatgtgcttctccaacatttccatacgggtttggataaggagtctgcattccatctggacataaccgccggaggatcgttcatgcacaaaacaccttcagaaggaagaacaattttggatcgtattctagaaaatacttccttcatgacgcagtccaatgaaccccagcaggaggcatccgtgtccaagatagaggaacctctaatgatcgagccacccgctgaaccatccacttctgctagcttggttgatgagaaggttcctgagcagccgtccgtcgagaatgaagaaattcagactctagattgtgccgcaattatgtttagggacggttttgacgaagactacggcaataccctgaactattttagcaagaggaaaccacccgttcctttgtcacccccccgatcctatggaactcgggttactttgagaaactgttcgggagttgacatctgtaatgagcgatgaatggctaaggaaggcagagctttcatccgaagtaattcggataaataccgctccccgaatcattccttgccttccggaagggaacgacgtcggtattctctacagtccaactgtcggggccaacctcgtttctgagtcttttgcattcgcttatttaagcgataaggcagtgaccccgacaaacaaattcttcaacaaatggaaatatcatcgaaggatttgggattgtacaaaatgtacctgtctgctttaaagatagggaggtgatcttggatttccacgtctttgaaatccaagactttgacatcctaatcgggttgcccattgagcaacttcttatcaacacgcctcgattaggtagcctcaaaataacactaggagagaatgaattctcaattccattcttacgggcaaggatcacctttaccgaccctctcccagagattgagttagcggaagaggttaccgcagttcctc

SEQ ID NO: 21080 - DNA, 3949 bp, Oryza sativa
  unsure (1)..(3949): unsure at all n locations
acgatatgctttcctacataatgacagagaggcccgtatcataatcagtgacaagctctctgaagacgagactcaacgtcttctcaccgtgttggagaagcatcgttctattcttggctgctcgcttcaatatcttagggggattaatctcgcgctttgcacccatcgtattcctattgaccccgagagtactccctccagggaacctcaacgacggctcaataatgcaatgcgagaggttgtaaagaaagaggtcttgaaactcctgcgtgccgggattatttatcccgtaccatacagtgagtgggttagcccagtccaggttctgccgaagaagggaggaatgacggtcgttgcaaaaaacaatggaggacggaggatgtgcatcgattacaggaaacttaacaaggctacaaaaaaggatcatttcccgctacccttcattgatgaaatgttggaacggctggcaaaccattccattttatgtttccttgatgggtattctaggtatcatcaaattcctatccatccggaggaccaaagtaagactacgttcacatgtccgtatggtacctatgcataccgtaggatgtccttcggactgtgtaacgctcctgcatctttccaaagatgtatgatgtctattttctcggacatgatcgaagacatcatggaagtcttcatggatgacttctcggtctatggaaagactttcggtcattgtctgcggaatttagacaaagtcttacaatgatgccaagaaaatgacctggtgcttaattgggaaaaatgccatttcatggtccgtgaagggatagttcttgggcatcgagtgtctgaacgaggaatcgaggttgatcgtgctaaaatcgatgttatagatcagcttcctcctcctatgaacatcaaaggaatccacagcttcatgggtcatgctggctttcatcaaggacttctctacaattgccagacctctgaccaatttgctagccaaggacgcgccctttgagttcgatgacgcgttcctaaaatcttttgaaattctcaaaaaggcactcatctccgctccaatcatttaacctcctgattgggctctgcgcttcaagatcatgtgtgatgcaagtgactttgctgttggtgcagtcttgggccaaaccaaagataaaaagcatcatgcaatctgttacgctagcaaaactctaaccggagctcagctgaattatgcaactactgaaaaagagcttctcgcggttgtttttgctatcgataagtttagatcttacttagtgggagccaaggtgataatttatactgatcatgctgctttgaaatacctgctcactaagagagatgctaaacctctcctcttaagatggattttgcaacttcaagaatttgacttagaaattaaaggtaaaaagggagtagaaaattccgtagcagatcatttgttcaggctacagctcactaacatgcaggaacaaccgataaatgatttcttaagagatgacatgctgacgacggttcgcgactccaacccgtggtttgccaacatagtaaactacatggtatccaagtacataccactaggggaaaatcaacaaaaactgaagtatgaaagtcgccgtcatatatgggatgagccatacctatatcgggtttgctccgatggcttactacgaagatgtgcgccaactgaagaaggacttaagatcatagaacaatgtcatgcctcaccctatggtggccattacggtgcattccgcacccaggccaaaatctggcaaagtggtttcttctagccgacaatgtacgaagtctcaaaagaattcgtcagaagatgcacaagctgccagaggcaaggaggaatcactgctcgcgatgcaatgccccttacgtacaatttgcaagttgagatattcgatgtttgggatatagactttatgggaccttttcctaagtctcgcaactgcaagtacattctggtggcagtcgactatgtctcgaagtgggttgaggctatgccgtgcagcgccgcggatgtgagacatgccaagaatatgttcacagaaaccatcttcccaagatttggtactcccaggatggtcataagtgacggaggttctcatttcattgacaaaaccttccaagacctcctacgagagatgggagccaaacacattgtggccactccttaccatccacagaccagtggtcaagcagaaacatcgaacaaacaaatcaagaatattctgcaaaagacggtcgacaaaatgggaacatgatggaaggaaagattgccagacgcactgtgggcataccagacagcgtacaagacacccgttggaatgtccccatatcagatagtatacgggaaatcatgtcgattacccgtagaacttgagcacaacgcatactgngccatcaggaattggaacatggattttgagggagcagganaatggagaaaaatacagattgctgaatttgatgaatggagggagaaggcttaccacaacgcgaagatatacagagaatggacgaagcgctggcatgacaaaataatcaaaatcaagaaattcaagccaggagacaaagtactgatgttcaactccagggttaagcttttcggccacggaaaactgcgcagcaaatgggaaggaccgttcgacgtcatcgatacctcttcacacggggcaatcacactccgcgacgactcaggtaacatatttaaggtaaacgatcaacgcttaaaaattttccttgagccaaatgaaactgttgacgaagaagtggatgttattgaattaatcgattatgaaccatgatgatctcatctaatgcatgcttaaaaccctgcatagttgtcagttttgtgcttagaataggtttttgcgggcctagaaaaaattcggtggccagccggacctccctgatcgccgttgatcctggggtttggcgtggacgctccagacgttctcccaatgacggttgcggggcagttcggacatttccccttctcacaaccgtcataactgtcctataaaaggacctcacttcattcactctcacacacactttcaagcttgagttgaattataagaggctctattgtactatatttaatactagaataggaagagagtagagtagaagaagtcggaaggattccggagttgtcggtaatcttctcctatttcttttattctgtttattactatgaattcaatataatattcttcttgagtaatctagatttatcttgtgagaattatctgatgacgctctctctcctggcccgatcttctgatgaggggataactcttgctttgatcgagtgcgacgtttgcgacgtggctaccaaccagaacaagtccaggacgccatgcaatcgctacaccacaaacgatgtcgtaccaaccgtgacacgcggttgatgatccctgcaatgcaaacgagagaacactgcaagaacaagataagatgcaatctaaatattgcgaataggtgattaagcacaaagtaatagttgcgattgaagtggtagatccaatcgacccggcaaatcaacacaccaactatttggggctctgaatcaatagtccccgactaatcgagcgaggactagagacaaggtgaatggcacttggcaaaattcaactaagtaaaacccaaatggttttaggatgtacaaagctatttataaagaaaaataaagctagggttaattgctaattcgtggaggtggagggagacacttccgagatgggcctagtctattacaaggcccaaggcccaagttcggttttagcaacagcactgtcttattttggcgattcccgttgactcgagatgaatttggacatgagactggatgtgtttgaaaggtagcgagataagctttcaacgaagtccaagatcacccaaatcggattggcatgaaggcgct

SEQ ID NO: 21081 - DNA, 5394 bp, Oryza sativa
ggaaagggcatggaagggatccaaactaaaattgaggggtatgtaagagattgagcaaatttcaggggtatagaagggattatgtgaacttcaatgggtaattaattttatctactaattaggatgttttatgtaatttccttagagatatgtttgggcaaaagtctgccgcaaagacttatggtatcttaaagtttgttagagacaagagtcgtgtccgacaaggacatatattgtatctcgggtataaatatgacccaaactcatgtaatcaaacaacacacgttcaatacaatctcggcgcatcgccacccttttactttcgttttgtttcgacgagttcttgttttcgggttgagctgcatcggtttcgatcttcgactagagctaaaacttgttatggcggcttgcgttctcgggattagtgcttccatctttatgatactctaatcttgtttatgtaattcatcgagttatcatatatcttacataatctttggtaatattgttacttaacctccaatcggccaacatctatcattggaaggcagccgatcaggttaaatactaatgttgactcagattatgtaggatatcttccaccctatgaaacatccaacggcttgattgtccagatgttgttgttcttttcatacttatagctacatcagttgagtttgaccttataagtcgtgattagaatcttaatctctagcctatctttggttgccgattagggtagtatcggggttttagctgattttacctgatttagccttatatcttatatgctcagttgacatactagtgttgacgaaaaaatcgaacacaccggcctgggagatatgcttagctccagtgcaggtccaaatatgatgagatgcaggcgtgccaatcagtttgatcctgcaactgacaagatatgcaaatagtagatcaaaacagtcaatcggctgacaagccgatggagtagttctagccgatagccgataatagccgatgccaataccagccgatagcggtagggtttaagcaatcggctatatgtccaatgtaaataatgatatgaaggcaatcggctgatgatgatgtaataaaataacaatataatccagtagaaaccaatcggctagaaacaaaatataataagcactgattcgaaggttaaagcatacatcagctggaggtccgatgtcatgaaatccacaagattagattaaacagtgaaacctttgtcgtcatttcctaaatccaacttatatgtatatgcaatccttatgagccgatgcaacgtccagataactcaccggctgaaaccccgatgaaacccttattggcagtcaaaaagcaggctagagattatggttctaagcacgacttagtagatcaaacttaactgatgcagcactaagtataaaaagaaacataatatctagacaatcaagtcgttgactgagttttcagggtggtagatgtctaagctaatctaatctaacaacgcgatttagccgataccggcagaaaccctaaaacgagaagcagccgatagagctaaattgatatgctaagactagattaacatagacatatgataaataggtagggaaatatatcatccaaaccagagcaatccaagaggtcgaatgtactgatgcagccttgaacgacgccgatgtagatgagacaattgcctgggccgacggaacattggacttaccccttcgctggagatcaaacaccgatgcagccccgcgtcaggtgccaactcccgctggacgataaaataaagtagaaaaggtaaaaggtggcgatgcgccgaattgtattgatcgtagcgatagattacatagaccccgggtgtacatatttatacccatgggttgatacaagtccttgtcggacaagaaagaaactaacctaaagataaaaggaaaatataaagtccttatcggacactacacacactttcctaaagataaaaggaaactaacaaactattcctaattaatagataaactgccatgccgcatcgtctttaaactcggtcacttagggataagcttcctttagtagattgatttccttaactgaatatagtaggaatctgactattggcgacttgataactcccatcggctgattccgagatgctgcagctgataatgattctaagccgatgacgtctttgccgattaccaaatttcactgttaacacatctttgccgattaccaaatttcactgttaacaactagatctgccctttatattaagatcttgttgcatctaggtatattaagcttcctgtttgatatattttgcctgctttaatatcttaatatagagtagtatcggagtactagccaatatatgctagatctatctgattggctatgttatgaatgcttatggtccttttgttaatatatatttcgatctaactggtttatactgtctcggcatgacgaccgatctatgccaatcacttgatttaagtatatatcgatgaagggattatataccgttaatacctacagccgatcgaatagattaagttcttttcttgcttgttcatgattgccgatcgactcaaatatgacatcggctcaaagataaatgatatgtcatcggcgattgcccgatcgactatcatttatgggatttaaccacgaattctttgtctttgtttcttgttgattgcaggatcaaatcaactggcacgctcacaaacctaaagtcaagatttttggacttgcactgaagttaagcagatcttccaggcctcgtgtttttcgcatcaacatcgtgctagggtttaccaaaagtcgtatcctgattattttgacaatatcccatatcctcgtggttatggagttcccgaatttaccaagtttagtggtgaggatagtatgaccatatggcagcatgtaggtcaatttgtagctcaatgtggtgaggctagtagttcagatacatataaattgcgcttgttttctttatatttgtccggtactgcttttacatggtttacttatttaccagcaaattctattcagatacatataagtatagttttgacgtggccaagtgtgataaaatttttgattatcttttgcaagaaaagcaaattagattacctaaaggccatatcataccatctcaagaagaattaaaacgtcgagcttattgtaaatggcatgattctcattctcatagtactaatgattgcaatgtgtttcgacgacatgttcaatcggcgatagatgaaggacgattgaaatttaccgatggttccaagatgaatcttgatcgtgatcctttcccggtgaatgcaattgatttcaatgaaaataaggtgttgatttggtcggagcaagccgaatctactaaagggaaggaagtggtcattggagaacctaggcctaaaaatgatggtgccaaaaaatccggaggttggtgtttggaaggagaataggagtgaagcttcaagttccaaagccccaaagaagactaaggtgacttttaatatgcttttgtacaagtatgagaagcaaggtggtgagaaaaatcacaataagggcaaaagactaagatcacctcctagggagtgatttggtcattcaccaagacgagtggagtcacctttccctcatcatcctcaagccatgccttgtccaatgccgccgtcaggttatccttttctttacttcatgccatggggggcaccgccaccaatgtttaatcatatgcctccaatgcaattccatcaaggttggggaggaccgaggaggtcagcacatgagcgtttgtcttcaccaaacaatggcctgttttatgctaaaaatcaggtcaatgaagaaaagagggaaggaaagcgcgtcaaggtggaaacgagaacttcggaggtgattactatcaaggtggggtctcatgatgtgccaataccttctggagatgaagccggggagtcccaaggtaacaaatccgaagccgggatcaattcttcgtagactgccagtctgaccagcccctctggccggtctgactgcggccctacggccggtctgaccgatggcatcatgccggtcagaccggaccatcaggccggcctaaccgctggccacacgccggtctgaccaggccctctggccggtctgacaggtgctcttcattcggtctgataggacattcgcaaagggtagctcgggggcttcatcgtcttcgagtaaaatcaacaggggtcattatatacctcctggaacagagccaaaatcaaggcggatgcctaaagatttaacggctacccaacatggacatcaacatggtgtgtatgttgcctatggagttttgtgctatggatgaagccgaagttgctcaacattcactaggtcctaaagacgcagtttttgagaagcctaatgagtcaaaccgtcatatgaagcctctttatattaagggttatattgatgggaagccggtctctaggatgttggtagatggaggtgtcgccgtgaatttgatgccatactcgttgttcaagaagttggggcgtggagatgatgagttgaagaagaccaacatgattctcaatggcttcaatgatgaaccaacgaaggcgaatggtgtcttttcggtggagcataccgtggggaacaagacgttaccaactactttcctcatcatcgatgcgcaaggtaattatcatgttattttgggtcgttcttggatccataccaattgttgtgtgccttcaaccttgcaaagaccgatgcttcacttgagtggcgacattggaatattcaatgcttatcggggttagacctttctagctatgatatcatttgtgtttccaatggtgattttgtacctatttctataaagccggctagcatagcacggctagaccatattactttgtataatgagtaaagaagctaatttagagtggttgcaaaagagggtgcaagaatatcggtctacaaagaacgatattggagaaactattgaagactttgatggagtagaaaagcttggtcaagggtttacataggccgatcgtttggaggaagtagacataggtgatggaactaagccaaggctgacttttgtaaacaaaaatagaaagccgattgtaaggttaaaataatcgagttgcttaaagagtatgttgatagctacgcatgggagtaccatgagatgccgttcttagccgtgatcttgttgagcatcggcttccaattaaaccgggttttaggccttataaacaaccacctcgtcgttttaatcctttgctacacgatcgggtcaaagaggagatagaccagttattagaagcggggtttattaggccatgtcattatgcggagtgggtatctagcatagtctcggtggaaaag

SEQ ID NO: 21082 - DNA, 5420 bp, Oryza sativa
gtgttcccttgcgagtctacatgaatgagttcaagaactgatcccgtgcctgctgcatcatcgcgtcgaaatctttcttttgatcaggtgtgaatttttctggatcgatgggcacgacgtttccttcaatgacgtcggtcaatcctaacttctagatcttttccttaacagtgcctggactagctgaggatggcgacagcggtggtttctcggccatgaggaagaattgcttgctgacttcttatcggtcccactgggcgtgccaaaagcgtgttgacgtaaaacacgaggcctgggagatctgcttaactccagtgcaggtccaaagctcgccttcaggtgtgttagcgtgccagttgatttgatcctgcaatcaacaagaaatagaaacaaagaaaccgcggtttaacttataaatgatagccgatcggctaagtgccgatgacatatcatttatctttgagccgatgtcatatgtaaatcgatcggcggttataaatagataataaagaactaaacctactcgatcggctgtagatatcgacaatatatagttttatatcgatatatacttaaatcaagtgattgggatagatcagtcgccatgccgagacaatataaatcacttcgattgaaatatatactgataacagaactatatatgtttatagcatagccgatcagatagatctagcatgtatcggctagtactccgatacaactctatgttaagatattaaaacaagcagaatataccaaacagaagcttaatatacttaaatgcaataatatcctaacgtaaagggcagatttaacatgtcaatgaagcatgtaaagcaaatatagttaaatcagataagatcggctgaaactccgatactaccctaatcggcaactagaagggaggctagagattgatattctaagcacgacttaatagatcaaacttaactgatgcagcattaagtatgaaaagaagaataatatctagacaatcaagccgctgaaagtttcatagagtggtggatatcttatataatctaaatcaatgtcaaaacctaacctaatcggatgccctctattaatagatgttagccgattgtaagttagatagtgatatcgccaaagattatgtaagatatatcataagtcgacgaattacataaataagattagagtatcatgaagatggaagcactaatcccgagaacgcaagccgtcataacaagttttacctcttgttgaagatcgaaacagatgcagctcaacccgaaagcaagaactcgtcgaaataaaaactaaaggaaaagggtggcgatgcgccgaaattgtattgaacgtgtgtgttaaaaattacatagggctcggggtctatttatacttgagaattgccagatatgtccatatcggacatgactattatttgtaacaaactctaagataccataagtctttgcggcagacttttgcccatatttatctctaaggaatttacataaaatagcctaattaatagatacaattgccttcctaggactttatccatgtatggcaatcatcttgaagtgcgtcaactcaaacccgatatcggatacaagtcgtattatgagaatcagttgtatcacttaacccagtctgactcggacttagccgatcctattcatagccgacccgaacctcggccaattcttactctgtctccgcgataatcctcatcttcgattccgcttcaatccaaccttctttccgatgcagatattaccaaatttggtcgttaacacatgcccccaagtccggaatatttggtaatgtttcggatttgcttaacattgactccgagcaagtttcgcactttaccgttttctgaccattattcaagcgcttcaaatactaaccgttgcccccgagaaatctcacactgttactcccgttttcaccgcttaagcgaaactctaccttctctctctccggcgattcctccgacgcaaaaagcgatgtcgtcctccgccagcccgtctgctgcgccatcagctgagtatgcctaggtaagtccccatcagcaagatcccctttctcaatagcagatcgattttcctcgtctcatattgctctcttcttctcggttgctttggatttgcagcacctttccaaccaagttgcgattcctagcctatcgcatgaaaaccactattttctgggtctaataggcaatcttgaccccactgattatcattgttgaaaccaacaggatcccctttaggctagccaaccctaacctgagccactagaaaaatactttcaagtcttggccatctcttgagagaaccacccctgagaaaagttggatcacatggtaccaacgcgtatcagctagtaagaaagctcactgggatgagattggaatcggccaagcacttgacctaaccatagccaactcagctaatgacgagcccttaatggcagccgcctcttatttttggtccaacatcattaacaccttcttgttcaaccaagggccgatgactccaactttgatcgacattaccatgatcaccggtttagatgtaacctcatcggctaatcccatgagcatgaacaccaaaaatcagtttgatttcagaaccaaaagcataggtggctggtctggctatgtggcggcatatatgggtcaaggatctgttactcctcgagagcatgtagccttcttgctaatgtggctcgaaaaattcctcttttgtggatccagttgtggtcctacaaccaactggcaatttgtagccgaagccttagaatcaaagaaagaatttcccttaggcaagatcctcctcggctacttataccaaacattgaacaacgcatcggccaagatagccgttggctcagtagttgatgcaggtggaccatggtggctgctgcaaacctggttacacctgatggttaggaaagttgtcaatcggtcgtctgtgacagaagctgagttcccattgccagagccgattgtaggagacgatggagaagaacgcactcatcgcagatgcacatcatacggagaatatgcatccacaccaactgatgctggagcgaagctatcggctgagctgctcaaggactggttctgcagcttctatgaaggttttaagaaagatgcacaggtttggtttccttatgaagactcagcatatcttgaacttccatcagactttagatttgaagacattaatcatgaaaaattccaaaatccagagaagttctcacagctgcaatcagcccatgcatccttcctgtcggcattcaccaagggagaaacatccaagtctcttatgagtttatcacccaatgagctcggctggacaacttggattaggccaactcccaatcggcttattctttgccgacaagattcaatgctgaggagaaatcacatccactctaatgatggatcggctacttaacctaccaggaccccctctgggcagcattgataatattgagtttgcaggatttagaagcaaaaacttcgacagatggtggggtgaatggaagctgcacttgtttcatcaatcggcttcgatgtatatgacagatctattccctgatgtcatacctcaggtaaacctcaccattgttaacttgaataattgttagccgattcattacttgactaatttcttgttcttgttctgcagacaatcgactcttcccctccacaccaaagtaacagtggcaggcacattgaatatgccccaggtctaattccgaatggaggtggactatctctcccgttatcggctaccatgccactaagacttcaactctcctttacgacttaatcagggaactagccgatgcaggcaagaaaaggaaaaccagatcatcagccgtgagtactttggcctcatctcaaagaaaaaggccaaatccaagaaaactaagccgactgataagccaaccgatgatctgcctgctttggatccatccattaaacaagctctggatgaagaggagattggcgaagatgttgaccaggctgcagccgaagtgagtgacacagaaagaacaccattggcttcacccaagcaaacacctccaactccctctgcccccgttcatttcacaagagtaaatatctctcttcggcttcttttgtaattacctccctcttcagctaattactcatagattttgtggttgcagaagaagaaaactgctgtgaagaagaaaccagcagcgacagttatcaagtcggctccaccagtaagatatctttaattcttttacttaatcaatctcaaccgactctctataacacttgtctattctacagcctcctcctcctctttcccctcctgtacagcaatcgtcaagtaactagactccgtcggctgtggggagtcatcacatcgaggaggaagaacaaccagctgctcctactatcccagtaagtttccttttgattcaagaacttagatcggctatattgacttagctctcaaacttcttgaaactatacctgcaggttctagccgatctcttctcttttgacatcaaagattaccttgatgaggcagaagaagatacttcaagcaaagctctagctcctctatctgacgatgtgaaaagaacacttgaagatatctcacatcggctagaagcttcttctttagttgactgtggatcaattaggacacggctgcatgaagttcaagctctgattcctaaagaattggccgatgtcctaactctagccgcttatctcgagaaacatcagttcaagctagaaaaagccaagctaagactagccgaacgctgtgagcacaaggagattgaagccacaatctaggtcaatcgacagcttgtgcatgaagaaaaaatcaaactcgatcagctatctgagggtccgattaagtccaatattaatcagctcgaagctcgcaagattgatctcttggcacagcttgaagaatggaatgctcaactagatatggagcacaaaaagctagccgatctcccaaaatctgtcgaagaacagaaggcaaggctcaagtcggctatcaagaatgttgctgacctaaccaagtccctaaaggtcacttctggaactgatgctcaagatgcccaagccattgaagaagtcgaacaaattaggcaaagggctatttcggctatccagcagtacttatctcaataactcttgtgtaataggacttagataccttaataccccgctgttttaacaatcctttgtgccgattaatacaacttctaacttcgcccaaaattttattttttttgtacatatgtgcccccctaattttacaatcccaaaaacattgatgaaattataaaaaacaactaagggcgatataataatatcggccattgtatatcgacaattcacaaccgattacaaatagaagaaa

SEQ ID NO: 21083 - DNA, 764 bp, Oryza sativa
aatatggtgaagaattcaaccatttaaacccatgctatcggaaaactgaacaaactcatcggatatgaaaatcgagccttgatcggttgtaataatttgaggaataccaaaccggtagattatatactcttgaacaaattgaattgcatccccagaatcaactttcttcaaaggaatcacctctacccacttggtaaaataatcagtcgccactaatataaacttatgtcctttactcgatggtggatttatcataccgatcatatcaattccccaacctctaaatggccatggcttaatgataggattcatagccgacgccggtgctcgctgaattgctccaaacttctgacaatcttgacaccctttgtaatatctgaaacaatcttccaacattgtcggccaaaaataccctgcacgccgaagtaaccacttcatcttatgagccgactgatgagtaccacaaattccttcatgaactccaccgattgcaactttagcctgatcggcacttaaacacttaagcaacaccccatcaatcgtccgatagtaaagctcatcgtccaataaagtatacttcaatgccttatatctcaatttcctagaagccgattgagatggattctgtaaatactggtgcacatcatacctccaatcatcggctgtcatagctgcaatttcaatcttaacatctttgatcatcggcttataccccgatgccccctgggccaaatcattagcttcaatattttgttctcgagata

SEQ ID NO: 21084 - DNA, 6481 bp, Oryza sativa
aaaaataaatccatccatgctttatatttaggaaattttatttcccacatttaacttcacttgttaattaatgtacatttaatataaattttaataataatttattaaataatttataaatcctaatacgaaaatcaggatgtgacaaagaccgctggaagaaatcacaagaagaaagatagggacttgactcctacaaatgaagggatccatcttacacgcagagtggagattatgggtagttgggtaccacatacccacatggcacgtatatccgactggttataggggataggttgtacagatagaatatagaatatgtttaggaaaggactcgggaattatgttaacttgtatgtcaaggaaatatccagtagtcctagttagttacagttgtaatacatattcgttagcctagtacgtaagccatatgggctgtacattgtaatcttggctcctccccctatataaggtcgggtccaagtgtacctaggggcataacttttctcccagatcatcagatcaataatacactcggtggaataattcccccgctgtataaacctttgcctcctacgtcctaacctatccacttttccagcttgattgctaccccttttagtattgccagaatcttgttttgacagttggcgcgtcaggtaggggttgcaccatgtttttcgccgactagtgcgatgggattcgttccgggcatcaccgacttcgctttccctcccgggcagacgtgctggttcggcggcccatggacctcatcagccacccgtacatgcatgcaaagaagacatcgtacgacagatcaatccatgattataaatcaagctaataatattatatagattgtgaaagaagttcttctgtatatgtgcagaatgaaggatcccttaaagcaaattgtttttgattggttgcaagctttatagttttatttagttccttcgactgtaactttgtaaatattttttgagttatataaaattacactgctcggcaaagccctggcagtatttcaggtcaaaaaagatttcatatagattgaaacgacaaaccaatcgacgtcagagattagaatcatcgatctcattgagattgccctcgagcaaaaacaatgcctttgattcctgaagttgtttccatcgcacttcttgatggataattcgacgcttcccctacctgtcgcgccaactgtttaaactggaattcggcaacatgaaaaagagtatcgcacgagacataaaagtggatggatgcgaagacaagaatttagacaggttcaggccctctcgatgagaggtaaaaccctacacctgtttggggatttgtatccgccaggtggatattgatctgatgatctgattgtggttatccgtgctgatgcccttgtaggggctcattgcccgccttatataggttggggggcagggttacaaagtagaaaacaagccagacagcccactctagtacataatagatggatccggcccactcctatctctagtcgaatatggaggccgtgtcggtacccggtacgcatactctccacaagtttctctacaggaacaaggacgatcaataactaactatctgttttctcttttctattttggttcacacagctacacattgacatttatttttagcattaaatgcctagctctagccttgatgtttacttacatttttctattgtaattttatgtttttgttttagcattggtgtgaatcaggatactcctaataatatatcaacatattttggttgtcatctttttgtgtagtttgttttgaccagaaaaaggttgcttaaaataaaaagaaagattcatgcaagctgaaataattcacacgatagataaatttatttccgaaatttgataacaatgttacaaatgtggcgtgcatgcgatcaatgtgtgggaagcaagtatcacaattaattaattgaaatacaaaagtatgcacgatataatcgacggtggtgtgtatccaaaagaaatttagcgtaaggcctatatataagaaagaactgaggaattgtatgtatgaagttgaatgaaaaaatgatatataatgtagaattgagagttgggaatatatgaaatagaaaattgagaaaaacaatgttaccaaaaatcgtggacaacaccactaatcgatcatgggaattaacaacaagtataataaataaaataatgtacttccacttagtaggtagctagagagcatgcatggaaggctatatatatagctagattattaaagctttatgtgattgatgagggagctagctgtgtcgaaagtatatccaagggttttctgggcggggagatcatcgctataagtgaacaggtaacctatctcgcaaccggatgctttcccgatcccaccgttgtagggtttctccacccctttgatccacttttgcgcattctccagatcctccttgctgcgcttgccatttccggcggcggcgaggcggccgaggctctgcagcgcctccctggtgatgttctcgccggcggctacgctgaagtcatcgacgcaggcgttcaggttcgggtcccccttgccggcccctccctggaccttgcgcaattggtcgacgtagacccagaggttggtgctcaggatggtggcggccacctcggcgaccttcacctggttgccctcgaagaaggcagcgtaggggaggagatggtagtagcagaagctggagccgtcgcggtcggcctgcagggcggtgtcgcagcaggagcggacgaacgctgccgcgtccgcggagggcgcctcccctggcgccgccgctggtggcagcaccaccactggcttctcctccttcgcagcggccgcacatggtggggataagccgccggcgctgacgaccatcaacaccacgaggacggtggccatgctcgagctcgacctgctcatttctgtatattatttatctctccgcctctctctctctctgcttgtttcgttactacaggatgaattacttcataacaacgaggtacaatttatactagtaggctcgattggtcgttaactaattaaccacaacctttctttctaatttattcaatggctgttctagcatcacggcatgtcttttaggtgttgtgatgtagtgccatgcttgcaattataaactactatattaatgcaactaattgtccatatatagacagcctgctcgctttttgtttcatatccattcacttaggcgcctagcattggcttctatatttttgtcaaatccttgcatttttccttggttaatcattaggtctagaaatataatgatatatagtttaaaatttatttaatataatatacgaatatctacaacaatctatttatcttaaccaatcacaactactactgctcgtttaattttctcacataactactcatctcattcaatactaactctttattcagatactcattgttaatatccagaaaaaaagctccaaatatattgttagacggagagaattattattttggaagcaactgcaccacaggccagaagcaaaattcagctatataactactctctccgtcccataatataaatgattttgccctttaaatctgtcccaaatgtaagatatatattttgtgatccgcgacgatattttatacccaacctatcaacttagtgctacttttttcccatctactaatttttaccaatttattttccatctatcaattttttttattccctccgttctatattgtaaaactttctggccctgccaatataatatcaacccaattgatgagagagaaaccacataaaacaatagttttgtgcttgtgtttctcccttcttccggtcttcttccgacgctcctctcagttctcacacgccccctgttgtgcgtaaggtcatagaccacgcacgtgtgccccgctgccccgtcctcactgctacaccgctccgccgcgagggctccacggccaaagctgcgcaatcatgctgctgctcctcatgtgtgtacccctgcgtgtgaggtaaaaggctgccactacgccacggagtcctcatcgtttccgtggggaccatgtcatcgacccttccatccatgatgccccgccagaaggcctccgcaactgccttcttgtcgctctggaggagtagctccctcctgttcatcgtgtcggtgaacttctgtaggattagcttggcgaagacgtcgatgatgttgaggccggtgtcaacctcgcttatgtacaagaacaagcggtcgttgtcgaccagtttcgaccgtcaatattatccaatatatgaagactacctatggttgcaatgcataattcccaaataaaataattacttccactatatgctatgctactaacatgtatgcaggagaagcactcataaatgaagagaaggatgtggaaatatatcaatcaatcagtcgaaagtctgctggtgatctgcaattgcatgagaaggcccaaaagtccaatttaacaatcacaaatgggcctagaatgtatgtcactgatttaggggcccacatggaagtctcctggaggaagctggggccagaagagcccatatagggtatatactgtttttagtaaactgttttttattattagtagtaggtaacagtttatactcttttttcgtgcagtatatttcctagctatgtatatgctgccatttctgcatgaaagtatatactgtttttgtttttagtaagcaacggtatatactgtttttttttatttgtagtaggcagcagtttataggcagctgccatatacttcattttgatgtagagaaatatatacagataaatatcccacatacgtgttttttatgacagtatatacttattttttttaatagtatatacttcttttttttacttagtactgtgcttcaccaaagtagtttaagtactgtgcttcagttaagactagtatatatactgtttcctaggtggtagcaatatacatatatacttctttttaaggtggtagtaacatatacctttttaaggtgcaggtttatacttttgttaagataattgcagtatataccatttttagcagtagcagtatatgctattttttaagatagtagcagtatatatgctatttttattacttgcttttaccctgtcgcagaactcagtgttcgtgctgcatgcacgtattatgatccaaaagttttagtatattctcaaagatatatgtagttccaaaagaactagcctcacagacgagaaaacatgatcaagaacacaaattgaacatgctgaatcgcagattgaaaagtaataatgtacatccaaatcacagtttgtcaaacaaggatccttccccttgcgtgtatattctctccgctggtgccgttggattgtggcgttgagtcgacatgttctgcagacggccggcgcggccggacaccacctgcaagcaacaaaaagattaggggcttattcattcaaatttcaaggaactaaagaaatccatcacaaaccactatcctggaacaacattcacgcatgcaaaggacaattaatctaccatctgttgatgacatttttttcatccaaatcacagtatttttcattctgaactctaggattaatttttatctacgtgtacgtacagagattaaaaggaagaagaataagaaatagtgtatactcatctgagtgtggatctgtgattcagaatttcatatataaactaagaacagtacacaccaccatcctggagatctggtagtagcgataggccgccacggctgccttgactagacatatatgaaaacaaatcacaactaatggtgaaattaactaacaaaggtgcttaccggatctcatcgagatcgagacgatcaattggattagacaaaatacctggccaccgtgatctctgtgcgttttaatccttgcggcactctagcagctgacctataacccgttctgatctccgcttaataagcgagaaacaacggaaagaaaaacgaactggagaaaaggagtagatcagcgcatcgccaatacctagacctattctcgttctgtcgagcggagccagccaatgccattccgtggtcctccgacgccggtagggcagaagacaccaggccgatggatcacgccgtcgcttccgactcgtcgttgacgccaaatcaatgatgtagatatgctgcccttgtcggcaacgatgccaacccctccgaagatcgaggtctccactgataactgatttatcgatctaatgagctgggaaaagggatttatctatccggttttccgattaccgcgggttaattaagattatgttttttttcttgttaaaaatgaaaacgggtccgttctgtgaatccggtaacgggcttcttcggggtggctatgatggacggtagatgggagcgggagcactagtcaagaaatcgtttttagtcccggttcataacccc

SEQ ID NO: 21085 - DNA, 3098 bp, Oryza sativa
acaccatccaggactaaagatcacgtagtcccgttctacttataaaccgggactaaaaaccatctttagtcctggtttttactgcatccgagactattgtggtttttgttcgaccgggcaaagatgatttctccactagtggagtacgtactcctaggtgtatggaatcatttactcttctgtatacctaggtgtatgtgtatgtactccctcttccttgttggatatccattagttgataatgaatagttagattaaaaagaaataaataatattattttttcaaatttcttcatgtccatccgtaggtgttctattttttcaaatttttgcatgcatgcacactgccgaggaatgggcacgtttaaaatttgcatagcacttcatacagctttttctagatcatactatgtaccaccatacattggctattggtagtatatactttttttttctatatcggtactatatttcacttttttctggatcagtagtatataccactatttctagatcagtagtcactggtggagaaaccctttgtagtcccggttcgtaacccccctttagtcccggtttccaaaccgggagtaccaatccgggactaaagatcgctatctttagtcccgggtgaaataaccgggagtaaagatcgatctttagtcccggttggtgttaccaaccgggactaaagatcgagctgaccttttttttttgcatggccctgttgctgcatggtttatatatatatatatatatatatatatatatatatataaaccatgtatatatatgtttcaatacatatatatgcatacatatatatatatatgtatatatatatattatattatattatatgtatatacatgcataatatatatgtatttatacatatatatgttatgcaaatgcatatgtatatagatatatatatgaccaaaatatatttacattatagaaaatgtgtacacatgcatatagaaacatatgtagtcatgtattaattacaatccattatatgtcctagctagctacgatttcgacgtagtagtagtcgctgctagctcagaagctaaggaccggtgaattgtgtttccgtcgtagtagaattcacccttgggatcaaggatttcttcgttgatgaatcccatgagttgttattgaaccgctgcgataaattccttgtgtgtggtcaggttatccctcatgcgaataaactatatgaatgtatgaaattgattagtaattaaacaagaaatcgttacgtaatgaaattttgaatttatttgtacgtacatcgagctctcttgtggtgataatttggtctgcaaggcagtggcaatactcacacacgtagtagccgcacaagttagttccctgcttttgctttgcgcattacaaataaatgacaaattaacggcgtgagatctaattaatatacagttgtatgtattaatttgaatcggagaaatataaatgtagagcatgtgtactcacaggaaatttgaacctccgcctaagtctttctctccagttgccgcggaccaaatgacggaaccgataccaagccctacatggagtttaaagatatgattcgtagtagaaataattaacataacaagaatttcttaattaacagagaaacttatgccagtacctgtctataagttcgaaaaccttgtcaaacgtagactcttttttatccattgagtcatatacattgacggtgcaggccgacaggtcgaagagtaaaagcacccagtggaatctgcaatgtgcgtgggatgcattacatatgaaacacttagcaagttcgtacgggaatgaaatttggtatgtaggaagacagtaaaattaaactaactctgtgttgtacggtaacagtatgaacgtcttgtaatgctgcgccttcaggagatggacgagattgtcctctgtttcctgcggatattggtcgagcattccaacgtttactctccgagggtcgatgaatccagtatcgaaaaccctccgccgtcgggccctttgaatctccattctacaacgataaaagggagtattttattttatatagtctacttatatacaaggacctaattaattaaaggagacatagtaattaagaattataattgaacaatatacttacaaagtccagcaactcataatagagacatcgagggcgtccagctggtatacttcgtagattcccttgaaattgatccagagaatatcatctccttgcaagaagtccgggtccctgatcctcgctccgatcatctctctaccggtggcgctcatctccacgtacagctgatggaacttgtacatttgtgtgggtagggactgcaccagctcaggcttgacaagcggtttaccgagttcgtacatgtatttcaattccgccttttctattggttcaactcctagcaattgatccgtagttagaccggtgtcaataataaattcttctatcgtcatgtctttcccggtcaccaacggctcgatctcctggtttggttgctctccaagctgagggactggtttggactttccagaagatgctttcttcagcgttcgctcatagtccgatagcttgatggcctccttgacaagtgcagacatacccctgaagaagttcatgacactggggtctataggaatcttcttttctggacttcgaggcttgaattgtctcttgacttctgacgcaacgtaagcgtcaagctcctcttgcgtgcaatcgtaccccgggtccttgttcttggcggcgtcaacttttgccttcttcgttgcccttgtgtgggcaggcggtggagctgggggggcctttgactttgaaggtgccggaagaggagcttgcggaggagtaggtgtaggagcacgaggaggagtcggtgcaggatcctgaggaggagtcgatgctggagcctgaggtggagacggtgctggcggagcatgaggaggagacggtgcaggatcctgaggaggagatggcggagccggaggagatggtgcacgagacgccgcttgtcgcccagggaggatgatgtaccgcctgcgccatagaataatggcatggcttgtgtctcgta

SEQ ID NO: 21086 - DNA, 2283 bp, Oryza sativa
aacgggacaggtcgattcgtcctgtgtttgcatggcgtccatgctctgtgatcctacctgccccgttgaggcgcagctgctacggtttcctgacgggctcaccattgcaggaggaatggtcggctggggatcatgggaccgatgtgcggccatgcgttcatcaaccttccttgccacctcctcttgcatgttgagttcgtagctcgatacccggaactctgggtctgcaatcttcgcctcggtatctctcttgctcctcatccgactcctgtacgtgtggatgtcctccttgaaatcaatcttccaaggaatcacccctttccctcgtgttcgtcctggatgctctggagtctgcagggcgagtgtcagctcgtccctatctctgtctggtcggaacgtgccctgagaggaggcttccactgcatctgttagtcgtcgcgcagcctctcgtatctgatcgccgaagaccagtgagccatcagctgggttgagcgttccaccgtgagcatagtaccagaacttcgatcgttccggccaattggctgttgccggttcgatacccctctcaatcaagctagcctccatcttctcccacttcggcatcgcgacgctatagcctcctgaccccaagtggtgatggtacttcttcttggcggcattttctttgtttctttccatcatcgcctgcccttgttcacctgtcttatatgcaacgaactcgtcccagtgatcccttagctttgggaatgtgtcgaagttcggtgtctgccccttcagtatatacttctggtacagatctcccttgaagctctgaaactgttctgccattttcttcagagtccaccttttcactttgtcctctgtacccgcaggaagggtgaatgtctcgagcattctggtccacagcatctctttctccgaatctgggacaaagctctcatgatctccgcgtgcacttgttcttcgccagtacaccgtactgacaggcacgttatcccgcacaacccaaccgctgtgacgtacatagttcttggcggcttcggccggggcactaggacgtccatcttcttccacttccgttatgatgtgccgaccctcaagcttcttcgctgcacctcgttgcccgcgtgcctcttctgtccaacggagggttgactaccactagcctcctcctcctggttcccctccacatccctttccacgtgcccctgctggttcccctccgcatccctctccacgttcccttcctcgttcaagtactggtttggatcctcgttcccctcttcttcattccagtactggctgctttcctgcgcgattgtatcgtacaatatctgttcctcatcgcggtcagccatctgttgatacaagaaacatctgctaagtcacgagacatttatgttttaacaatctaagtcttgtatgctaagtgtaaatgtcgtacattagaaccctacacaaccttacgtgctaagtccaattacaaatcgtgatataagctaagtctaggtgacgtatattatacaaccctagctagtaaataattatatactaagtctaattacaaataaaataatcttatattaaaactcaaataatattacatgctaagactaaaatagtcatgtatatgctaagtgtttcgtgcgtatatgctaagtctaattaagactacaatagtcaattgctacttgtcggaccaattccgtagtcaataattacatactaagtctaattataaataaagtaatcttatattaaaactcaaataatattacatgctaagactaaaatagtcatgtatgctaagtgtttcgtgcgtatatgctaagtctaattaagactacaatagtcaattgctacttgtcgcaccacttccgtagtcaataattacatactaagtctaattacaaataaagtaatcttatattaaaactcaaataatattgcatgctaagactaaaatagtcatgtatgctaagtgtttcgtgtgtatatgctaagtctaattaagactacaatagtcaattgctaggagtcgcaccaattccgtagtcaataatgtcatactaagtctaatttgcaataaaataatcttatattaaaactcaaataatattagaacactacgcaatcttatatgataagtctaattacaggtctctaataatcttaattaattgcattacaaatataacaatcatttatattattacgtcacttgcctgctccaattccttctagggctagctgttccactcaggcttgacggacgactccgac

SEQ ID NO: 21087 - DNA, 5268 bp, Oryza sativa
agcatcatcggctacgggaacctgattctagacacgccactcctgtcttggtcttggtttcctcagccgatggttgatgtcctcttcaacctcctgaaaacgctccctgttcctcaatctctggaccctccttttctgattcttcgtgaaaataccagaaggacaccattgattctttctgatcacctcatcttcttggccacgatcttgactcatcggacccaatctttgatgaacagagagtcttgcctgtttcagccgattatccctattatgtggtcggcttgagctctcgatgatatcactgcatccagggcagttttcaatggatggcaacctcatcccctcattccagcagaatctgaagaactcgcaaccccaatgaggatcaaaaccatcgtcgtattcttcataactcctctcctgctgcttgtcatacttcttctgatacttgttgataatcttagccgaatttacttgaaaaccctttgcacgggctctatcggctgcttgaccagctgtatgcaccatattaataggaaaaggattccaatcgaccttcatcggcttcttggaatcatcaaacctaatctttcccccttcaatggcaacctggatttgctatctaaagaccttacaatcattagtagaatgagacccagaattatgccatttgcaatatctcttcttgcctaattcctcagccgatgggatcgtatgatcggtagggagctgaatctgcttttctcggagtagcaaatcaaaaattttgtcagctttggtgatatcaaagtcatacttctcctctttcccgggactctttacccattggcatggtataaccttttttgctccttacccattcggctgcagctatttcagaatcatcttcttcgtcatccgacccatacatatatggacaaacgtgattaactttctttgagcttttcctgacttccgccgacctatgctcaagcaaggttaccttctgtatcagatgcgataagctatcgaagtcttcggatgaaaatttctccctgattggaggaatcataccctggaaggccaaatcggctaactgagcatcagtcagactcaagctaaagcacttgttccgcatctctctgaacctctgaatatactcgtgcacaggctcatcatgccgctgcttgatcgctgtcaggtcggataacttcatctcatggaccccactgtagaaatagctgtggaattgcttctccaaatcggcccaactattgatcgacccatatggcaaagaggaaaaccaagtaaaagctgatccggacagagataaccggaacaacctaactctcaaggtgtctacagccgatgcttcaccgcactgagcaaggaatcggctgatgtgctcataagtcgacacgccctcttgtctcgaaaacttggagaaatctagaactttaaaccgattgggaagaggaactctttcaaaccactcagggtaaggctgccaatacaaacttccagtttcttttggtttaagtccgaattgctccctcattacatcggcgatgtcacgtcctgataaattcatcccgaaataaaaatcattttctaaaaggaataatagaattaattaaaatttgaaaagaaattggcaaacactaaaatacgtacaagaaaatttcgaatgtggcccggagaatttttgttaaattctccttggtctaaaatgagccctcaaattttacttgaattttcagagcactggaaatatttattaagcaacaacaactatgatcaaagtttattaaaaagaaaacttaaaaataatcctccttcctcctttgggccaagcccagcccaaagtctccctctcctccctctctttccctcctctcccgggcctctcctcctcctcccggcccacctcttccctccccctcccggcccagctccctcccctcccctctctctcccgggcctgcctctccctcctctcctcctgggccgcctccgggcccaagccgagcggcgccctcccacccgtgccgcgcacgtgcgtgcgctgaccgcgcgcctggccgcgtggggcccacgcgccggtcgtcttcctcctcccgcacggcctcttctctctcccgtgcaaacctagcgccgttcctcctccaaatccgccccaatcaagccggctctttccaaattaattggggggttttaatccccattgattcctcttcaattccccccaatttcccccttgaatcgtgcccccaatcgccgggaacggacgcgccaaccccggtcaccttgcaaggccgccgggcgcctattccgccgccgttccccgcctctcccatggccggctccctctcctcccctataaaatggaatccccatcctccgttctatcgttttagccccctcccgcgttctcccgtggcctcaccacccctccccgccgccgcccttctctttcccccgcgccggcctcctccagccgcctctccctcctcgcccgagcgccgtccggccatgccgtcgccttccccggcgtcgcagccgcctcctcttccccggcgctgcctccgattcgtggggaaatcatcggagacgcgcccccgccggcgtccagtggcgtcgccgccactacaccgtctctggccggctgctgttcgtcgccggtacgccgaccgacgtcgccgtctcctccgtcgacgtcgcagcgtcgtcctctcctccggctgctcctcagtttcgccggaacaccgccgccgccgcgccggcctctcgtttctcctcgtcgacgtcgccttcggtagccccttccgccgtgcccgtgcgccggccgacgtcgccatctccacctccggcatcacagcggcaaggtcgccctcggcctcgcctcccctccacccgaacaccgccggtgtctgtcgtcgttttcaccgttcatcctcgccggctcgtcgtctcgcggcgccgcctccgtcctcgtctccgtgcagccgctgccggctgccatcgtcgtctcctcgccgtccccggtcgtcgtcgtcgtcgtcctctcgtcgttcccggttttgctcgtcgtggcgttcgtccctccgtcaagccgatcgcgttcgccgcccgtggttcgtcaggcgagccgctgcagccccgtcgtcttcgtcctcgcctccgcgtcgccaagcgttgcaccggccgcgtctcgccttcgtccaaggatcgccgccgaagtcgctccctcgccgttcgcctccgtcgtctccgagccatcttcgccgcgcccgttcaccgtcgtcgttcccacgcctcgtcgcgtggtggtaaggatccatcctctcgctgccccgtcctagtcctttcggtgtcgcccgtgcccgttgtgcggttgtcgaccccggtacccgtgtactggtgtcggtagtcattcgcttgtgtgtgtagtgtccgtgttagtgtgcccgctcggtagccgcgtggtttccacgtgtgcagcccgtgtggtgtctagtggagtccgtttgtcgaccgcttgcctcggttgacacacgggatccgcttccgtcgacccgtggaccgtctctgtgtactcggtctactgtggtcctttaggttgacatgtggagtctgcatgtcaacagcgcagccttcctgtattttccaggctagcgcttacacatgttttataattggaaaacctaatcacaataatccgtcaatctccatgtaacagcattaaacttcggatgatcatatcttggtcatacgaaccccgaatcgacccgttcaagtctcctaatgtttgttataaactaaagaaccgtgtgctttctttttatgtattgttattgcttctttataggcttgtagctttgcttgtgtgcttcgcgtagcttctgtcgttccgaaggttctcgaagcgtggtttgcggtcgtcgccgaaggttcggaaggctgttctctctgagcaaggcaagtcacatcacccttgagcatattgaatcccactttacaaaattattttgatttaaattattgcattaccgctttatttaaattcccgcgtaatcactgttttatttagcacttcctattaatccttgttatagccttatcattgctattgtttattattaccttgttcaccctaggataaacaaaaccccaactagtgggtactctattaacagttccactagtatgaatctaggtagatgcttcgctgactaattaggcaacattaggtggttttataactttagactttgggaattctcatatcatttggacactgtggaatggttggcttgtgatggaattgaacacacacctcccccctctattcaaaaccccaaaatggttttaggttgggctcgaggtgcagggttttgctagtagcacctcggccactataaggaccggtcttcgggcctctgttgcaaagcactataaccacatgtctaatgggtaaggcttaactcggtgctcagtctagtcctgaacaaaaagacacggatagagatggatgaagtcgttgcgacgatggatatctctgaggcaaatgaaggctacacgagctgcggctcggtaatcgagatgtctaggcaaatgaagactacacgggtcggtgcccgttagtcgagatgccatggcactggactagtacacgggtggtctcacccctatgggtgtggcgcacccggtctagatcctgttgctaggggctcaatcctggcctgcctgtcccgggatatcggccgtaggcagggttgggtcggtacttttgtttacggctaggatgggtgaagggttatgtcacatgtttacgacgggttccaaggccatggaatgcggagtaaagatgtgtcttgtgggtaaagatgtacacctctgatcagagtaaatctattcgaatagccgtgccctcggatatgggcaagcctagcaatgtacccaagttagtggtttaattcttaaaaattgcttaacaactaaaaggtggaaaggttggcctgggttggcttgggacgagctgggacctaggtcgggttgccagtttggtctgaatcatcgtaggccttgggttaaggcaggttcgtgtgggtccacggccttgattaataatactgtgtagctctaggatcgtctttataaaatagctatgggcaactaagtgtcttttaaatgctgtttactgcaaaacctaatcccctatattattaccccttgtttcccttgcattaatcatgcatctcccggtgtgacttgctgagtactgtg

SEQ ID NO: 21088 - DNA, 2906 bp, Oryza sativa
tccactagcgtgagtgttcaccatctgttgcagattagaaaggatagaagaagaggggttacactaaagataagaccttaaccaggttaacactgatctgatgtgtgtagaccattatattgttcaagttgattaagcaagcaacctagtatagtcacacactcatcaatgaacttctccaatgatgggaatgcaaccatacctacacacaaagcaaacaacaaacgttctaccctactaactattcttcaaaattactttggcggtataggtgctaagacaggatccaaacttcattccatcttgaccacttggcacttcagttcttcctcgatccactttacttaacctccatcagtagacctcattggcgtcttcaggtttcaaccactagtttcagaactacttcaagttgaacgagagaggagagtagacaatgaaacaatttgcaaagaattctagataaggaagaaaggagaaattttcacaaattatgttttcggaaaattagtccttaaggtttgaccatttggcttatcctacagtcgagatggctctgataccaacttgtcacgcccggaaattcactagtaatttccgaactaatttgtgcatagaaccctcgtccaggaatcagccgaggtacacaaactgacaatttaatatactgaatcatcaataatagcgttacatacttacaaaagaaaagaaaactgcagcggaattacggtctagcgaagctccactcccacaggcagctcaactggggtataagccaaacgtcttctccttctggatcctttatcttcaactgaggtttgatgattattgcaagaatgagcatatgacatactcaacaagccacacagcaaatatgcaagtgcacaaggataccaaaggatggcataatataggctcatttgcgaaagcagcatttagcaaagagttaagagtagtaaaacagtagagtaattaatcagaaattttaatcaacactgaacagcacacccatgctgtacaggcccaaccatcctgaacaaccatacccggctgaacagatctaactccaaaccaggagctaagcaaattattaccagttaatcatcaataattattgtgagaggtgtgagactaatcacgaaaaacattgctcaactcgcccataaccgcgggcacggctattcgaatagttttactctggccagaggtgtaccactgtacccacaagacacgattccacacatgttgccatgccccgaaataccaccacggcattgcaaaggggaaaatcgtaacaataccctttgcacaacacaactcaaaacagtgcaccgttcctggatcataatcacccccttataaacaaggcatggactccccagcgacccccgtggacttctcgccacttctcagtctggcgcactataatgaaccatgctatacaaaggataaagccgttgcccacgctggcttgtggttggtacggttaatgtctcacaacagtagctcgcgaaccggtccttaattgtcatgagcacaaccatcaaaaccatatgctcacaacccaccttaaccaggttttaattatcaattaattaacatcacacgattaaccatcgtgagctaccattaaatataaccataaataataatgtagtatatatgattcatcccattagtgagctaatgtttctaagcattgctaagcaattatatatataacttttagctgaaccaaaccaatacataaggttcaagctaatcaatttattacccaaggtatcaaggaatagggcattcaatgcaaattggccataacaaaggaataggttcacaccacccggtgacattcgaaaataaatgcacagttgaaacaaatagagaatttaaatataggatcaacatgctcaaaggattgtgtttaggatctgtgtgacttgccttgcaataatcggtcttcaattaatcttcttgatcacttccgacgcactcacgaaccttcgcaacgacggaaacgacaagctaacacgcaaaacgaagaaaaagactaataaaaaccaaataaacagtatataaaaaataaacaaacatgtagatcataattttagatgaattatgagacttgaacggcctcattctgacttcaaatgaatttattatgaattttacaagattaaatctaattaaagcccatttaaaaagaattaaataaatttaattcaatttatggataattttaatatgtagatctttattttagaaaaatttagcaacttgaaccacctgaaacggatctatggttatttagttatgattttccgaagatttaatctacgggaaaaagataaaccgatgacgtcatgctgacatcacccatggccgaaccaagatggcgacctcgccggagatagagcggccggctgcggaaaaggagggcatgtacacgtagaggacgacgagacgaacccgatggtactcaccaacgcgacgaacgacgacggatgacggccggcgacgaagaagcgacggcggcggcggcttgcacggtggcgacggctctacgggtcacgggagaggacgggagagggggcaaacgaaagaggaggactagggggtcctatttatagccttggattgaagagatcggactcctcccgcaagaaatcgatccgggaaaatcaaaactcggttttggagataaactcgaaaacgagtttgattcggataaaatacccaacgatttgctccgattcttgggggaaaagatagaggaggatgagaggatcaaaacccctcaaaaatccggaagaaacggggtcggattggagcggacttggaggcggaaaggcgacgcggcgcgcggctcgggctcagctaggcagccggctggaggttagggacgacac

SEQ ID NO: 21089 - DNA, 6847 bp, Oryza sativa
cgtggactccttgcagattgttgccttgatcgctcggggagccgtcggtagcacctttagaactcggttgagccgagccgcctggagcttgtttcacttctccatctttagaagaaccggtcccaggattatcagcaaccacttttatcttatacttctgaacaagcgtgcccttgcgggtttgcatgaacgagctcaggaactgatcccgtgcttgctgcatcgatgcttcaaactcctgcttctactcaggcgtgaatttctctggatcgattggcatgacgttgtcatcaatgatgtcggtcaatcctggcttcggcgccttgcctttaacggaacctgggcttgatggtggcggtggctgtttctcggccatgaggagggactgacgtctgacttctaatcaggtcccaccgggtgtgccaaaagcgtgttgacagaaaacacgtggcttgggagatctgcttaactccagtgcaggtccaaaattcgccttcggatgtattagtgtgccagttgatttgatcctgtaatcaacaagaaatagaaacaaagaaaccgtagttaaatttataaacgatagccgatcggctagatgccgatgacatatcatttatctttgagccgatgtcatctgtgcgtcgatcggcagtcatgaataagtaaaaaaggactaaatctactcgatcggctgtagatattaacaatatatactccttatatcgatgtctacttaaatcaagtgattgggatagatcggtcatcatgccgagacagtataaatcacttagatcgaaatatatgtcaataacaagactatatatgtttatagcatagccgatcagatagatctagcatgtatcggctaatactccgatactactctatatcaagatattaaagcaagtataatatattgagcaaaagcctaacatacttagatacggcaatatcttaacataaagggcagatttaacatatcaataaggcatatagaacaaatgaagttaaatcagatacgatcggctgaaactccgatactattctaatcggcaactagaaggcaggctagagatcgatattctaagcacgacttaacagatcaaactcaactgatgcaacattaagtataaaaagaagaacaatatctagacaatcaagccactagaaatttcatagaatgatagatatcttatataatctagatcaacgtcaagatctaacctaatcggctgtcttctgcatacagatattggcggatagtagtctagatggcgatattgctagagattatgtaagatatatgataatttgatgaattaaataaacaagattagagtgtcatgaagatggaagcactaatcctaagaacgcaatccatcacgacgaattttacctcttgttgaagatcgaaatcgatgcagctcaacccgaaagcaagaactcgtcgaaacaaaactaaagcaaaaagggtggcgatgcgccgaaattatgttgaatgtgtgtgttcaaaattacatagggctcggggtctatttatacccgaggattacaagatatgcccataccggacacaaccattatctctaacaaactctaagataccacaagtctttgcggcagacttttgcccacacttatctataaggaattcacataaaatattctaattaatagatacaattgcctttccaggactctatccatgtgtggcaatcatcttgaagtacattaacttgaacccgatgtcgcgcacaagtcgtattgtcggaatcggctatatcggcttatttagctcgactcagactcagccgatcttgtcgtagccgatctggacttcagccgattcctaccctgttttcaaactcgatctccgcttccgactttgcttcgatctaatcttctctccgctgctaatgttaccaaatttggttgttaacaacttctaatattccttattttttaattccgaatttctattttttcttaattgtatttctatatggactctatactctacttctaatatttcttacttttaaatccgaatttctattatttcctaattgtatttctatatgaactatatactctacttctaatattccttatttttaattctgaaattcagttatttcctaattgtatttctatatggactctagtctcctcttctaatattccttatttttcaattccgaatttcaacaatttctaaattgtatttctatatggactcttctttttctttttctccgattaatgtgagaatttctaggccatgagagcgaacgtggaggcttctttttctattcctttgcatgatatgaggctaaaaaatctgtcacttgtcctataatatatcagacaaggtttttctacacctaggtgccatggcactcattatttgtatgtgactcaaatagttataaaaaaattgaaaaaatgtagtaacatcctttgtgatgatacaagtctatacacaaatatgcaggactaaatttgatctaccattagagaaacaaaaataataaaatcagacagtgaatagtactcgtaaagtgcaaataaaatttattatttttgtttcttcatatatcaatcgaatttagacttgcatgtttgtatagtgttttatattatcatgatctatcttaccaaattttataaaatttttatacaactatttaaattgcatgcatacacctagataccatggtgccatgatgtataggcagtcccgactttctttttacttctacgtgaacagtaccatgcaactgcatgttgcctgccgccgcctcacaaaggatggcttcgcggggggctacgcgtaggtgcgtgcgtcggagataggtgcgggagcactggcggcggaggcgacgcagccgcgcggggccatggaggtggcggagccctgcgcgaccggcggaagcgacggagccgcgtgcgccggcgtgggaccgtgcggagccacgaacgagcggtggaggcgcgtgcgccggcggggccgcgccgagctatgtgcgggcggcggagccccgcgcaaccggtggaggcgacagagtcggcggagccctacgcgaacggcggaagcgacagagccgcccgtggccgcggaggcgacggagccttgcgcggttgcgacgtcgactcagcggaggcgctcgtgggcgacggagccgcgacggccggagccccgcggcgctcgtggaggcgacgatgccggctggccgaggcggcgacagatgcacggagttcccttgccgcgccggggcgcggtgaccagcggccgaagcttggcgcgctagcggcagctccggagcgttccgagccacgcggggctagcggaggcggcggttcccgagtgtgctggcagagcaggaggcggagtaccccggcgcgcgcgttgcatggcgcgtggtcgtcaagtttgacgtggttgtgggttccatcctgaccatgctggcagtacgtattagctattctagctagcactgcaggacagcacacgatcgtgatggctgcacacgcatgtgcgatgcatgctgtgccgcgcaccacctctctgtttctttcttctttttcttgtgcttctgacggcctgagggcgctagtagccgcgccgttgttcagcggcggcgcacaaggacgaagcctccgcgaagcagtctaagcacgacacggaagcggcgtcgtggggcctgacgctgtttcgccatggccgaagcatggaacagcggcggcgcgacgaggccgagtccacgcggagcattgtcggcgcctcaaggcccaccacgcgaggccgaagcgcggcgcggcgctagctcccggcgccgttgggtggagccggcaaggagccacggcctatcgcgcatcagcggggtcacaaggtcgaagccggagctcgatgtggaggcatgccccgcgccggaggccagccgaagttgaacgcacgggttgatgtgcatgagcgtacgtagttttttttttttttgagtggctccgaattcagcctaccacgggctccgaacgcagagcctaccgtagagaggctcggaatttggagcaacttgcggagccttagccgaggcttagaattgcaaacctacacagcttaagactgcaatatatatatatatatatatatatatatatatatatatatatatctcaattgctaacctatcttttttaaagtcgcggagaactactccgtccggccggaaccaggacggtctcgacgctgacttcgccacggagggtacttcactgggtctcttggacgcggaggtctcacattacttggccaagaaaattgcttcgcagaccggagaccgtatgaatctcatcatgacatttttcctttttgttttgaagagtcgcagagaactactccgtccggccggagccaggatggtctcaacactaactccgccatggagattgcttcaccggtctcttggacgcggaggtctcgcatgacttggccaaggaaattgcttcgcgggcaaaggctgcgtgaatctcatcatgaccttttttccttttgctttgaagagttgcggagaactactccgtccggccagagcctagacggtctcgacgctaactctgccacggagattgcttcactggtctcttggacgcggaggtctcgcatgacttagccaaggaaattgcttcgcggggcaaaggctgcgtgaatctcatcataacctttttttctttttgttttgaagagtcgtggagaactactccgtccggctggagccaagatggtctcaacgctgactccggcacggagattgcttcacaggtctcttggacgcggaggtctcacatgacttggccaaggaaattggttcgcggaccagaggccacgtgaatctcatcatgacctttttttccttttgttttcaagagtcatggtgaactactccatccggccggagctaggacggtctcaacactgactccgccgcggagattgcttcatcagtctcttggacgtggaggtctcacatgtgatttgaaatgtaattgcatgatattgtacctactattgcccgaggcagggcaacagcggtggtgcgagccgatcttgagcgcgtaggtggtgcttgaacgcgcaaagatgtagcctagaggggggggggtaaataggttttcctgaaattcacaaacaaatcacagcggtaaaattcagcaggttcggaacctccgggtgtggaacaccggaacttccgatctgctcagactgtccggaacttccggtgttctaaccaccggaacttccgggcaacagaaaaaattgaagatctagcagagacttaaactaatttgcacgaattaaactacaggaagaaagagcaaatacacaatcacagcaacatgcatagaatcatcacagagaagacaaaggcgattttttcccgaagttcgaatcttgcaatcctactctccgttgaggtgctccaaagagctgggtctcgattaacctcttgcctcacccgtgcaaagaacctcgaagaagtccgaggccttcaactcaacatttctaggtcattttctagaatttgagtgaccaccaagatctaactcacaaatccttctagaaaagaccacaagtgcaagttgctctacctaggagaacctctgaaatctcagcacaagaatctttactcacttacctcgtttccttgcggaggtaaggaaaaccttcacaaactttctcgagacatccacatgatctttggaagctctcaggtggcacctaaccgtttaggagaagatctccaagagtaataagcccaagtaacagcccacaagatatccaagtgctcaaacacacctagtcttcaaaccttctccaaatcactcctacactctcatctattctctcaatctcacaagaatggctctagatttgagtggaggaagcaaagggatcttgggagagtctagaacaacctagggcatgaaagaactgaagtgaaaatggccaaaaggtgcgatctggatatatataacggctaggtgacgacatctagccgttactcacatttttgaactggaagaggtccggaagttcctgacattcggaacttccagacaacacttaggaaaatttcacatgtcgcaaggttcggaagttccgggtccagggaccggaacttccggccagccttctctatccggtctggacccatttgcaaaaatggctcccaaaaatattctaccacaaggaacccactaagagcactttttatatctcagaacaacacttggaacccctcttaatagtacggtttttcctaaaactcgatttcaaaaattaaactatcctattgaccttggagcttcaaatccgctttgaatgaatgttgtaggggtctccaagcatcttttgatgtcctaagttcaccttgggagggactaattacctgaatatctcaataaacacattagtcccttaaccttatttatcattaatcaccaaaatccactagggagataaatgcaactttagtgctgacccttggccgtgtcggcggtcgctgtgccgagccctgcgcagagtggctgggacagcgccatcaccaggccgtgcatggcgtgtgcccatgctcaggtctgccggaaggctcgggatgcgtggccttcggcccaaccgccgcgtcggcgaggccgcaggggggaggtctcacatgacgcggccccgcggcggggccgtacaaggccgtgcttgtccgggcggaagctcggcggaaccgcacggggcccgtggcaagcgccgcccctggaaccttgctgcgagtgggagcacctctttataatttactat

SEQ ID NO: 21090 - DNA, 751 bp, Oryza sativa
ggccgagccggcccaagagggggagagggggaaaattttaaggtttttctttttataaaatcattttaattttgtttatttcttcttaattattatttgtgctctgaaaattccactaaaatttatttacacattttaggaaatatacaaaaatcctctaagccttgtttaacttttactttgcacattttaatttttggaggctttcacacggattttaattattctaggcataatttaaaggttatattttagggtcgttttgggacgtgacaaacctacccccttaaacggaatctcgacaccgagatttggaagaactggcgaagagatcgggatgggctgccttcagctcgtcttcacattcccaagtagcttcttccttagcgtggttgctccattggaccttgcaaaaacggattacccggttcctggtccggcgctccatggtgtccaggattttcactggcctctccacgtaggtcaagtcttcgtgaacttcaatttgctctgaatcggcctgctcggatggcactcgaagtcatttcttgagttgcgacacatggaacacatcatgcacgttgcccaaggatgcgggcagctccaactggtaagcgacttctccacgtcgagcaacgatacggaaaggacccacgaaccgaggtgcgagcttccctttcgtctgaaacctgtgtacgccccgcaatggcgtgacccgaaggtacacaaaatcgtccactgcgaattctag

SEQ ID NO: 21091 - DNA, 3159 bp, Oryza sativa
ttggctcaatcggctaaccccatccgactcgaactctgccgatcttagccgtagtcgattcggattccaaccgatccttactctgtttccgggacgatttctcgatttcttcttcatctccgatccctgaattaccaaatttggtcgttaacacatgccccccaagtccagaatattggataatgtttcagatttgccatatgtcgattccgagagaaatccgctcttgccgttttttgactgttattccagcgctttaaatactaaccattacccccgagaaatctcacaccatcttcttccgttttcaccgccgaagtaaactctgtcttctctttcctcggcgatttctctgacgcacaaggcgatcctcagacgacttcgtctccggctagatcgtcgcccgcggcgatgtcgtcctccgccagcccttctgccgcaccgtcggtcgagtacgatgaggtaagttctcatcggctagatctctcttcttcacaacagatcgattttccaactcctcatcttgttttcctcttctcggttcttctggatttgtagcatctctccaacctagttgcaattcccagcctgtcacatgaaaattactacttccttggcccagtcggcaacattgatcctaccgagttcatcattggcgaaaccaataggattccctttagattggccaacccagatctaggtcactggaagaacacctttaaatcttggccatctattgagaaaaccccacccaagaggagctggattacatggtacaagcgcgtgtcggccagcaaaaaagttcactgggacgatagccaattcagccaaagatgaactcatgatgtccgccgccacctatttctggtccaagaccatcaatgcctttttgttcaaccaagggccgatgactccaactctaattgacatcaccatgatcactggattagatgtaacctcatcgactaaccctatgagcatgaacaccaaaaatcaatttgatttcaagaccaaaagcataggcggttggtctggctatgtggcagcatatatgggtcaaggatcggttactcctcgagaacatgtggcctttttgctcatgtggctagaaaagttccttttctgtggatccagttgtggccctacaaccaattggcagtttacagccgaggctctggaatcaaaaagagaatttcccttaggcaagatcctcctcggctacttataccaaatgctgaacaatgcatcggccaaaatagctgttggctcagtagttggagcaggctgctgcagacttggctaaacctgatggtcatgaaagttgtcaatccgccatctgtaatagaagccgaattcccaagtctagagccgattatagaagatgatggagaagagcgcactcatcgcagatgcatgtcatatgaagaatatgcatgcacaccagccgatattggagcaaattatcggctgaactgctcaaggactgggttctgcagttctatgagggctttcagaagatgctcgagtttggtttccttatgaagattgggcaaaccttgagctcccatcggactttagatttgaagacataaatcatgaaagataccaaaagtccagggaaattttctcagctgcaatcagcccatgcatccttcctgtcggtatccatcagggaagaaacatccaagtttcttatgaattctatcatccaatgagctcagccagacaacttggaatgggtcaactcctaatcggcttattctttgccgataagatccagtgccgaggggaaatttcatcaactttgatgatggatcggcagctcaatctccaaggacctcctctgggtagcattgaaaatatagagctggcaaagttcaggagcaaaaccattgacagatggtggggtgaatggaaactgcatctattccataaatcagcttccatgtacaggatagacctctttctagttgttatccctcaggtatgccttgatttaactaactctgtttgaataattgcttagccgattcataacttgactaattttcttttggacctgcagacgacagaattctcccctcctcaccagagcaatagtggtagggacatagagtatgctccaggccttattccaaatggaggtgggccatctccccctgtcatcggctatcatgcccctaggacttcaactcttctccaagggctcatcagagaaccagccgatgccggcaagaagggaaaaaccagatcatcggctgtagatacttcggccccagctccaaaaaagaaaaccaagccaaagaagaccaaggaaaccgatgacttgcctgccctagatccatccattaagcaagctctggatgaagtagagatcggagaggatgttgatcaagctgcagacaaggtgagtgatacagagaaaacaccatcagcttcacccaagcaaactcctccaactccttctgccacagttcatttttccagggtaaacaactctccttgatccctttcgtaatcagttcactttatagccaataactcagagattttatagttgcagaagaaaaaaattgctgtgaagaagaaatctgcagcaacaattctcaaaccggctccaccagtaagatatccttaattcttccattagttgatctcagcagattttatctaacacttgtctcttttatagcctcctcctccttcttctcctgtacaacaatcattgagtgactgtcacgtcctgataaattcatcccgaaattaaaaaaaatcattttctaaaaggaataatagaattaattaaaattcgaaaagaaattggcaaacactgaaatacgtacaagaaaaatccaaatgtgacccggagaatttttgttaaattctccttggtcaaaaaggagccctcaaattttacttgaattttcagagtaccggaaataattattaagcaacaaaaacaattatcaaagtttactaaaaagaaaagctaaaaataaatccccctcctccctttgggccaagtttggcccaaagtcctcccctctccctctcggcccgcggccgaagtcctcctctcctccctctttttctctccctctccctccccctcccctctctctctcgggctgttcctccctcccctcccggcctgcccgg

SEQ ID NO: 21092 - DNA, 2777 bp, Oryza sativa
gtcctcgtccccgtgcagccactgccggctgtcctcgtcgcctcctcgccggtcccggtcgtcgtcgtcgtcgtcctctcgtcgttcccggtcgtcgtggcgttcgtccctccgtcgagccgttctcgtccgtcgtccgcgttcgtcaagcgagccgctgcagccccgtcctcgtcttcgtcctcggctccgcgtcgtcaagcctcgtgccggccgcgtctcgccttcgtccaaggatcgccgccgaagccgtcccctcgccgttcgtctccgttgtgcccgtctgtctccgccgcgcccgttcgtcgttgtcgttcccgcgcctcgtcgcgtggtggtaaggatccctctccctcgctgccccgtcctcgtcctttcggtgtcgcccgtgctcgttgtgcggttgtcggccccggtacccgtgtaccggtgtcggtagtcgttcacgcgtgcgggtggtgaccgtgtagtgtccgtgttagtgtgcccgctcggtagccacgtggtttccacgtgtgcaacccgtgtggtgtctagtggagtccgtttgtcggccactcgcctcggttgacacacgggatccgcttccgtcgacccggggaccgtctctgtgtactcggtctaccgcggttctttaggttgacatctggggtccgcatgtcaacggcgcagccctcctgtcttttccaggctagcgcttatacatgttttatagttgcaaagcttaattataataatccgcaaatctccatataacagcattaaacttcggatgatcatatcttggtcatacgagctccgaatcgacccgttcaagtctcttaatgtttgttataacctaaagaaccctgtgctttgtttttatgtattgttattgcttctttataggcttgtagctttgcttgtgtgcttcgcgtagctttcgtcgttccggaggttccagaagcgtggttcgcggtcgtcgccgaaggttcggaaggccgttctctctgagcaaggcaagtcacgtcatccttgaacatattgaatcccagtttataaaattatgttgctttaaattactgcattaccgctttatttaaattcccgcgttatcactattttatttagccatgcctatttacctttgttaagacattattattgctattgttattattaccttgttcaccctaggataaacaaaaccccaactagtgggtactctattcatggttccactagtatgaatttaggtagatgcttcgctgattaattaggcaacattaggtggttttataactttagactttgggaatattcatatcacctggacactatggaattgttggattatggtggaattggacatacacctctcttcctctttcaaagcccctaaaacctgtttttcggtggggtttgggtgcatgccagttgtgggaagtagcactccggccaatataaggattaagctcgggcctctgttgcaaagcactaccgtacttccacatgtctagtgggtaaggcttagtttgtggctcagtctggttataaacaaaagtacacggatggagatggacgaagtcgggggtcgatggacatctctgggacaaatgaaggctacacgagctgcggtccggtagtcgagatgtcatggcacagggctggtgtcctgctgctagggggctcaatcctgcctacctgtcccggaggttccggccgtaggtggggttgggtcggtactcttgttaatggctaggatgggttgggaactatgtcacgtcttccgtccgtataccgtggtggtatgtggcacgtggttacacgtgaggaagatgtgtcttgtgggtaaagatgtacacctctgatcagagtataatctattcgaatagccgtgccctcggttatgggcaagccgagcaatgtacccaagttagtgttttaattcttaaaatttgcttaacaactaaaatgtggaatggttggcctgggttggcttgggacgagctgggacccagggtcgggttgccagttcggtctgaatcatcgtaggccttgggttaaggtaggttcgtgagggttcacggccttgattaataatactgtgtagctctaggatcgtctttataaaatggctttgggcaactaagtgacttttaaatgctgctttctgcaaaacttaacccctatattattaccccttgtacccccttgcattaatcatgcatctgccggtgtggcttgctgagtactgtggttgtactcattcttgctcaatctttcccctcttcagtaagagaagctttggagaagatgtcttaggtgaagtcctggcttataccccagttgagcgcctgtgaagatggagccataggcccgctagtccgctgctgtttattttttattgccaggcctgaagcgcctttgtaatagtgtaaatattatcgatataataaagatgtgtcttttatatcatgtttgtgtggtgtaccccggcttttcctgggacggggattaatacactagcgttcgggaaaaggcaattctcccggtcgcgacagtgaccaaactccatcggctgcagagagccatcatattgaagaagaagaacaaccagctgctcctgctataccagtaagtttccctttgacacaagaatttagatcggctatatctatttagctctaactccctttaaataattactgtaggtcttagccgatcttttctctttcgacattagagattatcttgatgagacagaaggggataccacaagcaaagctttagcccca

SEQ ID NO: 21093 - DNA, 987 bp, Oryza sativa
cgaaggaggctaatactgataattcaaattgccccctggtaattctggaagttcgactgaatattgcgcatcagatgttcgagaacaacttgaggtatcatcgtttgatctggctgcacataatgaactaaatgcactgggacaacttgattcacagcatgctgccctaggtgattgttaggtgttgcaaatccagtcgatgcattcatcaaaccttgttgttgaataggctgaataacctgttgccttaatggcgtttgctgaatcggctgcaaaacctattgtcttggtggcgtctgctgaattggctgcacaacctgttggattgggggtgtttgttgaaccagctgcacaacctgcagccttggcggtgtttgctgaatcggctgctgctggactgggtcaacggtaggttgaggtggtaaaaacatagctgcaacctgatcttacgttagccgattcacattctgcccactatgctgtggttgttctctcaccaacaaccaaggattgattaattgacctggagccgacgaaggtgcagcgggtgcaggagccgatactggtgccgtcggctgagtcgatggtgcgttaggaggaactgattgaacggcttgttgattatcagtgattaagggccgataatttgggaaagtacctccttgaagataaactggtcccgtagtctgatattcagctattgaaccatcaaccattgacttcaccatgtttgacaaagtattgactaatatcccaaattgattgatcaaaacatgatgtatggcatagtcgtcctgatcctggaagttgttaaactgtagctgtgccgcgttaccatcttggttaagattaccaccttgaaatccctgagaaccatcaccttgaactccttaagagccaatgccctgaactccttgagagccatcaccttggtctccttgaaaaccatctggcagcacctttattcactcggttgagctgagccat

SEQ ID NO: 21094 - DNA, 1033 bp, Oryza sativa
atggccaagttatggccatttgaagtttatatgctctttgaatgaaaatttgcgaatttcttcatttggattttattttaaaaagggtttattgcgtcagccgagggagaggggcgcgcggaccgggtccacgggagtggggcccacacgcagcctcacggtccacggtggaccgggtgcacccgggctcacaccggccggcgccgtgggccccacacgtcagccgcacccgagggcgcgggcggctgacggccgggccccacgcggcagccactcggcatgctcgagggctgccatgccggtgcggtcggcgggaggcggcgcgcccatgccccgatggtcgccgccggtgaccaccggcgcggcggagcggcggccgagagagggaagggaagggggaaaggaggcgacggtccacggctcaccccggggcaatggcggcgacgggggaggcggctggagcggagggaggcggtggcgcggctcgggtcgacggggacgacggcgctccggcgggaggcgaccgaaacggagaggtggacgaggtcggcgaggatgcggcgaagccgaaggaggcggtgccaaggtgggaggcggtccggggcgacgacggtggcggaccggagctcggcggcgacggcggagcagagagcgacgtcgcgagctcgaatccggcgaggaggaagggcggcgagaggcggaaacggacggaggaggtgcggggagggtttaaataaggttggaagggggagagagcggccggaggggagggaaaccggcgcgggaggtacggccgcgattaatggcgccggcgagatttgccggggcaaatccgcccgtttgaatgcgagagagagagggaaaaaaggggggaaagggagaggggatcacggggagtatttccccccactttattgcacgcggggacggcgggatgcggcggatttggcagcggcggcggcgcttggagcgggcggagcggcgggagcgacgggaggacggggatgacgggtgggccccacccgtcagcgag

SEQ ID NO: 21095 - DNA, 5112 bp, Oryza sativa
catataagcagcagcatcgacaacaccagggggcatcgaaagatcatttggacttggcagagcagaacctcccggcggcggaggcgacttgggtggccggtgggcaccctcgtcgatctctctcccctacctctcctccgatctccagccttccctctcccctcggttctagaagtttccagcacttgtattccatagcttcttcttctcttgtccccaaaacagttgttgcttctatggtggatgcttgttgttgagttggaagtagtgggttcctaacaatgtataacagagaatgtttctttagaacactcacttctatatatgtatagatcttttaaaatttccaattatgatatttccaaagagaatgaccatatatgcaatgtaatagaaaaaaaaaatgtttctgcagcctaccaagtaatgcaaatagacatggcgagcttgtgcactgtggagaagtgcagccctgtatgtccacgtcatcaccctaactggtgctggcgagcactgccttggcctggccctcatgtctgcgccactgtgggtgccagtgcaccagcgattgccaccatggagaagtgcttctccaacggctttggcctgcctgggcgcgcatgcgccagccgagctgcacgcctctataggcggtgcccctcgggacctcgttgccgacctcgtcgctctcctgatgccaaccgttgccgccgtcaccggccacacgttcgcaatcgcgcatgacgcggtggacatgagcgccatgttggtatttcttagtaacactactggaaatataattcccagcaatagcattagaaataatcctggtatattatggttacaaatatgatccgcaaacgcacggatataccattgtagcatttcacccgggagtattcgaaggtatcgtatttattttatcccaaggaaatatatgataagagagtactatgctaatagtttatgtattacatgtatacatcaaggtctatgcaggggtaagttaaggataagggtagagtgacacagctaaggattccgctaacccctccttatcttcaatatgactaagtggaaatagaatagaaatgtctcactcttgtacttcaagtatacaacatcctagtctattctaactagtataatctatgtagtataactgttgacgtaaaacactatgcctgggagatctgcttaactccagtgcaggtccaaaactcgccttcggatatgctagcgtgccagttgatttgatcctgcaatcaacaagaaacagagacaaagaaaccgtggttaaatccataaacgatagccgatcggctaggtgccgatgacatatcatctatctttgagtcgatgtcatttatgcatcgatcggcgagcgttaataagtaggaaagaactaaatctactcgatcggctgtagatattaacaatatataatccttatatcgatatatacttaaatcaagtgattgggatatatcggttgccatgccgagacagtataaatcacttagatcgaaatatatattaacaataagactatatacgttcatagcatagccgatcaaatagatctagcatgtatcggctaatactccgataccactctatattaagatatgaaagcaagtagcatatactaaacaaaagcataatatacttaaaagcaacaagatcttaacataaaggcagatttaacatatcaatcaagcatatagaatagatgtagttaaaccaggtaagatcggctgaaaccccgatactaccctaatcggcaaccaatgagcaggctagagatagagattctaatcacgactcataagatcaaactcaactgatgcagctataagtatgaaaagaaagacaatatctagacaatctttttgaagcaaatgacagcaggagatctgttggatatattagaaggattagaaatcagttatagaggggagtaagagacagtccaactacagcagttgctatttcaaagatttacaggaaaggtgatcaacaacttgagaagtgcaaaccctcagttttgggggtagtacttaagaagatctatattttcttttactaagaaagctacttgggtggcagttaatagttgttgatggaaaattcttcgattgcgttctagccacacctgccaccaagttatgaggagcgcccctatcattttctttcttctccctctatgccctgaattcgctaatatttcccaccagtcagagatgtgttgatattgtgactgatttggaacctgtgtaaggcctaaccaactgcagatctggttccaaactgaatttgtgaagctgcactcttttgctaaatgatttgtgtcttcaaaagcatcagtgcaaagactgcaaatccagtcacatggccaatgccgaattagaagattatctgatgtgagaattttctggtgtaagattagccagccaagaaaacgctgctttggctctgcttcagctatccaaaggggttggaaatttgtgctgataatggtaccttggaactgtgcttcataggcgctttttgctgtataaattccattctgagtccatttccagatgatgctgtccgaggttttggcttgcagattgatctcttgcaatagactgccgaggtgaaccaattcattgatttcgcttattgtggtgattggtctttagcgaaataatccagtgattaccctccatctcaaaatgtatacaattagcttttctttttgctaatctgaaaattgccggcgctatgtctttgggtgcacatcctgataaccaattatcttgccaaaaacaacacttctttccatttcccagggagatttttgtgcttgccctaaataattttttgtcgatctcatcacatggggtttccatgttaaaccagggcttactttcatctttccattcaaaccaaagccagcgtaatctcaaggccattgcgaatttttccaaattcagaattcctagacctcccaaagatttgggtctacaaactgcattccagtttacaaggcaactgcccccatttactttttcaggatcatccccttccagagaaaagctcttctaaggcggtcaattcttttgtaaagccatttattttgatgaagaactgtttaatggaatattggtgtcgaggacaaagtgttttttaccagaatttctcttcctgcagaactgaagaagcgccctttccatccagggattcttgaacccactttatctaccagcggttgaagatcaattttgcgcagctttcttgtgtgaataggaatgcccaagtacttgcaggggaaggttgaaacctttccaggaaagatggagagacaatcttccaaatcaacttcattgcagcttatgggatagatttcagttttgtccatatttgtgtgtaaatcactaacatctgcaaaggcagagagaattcgacgaaggactaacatttcttctcgctttggcttcaagaaaagagcaacatcatctgcatagagggaacatctgaaacgtctttgtctttgtagggtggagaggaagccatgagcttctgctttctcaaataatttgtataaaggttccattgcgagaataaaaagcataggggagagcggatctccctgtcggagccctcttgcatgatcaatttctgattctggggtggcatttaaaaggaccatcgaagaggaggtgccgaacagattggagatccaattacaccacttttggctgaaaccaaaattttgtagaacttcaagcaggtatgcccaattaacagtgtcaaaggccttagaaatgtcaacttttaggaaaagagtaggcttttttgctctatgaaaagatttgatcatgttttgaacgaataggatattgtcatggattgctcttttcctaataaaagcactctgactttgggagacaagatatcctaatttcggtgcaagtctgtttgcaaggagtttggcaatgatctttgcagagctgtgcattaagcttataggtcggaaatcttcagctttggaagcatcagtctttttaggaatgaggcatatgtgcgcacagttcaaatcatgaagtctgtagtaacccatgtctccaaagaaagaaacagcttgcatgagatccgttttgataatgctccaggcctgcttgaaaaaagccccaatataaccttctggtccaggggccttttctgagggtaagtctgagatagcctccttaagttcttcttcaaagaattcttcatcaaggtcggagagatctactgtcggcaggtccagagatgaccagttcagacttttctccctaataacaaaggaacctagcttttgagtgaagtatctgttgagtttttcttctttttggctttttgtaactgcgacactactaggggtgtgaaggagaagaatgtgattctttctttttcgcccatttgctttaatctggaagaattttgaattgacatcaccaagctttaaccaagtgattctagctctctgtctcagacgagttctctcaatggctgcaagtcccagaattctggatttaagagatttccgaagggactgttctgcatctgacaaagttctttcctcttgggctacatcaagctgataaactacctcgttggcaatgatcaactgcaatcttatgtctccaatttttgtagctttccatcttctcaaatctctagcaagtctttttagttttagatgaagtcttacaaaaggattggaggtctgtataggcctattccatgaatcttcagttatttgaaggaaatccgggaatttgagccaatacgactcaaacctgaaggaattgttttgctctctttctacacagccggttatgaaaaggggggcatgatctgagcaagaggtggagagagcagacatttgggcagagtcaaaaaggatatccgattccaggcaacagaaggctcgatcaattttcgtttgcgttgggttagaacactcctgcgaccaagtcaatttctttcctgagaggggcagctcttttattcccaacctgtccagggtcgatttgaaacgctgcatcatacctctgttgagcctgttgttgttcttgtctg

SEQ ID NO: 21096 - DNA, 962 bp, Oryza sativa
ctccacaccatcagcttcactgtagaactcttcctctaatgaatgattgcaaggtgagtatatgacatactcagcaagtcacgcagcaaatatgcaagtgcacaggataacaaaggatggcataatagggtttcatttgcataaacaacatttaataaacatttcagaatttaattaaacagttgagtaataattaaacaatatcaatctaacgctatacaacataccctgttgtataggcccaacctttctgaacaaccatacccggctgtacagatctatctccaaaccaggaatataccattccaaaccaggagctaaacaaattattaccagttatagcatctgttatcatgatgagaggtgtgagactaatcacgaaagacattgttagaccagcccataaccgcgggcacggctattcgaatagttttactctggccagaggtgtaccactgtacccacaagacacagccccacaacatgtcactatgtgcctcaataccaccacggtacctcggaaaggagctgtgacaatacccctcgcacaacacaatccaccacagggcacctttcctggatcataatcacccccttataaacaaggcatggactcccagcgacccccgtgggcttatctccgccacttctcagtctggtgctccgcaatgaaccatgctatacaaaaggtaaagccgttgcccacgctggcttgtggttggcacggttaatgtttcacaaccgaaactcgtgaaccggtccttaattgtcatgagcacgactctcaaaaccatgtgctcacaacccaccattatcaagttttagttggcaagtaattaattaaccaatcacgattgaccatcgtgagctatcattaagccatcattaaataatagtgaatcataagttatcccaatcgctgcactgcacgggtctagcttttttccccacggcatgcaacc

SEQ ID NO: 21097 - DNA, 1867 bp, Oryza sativa
cttcagcttctctcaggatatcagtcccgaacacttggctttccctgacttggtcccacaatagtggtgttcggcatttgcggccatacaacgcttcataaggtgccatttgtatgctggcttggtagctgttattgtaggagaactcggcaatggggagactcttatcccaggtcttccctaaatctagaacacaggcacggagcatatcttctaggatctgatttagacgctcggtctgtccatcggtttgcgggtgatacgcggtgctgaaatttaatcgggtacccaactcttcttggagcttcgtccagaaatgagaggtgaactggcttcccctatcagatacaattttcttaggaacgccatggagactcacgatcctagcgaagtagagttcggctagtttgttcccttcataggtggtcttcacaggaataaatcgagctaccttggttagtcgatccatgactacccatatagaatcatacccgccttgggtttttggaagtccggtgatgaaatccatcctaatttcatcccatttccattctggtacttgtagaggttggagaagtccggccggtcgttggtgctctgccttaacacgctggcacacatcacaaagggccacgaactctgcaatttcccgcttcatactaacccaccagtatttctctttcaagtctaagtacatcttcgtactgccagggtggatggaataaggactttcgtgagcttcctaaagtattagctgtttaagttccttgtcgtccagaacgcatacacgatttccgttccatagggttccatgttcatcttctgtgaaaccagcggctttaccctgtttcatattcttgaggatcccatgcatatctggatcattcttctgagcatcgcggatttgatcgagcaaggtaggcttggcttccagaatagccaagaatccatggctaacgatgcttaggtttagggcttccatctgttgattaagttccggtggaatgccacggacgccaagagtgttgcaacggctttttcgactcagcgcgtctgtgaccacgttggccttaccagggtgatagtggattgccacatcataatgcttgatgagctctaaccatcttctctgccgaagattcagatccgactgagtgaagatgtatttcaaactcttatgatcagtatatatttcatagtgatttccaatgagatagtgccgccagatctttagagcatgaaccacagtggctaactccaaatcatgggtagggtagttgccttcatagggccgtagctggcgtgaggcataggctaccacatgaccttcctgcatgagcacgcaccccaatccttggcgcgaagcgtcacagtacaccaggaagtccttgcgagtgtccggtaagattaacactggcgaggaaaccagcttttctttgagagtttggaatgccttctcgcattgcaggctccacacaaatttttcctccttcttcagcaactgtgtcatgggtcgagctattttggagaagttctcgatgaatcttcggtagtatcctgccaaacccaaaaaattgcggacttgagtgactgtcttgggttgcttccagtcagtgaaggcggtcactatttcggggtccacaacaactcctttagcggatatcatgtgccctaagaatttgacttcggacaaccagaactcacacttgataagcttggcatacaattgatgttcccgcaactttcccaacaccagacagagatgctgctgatggtcttcctctgattgtgagtacaccaggatgtcgtcaataaagaccacaacaaacttatccaaagtattccatgaacactttgttcattaagt

SEQ ID NO: 21098 - DNA, 1882 bp, Oryza sativa
cccttttctttcaactcttccaactgtttcttgacttcggccagttcatttgttgccatacggtagggtcgcttgtacagaggagtggttcctggagcaagatctatccggaactcaatctctcgcttgggcggcataccgggtagttcttccggaaacacatctccgaactctctaacgatgggggtttccgacagtcctatctgatgaagttctgagctgccgacagaggttgagggtgcaaagaaaacaaccggttgttccggtcctcggtacagagtgacagtgcgtcttacgcaatccactactccttggaattgagccaaccaattcatcccgaggatcacatccaagttcttggtgtctagaagaatcagatccgagggaaaaggaattccctggatttctataggaacggcagggctataatactttgctgtcataacccctccaggggtggtgatgagcagagggttcctaagcctttctacccccaactgatttctccccacgaatggcacagatataaacgagtgggaagctccagagtcgaacaaaatggtagcaggaatagaatgaatgaggaacgtactcacgatgacgtccggagtcgtcagcacatcctcggcagtcacgtggttcacacgacccggaatgacatccttaccaccgttgttggggcggggaggcgcttggccttgctggcgcctcggctttgggcatttatccgcaaagtgcccgggctcaaagcaattgaagcacagacgttgttgtccttgagcatccctgcggccttgtccaggctgcacggctggtgcaggaggacggggcgcacgagtcccttgctgactctgctgttgctgcggctgtgagacgcgcaccacgaattgaggtcggggcgcggagcgaggttgctgctgctgctgctgcgaggaggatccccctgggtagggattagtgtagcggaccctttggttagccccctgttgattgcggaaattcgccaagcgacgcttgtgcgactccagttccttgtgcttggcttccaagcggatgctcttgtccaccaaacgctggaaatccggataatccccggagaccagacgcacggacagctcagggtccattcctgccaagaacttctcctgcttctcctcatcttcatgaacatcttctggggcgtaccgggccaggttgttaaactcatgcaaatactccatcacagagcggttgccttgcttcaactctcggaatttccttttcttaagggccatgactccggcgggcacatgggtcctccggaaagctgcggtgaagcgggcccaggtaataggctgcccctctagctgtgtagcctggaagtggtcccaccatagagatgcgggcccctgcagttgatgggcggcgaagatgactttctcctcatcgttgcactgcacggtatccaactttttccccacggcatgcaaccaatccaaggcatccacggggttattggagctagagaaggtaggcggacggatgcggaggaactcggcaagtttagaatgttgcgggggtggtggtggaggtggagcattatgctgtggcggaatttggatgtgatggataaaagcagccatcatgttggcctgctgggcgaggatttgggtgaggatggagttggtgtctggtggtggtggtggaggcgggggaggaggtggaggtgggctgtcatggttgttgtggttgctgccttcggggtgactgccttcaccggtagcagcacttctcctggttgtcaccatctgaaaatcccacacagaaccggcaaacagagagagctggttattaaaactaaccactcatgactaccataattcttgaatttattactgctatt

SEQ ID NO: 21099 - DNA, 3426 bp, Oryza sativa
ctggatcataatcaccccctaatagacaaggcatggactcccagcgacccccgtgggcttatctccgccacttctcagtctggtgctccgcaatgaaccatgctatacaaaaggtaaagccgttgcccacgctggcttgtggttggcacggttaatgtttcacaaccgaaactcgtgaaccggtccttaattgtcatgagcacgactctcaaaaccatgtgctcacaacccaccattatcaagttttagttggcaagtaattaattaaccaatcacgattgaccatcgtgagctatcattaagccatcattaaataatagtgaatcataagttatcccaatcgctgcactgcacggtgtctagctttttccccacggcatgcaaccaatccaacgcatccacggggttgttggagctagagaaggtaggtggacggatgcggaggaactcggcgagtttagagtgttgtgggggtggtggtggagcattctgttgtggcggattttggaggtggtggaggaaagcagtcatcatgtaggcctgctgggcgaggatttgggtgagaatggcgttggtgtctggtggtggtggtggaggcggaggaggaggtggaggtgggctgccatggttgttgtggttgctgccctcaggttggttgccatcaccggtattagcacttctcctggtcgtcaccatctaaaaaccccacacagaaccagcaaacagagagagctgacaattaaagctaaccatccacgactaccataattcttgaatttattactgctattaaattggttaattaaagttcaaattgcttaagcaaataaaataaagacaggctccgacacagttatgccacacaccggcataaccatgccccacacgactccaacaagaagacaaacgagaaagaacacacgcgcaagcctactaactgctcgtctaccgctgcgacgggccaggacggaaggtgagcaacagcgcatcctccgtgctaccaacgccggaggcttccccctcctgaggaaccacgggcgcgggctcggcacgaggggtctgaacgaagcaagtccacgccagggactgacgaacaagctcgggcctggaggtgctcttgcgggcggtgatcttctggctgcggcagacgcggcgacgcttggggcgacagacctctccctgggcgatcttgagctgatgcagctgcgcctccactgcgtctaggtccttcttcagctgcagattctcctgacgcggctccaggatcttcatgttgttctcgaccatcccacggcgcaccatctgatggaagtcgatacaagtcgcgtcgtacgcctccaccatgcgcgccaggtgcatgatggtagcgtcatcctccgagctagcatcccggaaggtggcgaagtcgcgggctcctccgtggcgagggtggtagcggtagggcgagtgctgcaactcgtccgggtagcgctggtgaagagtgccgatggcgaggagagcggcgttctggcaagcggcggagaaagaatctccacccgcggtgactgccaacgaagtcctctcgggtgagctagtgaggatcactgcagtaacctcccaagcagcgtggggctctgcatcgtcaccctcctgctccgggagcggcctgccctggtagtccactctatgcggataccccaggacaactcacatgccccacagctccaagacgaaaccagtcaggtccagaccacgacggctgatgctgccggccatctacaaacaaaaacaaaaagaaaagcaacatttaaaagtcagattttggcgataaatgaagcagcaggacagagagagactagagggttttcacaattaagacaggatttttatttttgaaaatattgctaaggcttgggatctaaggctcgtcctagggtcaagggggctctgataccaacttgtcacgaccggaaataacccaacgggcgttccttacgtgcgtgtattattccttgtcccaggaggcaaggtacaccaaaagttgatacaattcagagtttaacaagcggaagcgtaaatagataatttattacatgggcagcgaaggcccggcacacacaaagacaaacgagaaacagcggaagactagggcgacgaccacaggcgcttgacggcaggcacgagctagacaccaaagccttcatcttccagggactcctcttctgggtttgggaaaaattgagcaagactgagtacaaccaccgtactcaacaagacacacccacaagtgcagaataaatgcaagggagtacaagggagttataatataaagggttagggtttgcagtaaacagcgttaaaagacacttagttgctcaaagctattttgtaatcacgattctagaattatacaatattatttatcaaggccgtgaacccacacgaacctgccttaacccaaggcctacgatgattcagaccgaaccggcaacccgaccctgggtcccagctcgtcccaagccaacccaggccaaccattcctccttttagttgttaagcaggttttaagaattaaaacactaacttgggtacattgctcggcttgcccataaccgagggcgcggctgttcgaatagattttactctgatcagaggtgtacatctttacccacaagacacaatcttcctcacgtgcaaccacgtgccacataccaccacggtatacagacggaagacgtgacatagtttccaacccatcctagccatagccaagagtaccgacccaatcccacctacggccggaacccccgggacaggcaggcaggactgagcccctagcagcaggacaccggccctgtgccatgacatctcgactaccaggccgcagctcgtgtagccttcatttgccctggagatgtccatcgacccccgacttcgtccatctccatccgtgtacttttgtttataaccagactgagccacaaactaagccttacccactagacatgtggaagtacggtagtgctttgcaacagaggcccgaagaccggtccttatatggccgaggtgctactatcaaaaccatgcaccccgagcccagcctaaaaccattttggggattttgaatagagggggcggtgtgaatccaatttcacaataatccaacaattccaaagtgtccaggtgatatgaatatcccaaagtctagagttgtaaaaccacctaatgttaactaattaaatagcgaagcatctacctaaaatcatactagtggtaccatgagtagagtgtccactagtggggttttgtttattctagggtgaacaaggaaataataacaataacaataataaggtcataacaaaggtaaataggcatggctagataaaacagtgataacgcgggaatttaaataaagcgataatgcaataatttaaagcaacataa

SEQ ID NO: 21100 - DNA, 10132 bp, Oryza sativa
accgctgcttcgcttccctcttctctcctctctctcggccgccgctccgccgtgcctatggccgccgccggcgaccataggggcgcgggcgcgccgcctcccgtcggccgtgccggcaaggccgccttcgggcgcgccccgcggttgccaggtggggcccggccgtcagccgcccgcgcccgcgggtgcggctgacgcgtgggacccacggcgccggccggcgtcagccgcgtgcgcccggtccaccgtgtaccgtgaggctgacgcgtggcccccactcccgtggacccggtccgcgtgccctctccctcggctgacgcaataaatccgatttttaattaaaatttaaatgaagaaattcgcaaatatccatttaaagagcatataaacttcaaatggccataacttggccatttgaactcggaattggaccgttcaagtctctaatttttccttaagaagtcaagaacccatttttgtgctttgtttctgctgttatatggagtttattagagtaaaagccttttcttttccattggtcgtgtagacgctgcagcttcggaagatccgctcttcgtggaagttgaagccgacgtttgggaaagcgagcaaggcaagtcacatcatctttgagcatattgaatcccagtttataaaattatgttgatttaaattattgcattatcgctttatttaaattcccgcgttatcactgttttatttagccatgcctatttacctttgttatgaccttattattattgttattgttattattattaccttgtgcaccctagaataaacaaaacctcaactagtggacactctactcatggcaccactagtttaattttaggtagatgcttcgcaatttaattaggtaacattaggtggtttttcaactatagactttgggaaatattcatatcacctggatactatggaatggtttggttattgtggaattggcttcacaccgctccttctattcaaaatccccaaaatggttttaggctgggcgcggggtgcatggttttgatagtagcacctcggccatataaggaccggtcttcgggcctctgttgcaaagcactaccgtacttccacatgtctagtgggtaaggcttagtttgtggctcagtctggttataaacaaaagtacacggatggaggtggatgaagtcgggggtcgatggacattctccagggcaaatgaaggctacacgagctgcggcccggtagtcgagatgtcatggcacagggccggtgtcctgctgctaggggctcagtcctgcctgcctgtcccgggggttccggccgtaggcgggattgggtcggtactcttgtctatggctaggatgggttggaaactatgtcacgtcttccgtctgtataccgtggtggtatgtggcacgtggttgcacgtgaggaagatgtgtcttgtgggtaaagatgtacacctctgatcagagtataatctattcgaatagccgcgccctcggttatgggcaagccgagcaatgtacccaagttagtgtttcaattcttaaaacctgcttaacaactaaaaggtggaatggttggcctgggttggcttgggacgagctgggacccagggtcgggttgccagttcggtcttaatcatcataggccttgggttaaggcaggttcgtgtgggttcacggccttgataaataatattgtatagttctaggatcgcgtttacaaaatagctttgagcaactaaatgtctttaaatgctgtttactgcaaccctaaccctttatggtataattcccttgtactcccttgcatttattctgcatttgtgggtgtgtcttgttgagtacggtggttgtactcagtcttgctcaatttttcccaagcccagaagaggagctccttgaagatgaaggctttggtgtctagctcgtgcctgccgtcaagcgcctgtggtcgtcgccctagtcttccgctgtttatcgtttgtctctgtgtgtgctgggccttcgctgcccatgtaataagttaactatttacgcttccgcttgttaaactctgaattgtatcaacttttggtgtaccttgcctcctgggacaaggattaatgcacgcacgtcaggaacgcccgttgggttatttccggtcgttacaagttggtatcagagccacccttgaccctaggacgagccgtagatcccaagccttagcaatattttcaaaaataaaaatcttttgttatttgtgaaaactgtctagtctctctctgtcttgctgcttcatttatcgccaaaatctgacctttaaaatgttgtttttctttttgtttttgtttgtagatggccggcagcgtcacccgtcgtggtttggacatgactggcttcgtcttggagctgcggggcatatgcgtggtcttggggtacccacatggagtggactaccaggccaggccgcttccggagcaggagggtgacgacgcggagccccacgctggttgggaggtcactgcagtgatcctctctggctatcccgagcggacttcgctggcagtcaccgcgggtggggattccttccccgccgcttgccagaacgacgctctcctcgccatcgtcactcttcaccagcgctacccggacgagttgcagcactcgccctaccgctaccaccctcgtcgcggaggagcccgcgactacgccaccttccgagatgctagctcggaggatgacgctaccatcgtgcacctggcgcgcatggtggaggcgtacgacgcggctcgtatcgacttccatcagatggtgcatcgcgggatggtcgagaacaacatgaagatcctggagctgcgtcaggagaacctgcagctcaagaaggacctagacgtggtggaggcgcagctgcatcagctcaagatcgcccagggagaggtctgccgccccaagcgtcgccgcgtctgccgcagccagaagatcaccgcccgcaagagcacctccaggcccgagcttgttcgtcagtccctggcgtggacttgcttcgtcgagacccctcgtgccgagcccgcgcccgtggttccccagaagggggaagcctccggcgttggtagcacggaggatgcgctgttgctcaccttccgtcctggcccgtcgcagcggtagacgagcagttagtaggcttgcgcgtgtgttctttctcgtttgtcttcttgttgagtcgtgtggggcatggttatgccggtgtgtggtataactgtgtcggagcctgtcttattttatttgcctaagcaacttgaactttaatgaacccatttaatagcagtaataaattcaagaattatagtagtcgtgggtggttagttttaattgttagctctttctctgcttgctggttctgtgtggggggttttcagatggtgacgaccaggagaaatgctgctaccggtgatggcaaccaacctgaaggcagcaaccacaaccaccagggcaacccacctccacctcctcctccacctccaccaccaccaccagataccaatgccattctcacccaaatcctcgcccagcaggccaacatgatgactgctttcctccaccacctccaaaatccaccacaacataatgctccaccaccacccccacaacactctaaactcgccgagttcctccgcatccgtccacccaccttctctagctccaacaaccccgtggatgcgttggattggttgcatgccgtggggaaaaagctagacacggtgcagtgcagcgatgaggagaaagtcatcttcgccgcccaccagctgcaggggcccgcatctctatggtgggaccatttccaggctacgcagccagaggggcaacctattacttgggcccgcttcaccgccgctttccggagaacccatgtgcccgccggagtcatggcccttaagaaaagggaattccgagagttgaagcaaggcaaccgcttcgtgatggagtatttgcatgagttcaacaatctggcccgttacgccccggaggatgtgcgggaagatgaggagaagcaagagaagttcttggcaggaatggaccccgagctgtccgtccgtctagtctctggggactatccggatttccaacgtctggtggacaagagcatccgcttggaagccaagcacaaggaactggagtcgcacaagcgccgcttggcgaatttccgcaatcaacagggtgctaaccaaagggtccgctacaccaatccctatcccgggggatcctcttcgcagcagcaacaacagcagcagcaaccccgctctgcgccccgacctcaattcgtggtgcgcgtcccacagccgcagcagcagcagaatcagcaagggactcgtgcgccccgtcctcctacgccaacggtgcagcctggtcaaggccgcagggacgctcaaggtcagcagcgtctgtgcttcaactgcttcgagcccgggcactttgtggataaatgcccgaagccaaggcgccagcaaggccaagcgcctccccgctccaacaacggtgggaaggatgtcattcggggtcgtgtgaatcacgtgacggccaaggacgtgctgacaactccagacgtcatcgttggtacgttcctcgttcattccatccctgctaccattttgttcgactctggagcttcccactcgtttatatctgtgccattcgtggggagaaatcagttgggggtagaaaggcttaggaaccctctgctcatcaccacccctggaggggttatgacagcaaagtattatagccctgccgtccctatagaaattcaggggattccttttccctcggatctgattctgctagacaccaagaatttggatgtgattcttgggatgaattggttggctcaattccaaggagtagtggattgcgcgagacgcaccgtcactctgtaccgagggccggaacaaccggttgttttctttgcacccccaacctctgtcagtagttcagaactgcattagataggactgtcagaaatccccatcgtcagggagttcggagatgtgtttccggaagaactacccggtatgccgcccaagcgagagattgagttccggatagatcttgctccaggaaccactcctctgcacaagcgaccctaccgtatggcagcaaatgaactggccgaagtaaagaaacagttggaagagttgaaagaaaaggggtacatacgtccgagtacttccccctggggtgctcctgtgatttttgtggagaagaaagacaagacgaagaggatgtgcgttgactacagagctctcaatgaagtcaccatcaaaaacaagtaccctcttccccggatcgatgatctgttcgatcagcttaaaggtgccactgtattctccaagattgatcttcgttccggatatcaccaattacgtattcgcgaagaagatattccgaagaccgcattcaccacgcgatacgggctgtatgaattcacggtgatgtcattcggtctaaccaatgcacctgccttcttcatgaacttaatgaacaaagtgttcatggaatacttggataagtttgttgtggttttcattgatgacattctgatatactcacaatcagaggaagaccatcagcaccatctccgtctggtgttgggaaagttgcgggaacatcaattgtatgccaagcttagcaagtgtgagttctggttgtccgaagttaaattcttaggacacgtgatatctgctaaaggagttgctgtggaccccgaaacagtgaccgccgtcaccgattggaagcaacccaagacagttactcaagtccgcagtttcttaggtttggcaggatactaccggagattcatcgagaacttctccaaaatcgctcgacccatgacacagttgttgaagaaagaagagaaatttgtgtggagcccgcaaggcgagaaggcgtttcaaactctcaaggaaaagctggtttcctcgccggtgttaatcttgctggatactcgcaaggatttcatagtgtattgtgacgcttcgcgccaaggattagggtgcgtgctcatgcaggacggtcacgtggtagcctatgcctcacgtcagctatggcctcatgaaggcaactaccctacccatgacttggagttagccgcggtggttcatgctctaaaaatctggcggcactatctcattgggaatcgctgtgaaatatataccgatcataagagtttgaaatacatcttcacccagtcggatctgaatcttcggcaaaggagatggttagaactcatcaaggattatgatgtgggaattcactatcatcctggtaaggccaacgtggttgccgacgctctaagtcgaaagagccattgcaacactcttaacgtccgtggcattccacccgaacttaatcaacagatggaagccctgaacctaagcatagttggtcgtggattcttagctgcgttagaagccaagcctaccttgctcgatcaaatccgcgaggctcagaagaatgatccggacatgcatggactcctcaagaatatgaaacagggtaaagccgctggtttcacagaggatgaacacggaaccctatgaaacggaaagcgggtatgcgttccagataacagagaacttaaacagctgatacttcaggaagctcatgaaagtccttattccatccaccctggcagtacgaagatgtacttagacttgaaggagaaatactggtgggttagcatgaagcgggaaattgcagagtttgtggccctatgtgatgtgtgccagcgtgtcaaggcagagcaccaacgaccggccggacttctccaacctctccaagtaccagaatggaaatgggatgaaattgggatggatttcatcaccggacttccaaaaacccaaggtggatatgattctatatgggtagttgtggatcgattaaccaaggtagctcgatttattcctgtgaagaccacctatggagggaacaagctagccgagctctacttcgctaggatcgtgagtctccatggcgttcccaagaaaatcgtatctgataggggaagccaattcacctctcacttttggaagaagctccaagaagagctgggtacccgattaaatttcagcaccgcctatcacccgcagacagatggacagaccgagcgtctaaatcagatcctagaagatatgctccgcgcatgtgtcctagattttgggaagacctgggataagagtctcccctatgccgagttctcctacaataacagttaacaagccagcatacaaatggcaccttatgaagcgttgtacgggcgcaaatgccggacaccgctcttgtgggaccaagttggagaaagccaagtgttcgggactgatatcctgagagaagctgaagctaaagtcagaatcattcgggataatctaaaggtggcacagtcccggcagaaaagttatgcagataaccgtcgccgtgacctggaattcgcagtgggtgattttgtataccttcgggtcacgccattgcgaggtgtgcacaggtttcagacaaaagggaagctcgcacctcggtatgtgggtcctttccgtatcaatgctcggcgcggagaagtcgcttaccagctggagctgcccgcctccttgggcaacatgcatgatgtgtttcatgtgtcgcaacacaagaaatgccttcgagtgccatccgagcaggccgactcagagcaaattgaagttcgcgaagatttgacctacgtggagaggccagtgaaaatcctggacaccatggagcgcaggaccaggaaccgggtaattcgtttttgcaaggtccagtggagcaaccacgccgaagaagaagctacttgggagcgtgaagacgagctgaaggcagcccatcccgatctcttcgccagttcttccgaatctcggggtcgagattccgtttaaggggggtaggtttgtcgcgtcccaaaacgactctaaaatacatcctcgaaattgtgcaaagaataattaaaattcatgtgaaagcctccaacaattaaaatgtgcaaatataaaagtcaaataaggcttggaggatttttgtatatttcctaaaagcctaaaatgcgtaaataaattttagtggaattttcagagcacaaataataattgagaagaaataaacaaagttaaaaaggtttataaaaagaaaaaccctaaaagaagtcttctttcccccccttcccttcttgggccggctcggcccaacttcctccctccctctcctctcccccgcggcccatcggccttcccccgcgcgcgcgccgctgatgggcgggcccgcccgccaccctcgctgacgggtggggcccacctgtcatcccctacctcgcgccgcgcccgccgcccgcccgtgccctagcgccgccgccgccgccgaatccgccgcatcccgccgtccccgcgcgccataaagagggggaaatcactccccgtgattccctccctcttttcccccgcttttccctctctctctacctcggattcgtccggatttgctcccgcgatcctcgccggcgcatcaatggcggccgagatttccgcggccgattccttcccctccggccgctctctccccctcccgacgctatataatcgctccccgtgcctctctcctccgtttccgccactcgccgcactctctccccgtcggattcgagctcgcgccgttgtcctccctctccgccgtcgccgccgagctccggttcgccgccgtcgtcgccccggacctcctcccgcttcggcatcgcctccttcggcttcgccgcgttctcgtcgacctcgtccgctcctccgtttcgcccgccgaccgccggagcatcgccgtcctcgtcgacccgagccgcgccgccgcctctctccgcttcggtcgccgttcccgtcgtcgccgtcgacccggggtgagccgaggaccgccgcttcgcttccctcttctctccttctctctcggccgccgctccgccgtacctatggccgccgccggcgaccataggggcacgggcgcgccgcctcccgtcggctgtgccggcgtggccgccttcgggcgcgccccgcggctgccgtgtggggcccggctgtcagccgcccacgcccttaggtgcggctgacgcgtgggacccacggtgccggccggtgcgagcccgggtgcgcccggtccaccgtgggccgtggggctgccgcgtgggccccacccccgtggatccggcccgcgtgccccttccctcggctgacgcaataaatacattttaaattaaaaatttaaatgaagaaattcgcaaatattcatttaaagagcatataaacttcaaatggccataacttggccatttgaactcagaattggaccgttcaagtctctaatttttccttaagaagtcaagaacccatttttgtgctttgttcctgcttgttatatggagtttattagagtaaaagccttttttttctttccgttggtcgtctagacgctgcagctttggaagatccgctcttcgtggaggttgaagccgacgtttgggaaagcgagcaaggcaagtcacatcatccttgaacatattgaatcccattttataaaattattttgatttaaattattgcattatcgctttatttaaattcccgcgttatcactgttttattcagccatgcctatttacctttgttatgaccttattattattgctattgttattattattaccttgttcaccctagaataaacaaaactccaactagtgggcactccactcatggtaccactagtatgaatttaggtagatgcttcgctggttaattaggcaacattaggtggttttacaactttagactttgggaatattcatatcacctggacactatggaatggttggattattgtggaattggattcacacctccccctctattcaaaaccctcaaaatggttttaggctgggctcggggtgcatggttttgatggtagcacctcggccatataaggaccggtcttcgggcctctgttgcaaagcactaccgtacttccacatgtctagtgggtaaggcttagtttgtggctcagtctggttataaacaaagtacacggatggagatggacgaagtcgggggttgatggac

SEQ ID NO: 21101 - DNA, 1232 bp, Oryza sativa
ttggcaccggaacagaggaaccttgagaggaccatagtcaagttcccatatgtcctcgatggcaccgtaatacgtggcagttgttccatcgtgtcctatggcatcgacacgaacagcgctgttttggttcgtgctcttcatgtcttgggctctcgtgtagaatgtgtacccattgatctcatatctctggaatgtcgcgatcgacccagacggtccccttgccaggaaggcaagtagttggttgatcgactcgttacccatgagatgttgtcgtagccacgtggggaaagtatcaatgtgatgccgtgtaatccatgcatcggacttaccgatgttcctggcgcgaactagagccaagtgctcctcgatgtaaagagctaccaatgaagagtgttgcagaacagtgaaatgggctttacggaataaattgttgtctaccgtcattattgctttccttccgagagttccctttccccgtagtctcccttcatggcgtgattcaggtaccccgattgggcgaaggtcttcgataaattctatgcaaaattcgatgacctctctgttccataaccttggcgatgcttgcctttggacgagcacggttacgaacatacttcttcagaatgcccatgtacctctcgaaaggaaacatgttgtgtaggtacataggcccgagaatacggatctctttcacaaggtgacaaagcagatgcgtcattatattgaaaaatgaaggtggaaatatcaactcaaaactgacgagacattgcaccacttcattctgaagggcttctaatctatccggatcgatgaccttctacgaaattgcgttcatgaatgcacatagctttgttgttgttgcccggacattgtctggaaggataccccttattacaactggtagcagttgtgtcatcaacacgtgacagtcatgagactttaggtttgtgaacttcttctccttcgtgcttattattggcttgatatttgtggagtatccagacggtacctttatgctctccaagcattcaaacatactttccttatctgccttgctaagagtgtagctggctggactcaagtaatggcttcctttctcctttggttccgggtgaaggtcgccgcattgttccatatgcttcagatcattacgtgcttccagtgtatctttcgactttccgtatacacctaggaagccaagaaggtttacgcaaaggttcttagtgaggtgc

SEQ ID NO: 21102 - DNA, 3861 bp, Oryza sativa
tttttacctggtagtatcaacgatcaaagaacagtacgtatataccactaagcagtgcatgctgtttaaacaaacgagcagtgtgtaatcatactgattacaataacgagtggtatgtaagatataatcgattaagaagtacagaaggttaagttataatcaactaagaagacggtaacagtacatagatacaactgagattaagaaaaagaaatcatagctacagaggaaaaactgcatcactgcatcgccatcgtcgtcagactataatcttaagctaagctaattgttacatctctaccagaaaccaaatcacaatgggagatgtgcgtacatgttcgtatctgcggtcttccaccgttgccgcgtgattcattagctgggaataactctacaaactggcatcatcgtgcatggtcgatctgtggcagccgccggccgaatcgttcgattcgtttgcctcgaccagccgtactgattttagttggaggagagttcgcgtttcttgctgcggtagtggaactgtggaagccgccgccgaccctgatactgttgccatgggaatcctgcgaaaggggagtaatggatgtaaacaaccatcaatgataattcaagcattgaaaggacgtaaatctagtcgatcggcaccatcgacggggagcacaacccaactacctgatgtcgttgctaatcccatccgtctgaggactgtatgaggaagcgggtggtcgaactggttgatggagcgcgccgtccacccgtccgtggctgccgtggcaagattgctccagttcttccaccgccggcggacttcgcgacctccaaccaagctaccgtcaaggaaccgtcgccgcctccgcctcgcgtcaaaccgcaaatgtcgcgagagctgttcgatctgttgagtactaaccggtgcgatttatataattaagcgctaattaaggatcatggattattattttacaaaaggaaaatcaaaacgggtccgttcggtgatccgctaaggagcttcatcgagatggctgtgatggacggtagatggaaccgggtgtacgtactcccgggagtacataatcattttcatatatatatatatatatatatatatatatatatatgacatatattaataatatgtatttatacatatatctatgcatatgtacatgtacaaaatagacatatatgtatatacttaacattttatgtgcatatataatatatttacactaaagtaaatgtgtacatatataaatatagatatgtattacaattcattatgtcctagctacgacttcgacgtagtcgttatctcagaagttaacgacttatgaattgtagatccgtcgtagtagaattcaccctcgggatcaaggacttgttcattgatgaatcccatgagttggttcttgaacagccgtgataaagtcctcgtgtgtgaggttgtccctcatgtgaataacctatgaatgtatgaagttaattagtaaacaagaaatcgatacatacgcaatgaaattttgaatggtttatttatacgtacatcgagttctcttgtggtgatgatttgggttgtaacgcagtggcaatactcgcatatgtagtagccgcacaagttagttccctcttcctgttttgcacactatatacatgacaaacgacgagagattttatatttgaattagagattcgatataaattttgatcatgtactcactacaaatttgaacctccggcgaagtttttctttccaagtgccacggaccaaatgacggaaccgataccaagccctacatgaagtttaaaactatatatgattcgtactagcaatagcaaaattcgtaataattaataacactggaacatatgacattacctgtttataagttcaaaaatctggtcaaaagtagactcatctttattcattgagtcatagacattgactctacattccttcaagtcgaagagtaaaaggacccagtggaatatgcaatttgtgtgagatgatatatgaaacactgtgcatctatatgtacgggaacgaaatttgttcggtagatagtaaaaactaactctgtgttgtacggcagtagtatgaacgtcttgaaatgctgctccttgaggagatggacgagattgacctctgtgggttgcggatacttggtgaccatttcgacgtttactttccgagggtcgatgaatccagtattgaaaaacccccgctgtcgagccctttgaatctccattctacaacgatgaaggaattgttatatatggtgtacatatatacaaggagctaattaaaggaacgtaagaaatataactcaatgatatgtacaaaatccatgcgctcagaatagagacgtccatgcgcacagaatagaggacgtcgagggcatctagttggtatagttcgtagatatccttgaaattgatccagagaacatcttctccttgtaagaagtcggagttcttgattctcgctccaataatctccctaccgctggcgctcatctccatgtaccattcatggaattggtacatctgtgtgggtagggactgcagctgctcaggcttgacaagcggtttaccaagttcgtcaaggtgtctcacttccgcctttggaggtgcacctctaagtaactgagccctagttagcccgatatcagaaatgaattcttttattccaatttcttgcccagtcaccaatggctcgacctcctggtttggttgctctccaagctgagggacttttttggactttctataatatgctttcctaagtgttcgctcatagtccgttagctttaaggcctgcttgagtggtcccgacatcttctggaagaacttgttggcactcgggtctataggaatctgcttttctggacttcgaggcttcaattatctcttcacttctacagccacataagcgtcaagctcctcttgcgtgcaatcgtacggcggctccttgttctcggcggcgtcaactttcgccttcttcattgcccttgtgccggcaggcagtggagcttggtgagttcttgacttagaaggtgccggaggacacggcgcaggagcctgatcaggaggagacggtgcaggagcctgaggaggagacggtggagccggaggggatggtgcacgagacgccgcttgtcgcccagggaggatgaggtagcgcttgcgccatagtataatggcgtggcttgtgtcacgtagatgcgtctcaccgtctcctccagggtagtccaattcgaggtcctcgtacgtggcttccaccagctcaacttcgactctcgagtatcctgcaggaatcggcctacagtggtaagtccctgaagggtccgttgggatggccattcccgacacaaccttcacgtgatgagaggttatctattagtaatcaacctaagcagaaacttgcggaatgtacaagtccaaaaaacataaactacgggcataccttgattgataagttcttgaagggaatatgcagctcacgtggtgtctactgcgtgatttcatcaacggggcaggtggttacgtcctgagtttgcatagcatccatgctctgtgatcctacctgccccgttgggtcatggatcaattcaagttccttcttataaacttgtttatggacacgaagcggttttgccatgggaaactaaaatcggctccagacgattagatttacaagacagtttagcagccgatgagtattacaatctcatggtagatgaaacagaagatttggtccaatccagattgagagcccttgccaaggtgagtaaggataaggaacgggttgctcggcattataacaaaaaagtggtgcctaagtctttttctgaaggagag

SEQ ID NO: 21103 - DNA, 732 bp, Oryza sativa
gagccagcctggtttcccccatctagctcttggtctagttgagaaagttctcatcaagtagggtgccatggcaatagaagacaaattggacttgctgttgaggcggatagaggagtacgagctgaggcgagaggaggctgatcggagaactagagctgatatacggtctctcatagatgtggttgaagcatgcacaccggaagttgggaagaaggcaaaagacttgccagcgtcaattaagaaagagcagtcaaaggtgacgcccaccacatgtttgacgaaatgctctagtcccgacatcgagcccaaactcacactggttgcgatggtcaaatgtgccgccactgccatggcctccatgaagttggtagctgataatggtgcaaccagcaccaccaaaattcccaccactgactattccaaggagacgcacgccaagtgttcgatgttgggcttcgatgtcaagtgggacgccaacaaagccgacatcgcgttcctgaccaagacggttgtacttgagaccgttccagcatccattgcatcattgagcgccttctcaccaaggatgatcgccgacatcaagcattacacattgatgcccaccaggtattcagcgaaatgttctgggtctaacaactctcaagttgtgtcttatttgtccttcttaagcaccccagtgttagtggaatcagttgaaggacatttgttagttccatggcaactgctgttgca

SEQ ID NO: 21104 - DNA, 11176 bp, Oryza sativa
ccggtgatatgcaattgcatgagaagacccaaaagtccaatttaacaatcacaaatgggcttagaatgtatgtcactgatttaggggcccacatggaagtctcctggaggaagctgggggccaaaagagcccatatggggtcggccgaccccttgtttagcccaatccagccgcattttggccaggagataatggaggccgaggaggaagcagcaggccagaaaccaggcctgttgggccagtctagggttcggccgaaccctgatcttagccgttggctctcccctttggcgtggacgctccggattaactcctgatggcggttgcagggcatttctgacaattcccatgctctacaaccgtcattgggagctataaaaggacctcacctccttcactttcaacacaagctcaagtaaggattgaagctccatttctccaaagttagaattagtatagtactagtggaatagaattatagtagttccgagttgcggaagctttaggaagttcggtaaagttcttagcttttcctttcttcttttataagacttcctttttattaatataatatttcttctttatacaagttcggtactttattccaatcatagaatatgagtaccattcttagtttatttataatcagtataatcttagtagttaaaccttctgggatttgcattgatgctggtataatgtctgattaccaggtcataagtctgctctggctaggctgagaactatgccccggggactcagatgctctacaccgattgcaaggctgtagagtaataagtagtaacttaagcatggggtttaggttatcacttatcattattttggggtatattcgccgggagagtagcaggccgctgatggtgacagcttagtacgtgcgtcttccccacagtttatatttctacgtacaatttcctggggttggatacacctttgtatcctactttggtttgagggttatgataggttgtcgtaagaaactcgtcaacctagggtaactttgcgatgcatcatatcgggagggcatagctgagttctggcttagctatgctgcattgttaaagggaatatactacatagagtatactagctagaatagactaggatgttgtatactagaagtacatgagtgagacatttctattctatttccacttattcatatttaggataaggaggagttagcggaatccttagctgtgtgtcactctacccttaagcttaacttacccctgcatagaccttaatgtatacaggtaatacataaactattagcatagtactcttttatcatatatttccttgggataaaataaatacgatatcttggaatactcctgggtgaaatgatacaatggtatatccgtgcgtttgcggatcatatttgtaaccataatatatcaggattatttctagtgctattgctgggaattatatttccagtagtgttactaagaaataccaacatggcgctcatgtccaccgcgtcatgcgcgattgcgaacgtgtggcaggtgacggcggcaacagttggcatcgggagagcgacgaggtcggcaacgaggtcccgaggggcaccgcctatagaggcgtgcagctcgactggcgcatgcgcgcacaggcaggccaaagccgttggagaagcacttctccatggtggcaatcgctggtgcactggcacccaaagtggcgcagacatgagggccaggccaaggcatgagtgctcgccagcaccagttagggtgatgacgtggacatacggggctgcacttctccacagtgcacaagctcgccatgtccatttgcattacttggtaggctgcagaatcattttttttctattacattgcatatatggtcattctctttggaaatatcataattggaaattttaaaagatctatacatatatagaagtgagtgttctaaagaaacattctctgttatacattgttaggaacccactacttccaactcaacaacaagcatccaccatagaagcaacaactgttttggggacaagagaagaagctatggaatacaagtgctggaaacttctagaaccgaggggggagggaaggctggagatcggaggagaggtaggggagagagatcgacgagggtgcccaccggccacccaagtcgccgccgccgccaggagcttcagctctgccaagtccaaacgatctttcgatgccccctggtgttgtcgatgctgctgcttatatgctgctcccttccgtttgcttgggcctcatggcgatgggctgaccagcctgtgtgcggcccacccgggatcctgacaatcccctcttcttgaaatttggcttgtccacaagccgatggaaaacacctctcgaatcccatggttgctccaaatatttggtgttagacaatgaaccatcattgaagaagaatagagcaagtagctttagcttgaataactgcttactccatgtaaagtacacctgggtgatgcatgacaatggcactgttacgaatcgcttgccaacattgattcccaacaatttgatatgctgcaaagagtgacaacctcgcttgatcaacaccactgtaggaactaacccaaaagtatacttctcatcatgaattgaattaatgcaacttcttccatttctttcacccttttgcagcctttttcatcagcaatcacatatagcaaatatctttcaacattcaaaccaatgtaatttgattccaaacatgatcagattctgatatcaccatgcaaattattctcatattccatttctccactctagtttggtagtagttgagcaacatcccctgaagatcaacagatgataaccaaacagataatgatttaggatcacaaaataactagattgctttccttgctagcaagtgatgtcaaactgacctggaaagttagatcccaaaacttctgcattttttgctcaaagcaagtgcaagtttcagtaatcatcattttcttttgctcattccatggaattatacttgcagcagaatcagtagtgcaacatttcccttctctaacttccagcaaacaaactaatggcagccaaggtggcatgacaaatagtctgagcttgtcaacatgttttcctttgaaggaaaagttcacagaaccaaattgcccagtactgctcagctccacaaccatcactcttgcaagaagtaagtgactccaacttaagtagcagttgccctttctttccatttcaacaaaagatagccccaaaagtaaatattcaggttcaccagcagcatagataccttccttgctagtggctgctataaggttgatcaaaaaggacaactcacttttcactccaacattgaatttcagcttattgctccacaaaatttacctccaatgaaaataatgttgtgggaaccaatcatccatccatattgatattttgcaaaggtggacctttccatcacctggatcccacactagtggcccaaacatgacatgtataatgttcagcgagtttaccaatgaaaattgcttgcccacaaagagttgaaaccatttcgcttcggttggagggggccaaggtggcagtatatgtactttacaacagctgcagttgaatgccagccatgacattaactgtgactccaatatgatcaactcttgatcccttgatgttatgggtggccatggatcaacctcaaagtgttgcaacagcagttgccatggaactaacaaatgtccttcaactgattccactaacactggggtgcttaagaaggacaaataagacacaacttgagagttgttagacccagaacatttcgctgaatacctggtgggcatcaatgtgtaatgcttgatgtcggcgatcatccttggtgagaaggcgctcaatgatgcaatggatgctggaacggtctcaagtacaaccgtcttggtcaggaacacgatgtcggctttgttggcgtcccacttgatatcgaagcccaacatcgaacacttggcgtgcgtctccttggaatagtcagtggtgggaattttggtggtgctggttgcaccattatcagctaccaacttcatggaggccatggcagtggcggcacatttgaccaccgcaaccacggtgagattgggctcgatgtcgggactagagcatttcgtcgaacatgtggtgggcgtcacctttgactgctctttcttaattgacgctggcaagtcttttgccttcttcccaacttccggtgtgcatgcttcaaccacatctatgagagaccgtatatcagctctagttctccgatcagcctcctctcgcctcagctcatactcctctattgtcacaccctgtagttctccaactaagcctaaaagtgaattaataagagaccctaagaaaataccggtgcaaagcaagagtaaaccctattaaatcaatgcaaacaataatcggaattggcatgtggaatttttcttgagttctacaagtcgaaattcactaacaggatttttagtggaattttgagagctctcgaaataattttaactatttaaaattgagcttgcaatattttaaatcccagggaaattcttttcctccttttcctcttcttgggccgtcggcccagtccaccccgccatgcgcgccctcctccttgtgggccgcccaagccgcccctccctctctccccgggacgccgacaggtgggccccacctgttggacccgtccccttcctccagccggcgccgccgcgcctgcaaccgccgccgcgcccacgcctccgccttctccgggccacgtcagccacgtccgcgcgtgcgccgcatctcccgcacccacttctcccctctcactcccatccgcgcccgcgccccgcgcccgagatggccgggattcgattttcgaatcccgcctctctctcctcccccactccccacgttggccggcgaaatcccgccccttccggccacatccggggctcccctcccctatttaggcttccccgtcaccccctctcgctttttccccatctcgccgaactccctcgtgctccccatcgctcccgcgccgtgcaaccacccgccaccgccgtttccgctactccggccgccgctagccgccgctagggtcgccgccgcgccgcgccgtcaccgccgtcgggttcgcgaggctaagctctaccccggccgctccttccccgtcgagtttcgtcgccggaattcgcaccccctcgcgctctggtgagttcaaccgctatcgccgccttcggccatgaatgccggtcgccgtggttcatctccctctctctaatctctctctcttccttccttagggcaccccgaaacccgtccgccggttgccgtcgtcctcccgtggcttgcagccgccgttcgccatcgtcttcctccgcgccggccaccctcggtgaggtttcctctcccatccattcccctccctctccttcctagccgccgcttagtgccgccgccttcgcgtcgcctttgcgccgtcgcctccgccgccggatgccgtcgccggcaacgcgttcgcgcgcgcacgccgtcgccatcaccgcggccggtaggccggccttgagccaagccgagccgggtcgtcgccgcccgtccgatcgaccccgagggcgatctaggccgtttagactagagattggactagggattgcttagccatgcttagttcaactagtgcacaatggggagaatcctattaatgtttagactgttggttctaatggtattgttggattagtgccaccgctttggtgttggttaattaaaagaaatcacatggtgggctgtgggtgcatggttttactggtcgcacccatggcagttaaggaccagttcgtgggatgccctggaagaacttatcgtacttaccacaagccagcatgggcaacggctgggcttgtaacgtagctttcctctagccgacgcatccaggcaagggtgggcgtgatggagtttggatgggccctgcgacggcctatgcggcttccggattcacctaggcacgagaggggactgcccgctgccttgcgaggagtgggggtgaaacctgaggtgtggtgtgcttggttagagggggttatgcgaagggtcctgtcacggcctctttccggtatgtcgtggtggcatgtcggtgcacggaaacgtgtcgtggggctgtgtcttgtgggtacagttgtacacctctgatcagagtaaaactattcgaatagccgtgcccgcagttatgggcggtcaaccagattcaacgtgattagtctcaccctagtgtaatcttttgaatttggatagtttaggttgaggtttgggcctgttgcaatgtgggatagcgttggacagtggatagttaatattaattaattattacaactgtttaaatctttcaacttctgttttttttaatgctcgctttatgcaaacgaaccactttagctcttctttgataattccttgcatcatgcctctattccggtatgacttgctgagtatagtggatagtactcagtcttgctctatttttcccaaccccagagtacgagtatgtgtcagatggaggtttctctgaggagtaggcttcgtccgtgccgtcaaggatgcctgtggagtggtgttcccgctgcagttctagtcaaggcttagctcctgttgtctttctttctttccgctgcatttatgtgagacttttatgatgtttgtaagacgtggatctgaatgtcaacattgtcgtttgtgtaccccggccggtcctagacggggattttaatgcacattctgcttggaattctatttggaaatttctgggcgtgacaagttggtatcagagccaggttgaccgtaggacaagccaaatggaaaaacctaggagccctctgaatccttttcattgcatatgttctttgcaattggatttgttccgggaaaattgggatctgttcttgtggttcaaggggaaaaatcttggtcgctcgtttaagtgagatttgtcaaaacaagtcagtccagggttttagtaaaactattgagatttattcgtcagtcagttgggatttgatgggtgaaatgcattagatcctagctcgggaacatgggttgcaaggtatttatgctcttactgttattattagtatgtatctaatttccccaatattttatcgttatgtgagtctgtcttatttattcgctctcatgcaaaaggatctatgcataaaatttcgctcttattcgattctcttatttgagtcctttattgctttatttaaatttggatttgagcatgcattgatcctactcctttgtcttctctagatggccggccacccacccaaccaccgcggagaaggcatgattgactttgtggcagagttggcacgtatgacgctggtggtgggctaccccaacgcgccagagtacacgactgttccaccactcagtggcgagcttcctcaccgtgttcgcctggaggtccacggctacgtgggtacctgcctagctaatatggtggttgaggcatccggaggcacagcagatcacgcctgttaggaggcagcatacctgatgatggccagactacgggagcgccacaactacatcttccacgacacggcgtaccgatttcaccctcgtcgatttcaaagaagtttgtcgggatgcatgggttaaggaaagaagagcttagcacaccaatgagggttcataccccggaaaatagttcaacctcagtcagttttagcccttcagtgctaatagaaatccaaagatcaccatttctagccaacctcattcttctcgaatccaaagacctagatgtcattcttgggatggattggctaaccaagttcaagggaatcattgattgtgcgaatcgcacagtcaccttgaccaacaagaagggagaaacagtagtgtacaaatcaccagactcaccaaagcaaggggtctccttgaatcagattgaagcggaaatcccagtggtcaccgtggagaagaatttgaggaagttggaagatatccccatagtctgcgagtatccagaagtgttccccgaagacctcactaccgtgccacccaagagagagattgaattccggattgacttggcaccgggaaccgctccaatttacaagagaccgtacagaatggcggccaacgaactagcagaggtcaagaagcaggttgatgagcagctgcagaaagggtacattcgaccaagtacttcaccttggggtgctccggtcatttttgtggagaaaaaggataagacgaagaggatgtgcgttgattatcgcgcactcaacgaggtcacaatcaagaacaaatatcctttgccgcgaatcgatgatttgtttgatcaactgaaaggagctaaagtgttttctaagatagacctgcgatcaggctaccaccagttgagaattcgggaagaggatattccaaagacggccttcaccactcggtacgggctatatgagtgcacggttatgtctttcggacttaccaacgcacctgcattcttcatgaatctgatgaacaaagtgttcatagaatttctggacaagtttgttgtggtattcatcgacgacatacttatctattcaaagtccgaagaagaacatgagcaacatctccgtctggtactcgagaagttgaaggaccaccagctatacgccaagttcagcaagtgtgacttctggttgacggaagtcaaatttctgggccatgtcattacagctcagggtgtggcagttgatccatcgaacgtagagtcagttaccaaatggaccccaccgaagaccgtgtcgcagattcgaagttttcttggacttgcaggttattaccgccgattcatcgaaaacttctccaggatcgcccgacccatgactcagttgcttaagaaagatgagaagtttaaatggacagccgagtgcgacaggggttttgaggagctcaaaaagaaattagtatccgcaccagttttgattctgcccggccagatgaaagacttccaagtctattgcgatgcatcccgccacggacttggatgtgtcctaatgcaagagggcagagtggttgcatatgcctcgtggcagttgcgtccacacgaagggaattatccaactcatgacctggaattggcagcagtggttcatgctttgaagatctggaggcactatctgattggcaaccgctgcgaagtatatacggaccataagagtctgaaatacatcttcacccaaccggacataaatctccgacaacgaagatggttggaactaatcaaagactatgacatgagcattcactaccacccgggtaaagccaatgtggtggcagatgcattaagcaggaaaagttactgcactgccctatgcatcgagggcatgtgtgaggaattgcggcaggagtttgagcatctcaacgtgggaattgttgaacacgggttcgtagccgctctggaggcacggcctacgctcatggatcaagtaagggcagctgaagtaaatgattctgaaatagcagagctgaaaaagaacatgagagtcagaaatgcccgggatttccacgaagatgaacacggcacaatctggttgggagaaagattgtgtgtacctgacgacaaggaactgaaggatctgatactcaccgaggctcatcagacccagtactccattcatccgggcagcaccaaaatgtatcaagacctcaaagaaaagttttgatgggtcagcatgaggagagaaatagctgaattcgtcacactctgcgatgtttgtcaacgagtgaaggcagagcaccaaagaccagcaggtttacttcaacctcttcaaatcccggaatggaaatgggaggagattggaatggactttataacaggactgccccggacatcatcgggtcacgattcaatctgggtagtcgtggatcgactcactaaggttgttcacttcataccagtacataccacgtatacgggcaaaaggttggcggagctctacctctcgagaatcatgtgtctacatggagtacccaaaaagattgtatctgatcgagggagtcagttcacctcaaaattctggcagaagctgcaggaagaattggggacccgtttaaatttcagcacggcctatcacccgcaaactgatggtcagaccgagcgagtcaatcaaatcttggaagatatgttgagagcttgcgctcttgattttggtggagcttgggacaaaaacttgccatatgcggaattctcgtacaacaacagctaccaggccagtctacagatggcaccgtttgaagctttatacggccggaagtgccgcacacctctctcttctgggatcagacaggcgagcgtcaactgttcgggatagaggtattaacggaagcagaagagaaagtcagaatcatcagggaaaggtttaggattgcccagtctcgacagaagagctacgcggataaccgccgaagggaactcacttttgaggcagggattacgtgtatcttcgtgtcactccgctccggggagtacaccgttttcagacgaaaggcaagttggcaccacgcttcgtgggaccctacaaaatcctggaacaaaggggagaagttgcttatcagttagaacttccatccaatatgatcggcatccatgacgtgttccacgtgtcccaattaaagaagtgcttaagggtacatgaagaacaggctgattcggaacacattgatatccaggaggatctaacctatgtggagaagccggttcatatacttgataccagcgaaagaagaactagaaacaaggtcaccaggttttgccgagttcagtggagtcaccattcagaagaggaagcaacctgggaaagggaagatgagttgaaagccgcccatccgcacctcttcgccagctcctccgaatctcggggccgagattccgtttaaggggggataggtttctcacaccctgaagttctcctcctaagcctaaaagtgaattaataagagaccctaagaaaataccggtgcaaagcaagagtaaaccctattaaagaaatgcaaacaataatcaaaattggcatgtggaatttttcttgagttctacatgtcgaaaatcactaataggatttcagtggaatttcagagctctcgatataatt

SEQ ID NO: 21105 - DNA, 10475 bp, Oryza sativa
tgtcgtttgtgtaccccggccggtcctggacggggattttaatgcacattctgcttggaattctattcgggaatttctgggcgtgacatctatccgcctcaacagcaagtccaatttgtcttctattgccatggcaccctacttgatgagaactttctcaactagaccaagagctagatgggggaaaccaggctggctctgataccagattgttaggaacccactacttccaactcaacaacaagcatccaccatagaagcaacaactgctttggggacaagagaagaagaagctatggaatacaagtgctggaaacttctagaaccgaggggggggggggaaggctggagattggaggagaggtagagtagagagatcgacgagggtgcccaccgaccgcccaagtcgccgccgccgccaggagcttcagctccgccaagtccaaatgatctttcgatgccccctagtgttgccgatggtgccgcttatatgctgctcccttccgtttgcttgggcctcttggcgatgggctgaccagcccgtgtgcggcccacccgggatcctgacatacattcattgtggattaggtgcaagaagaggccgtaagtcaagcaattcgattaagatgggggaagtaggaagatacagtaaacccattcatcatgagcagagatgaccatttcatggttattgagatcgtagagagtaatcaaattagttcactcagatcaaacacaaagacaacaggccgtgtaggatatggaaaaatggtgtgcccattaatctaatcattttatcgaaaggagtaacgaattaatttatactgcgaaactgttgtttcagaacaggtccatatcctgtcgtgtggtaacacaactggatggaatcataagatgaaaaggagcagcaagaccgtcttgccggaaattttctggtaatttctgaacttatttgtgcataaaatcctcgtccaggaatcagctgaggtacataaactgacaatttaatataccaatccatcataataatatcgttacatacttacaaaagaaaagaaaagctgcggcggaattacggtctagcgaaggttcggctccactcccacaggcagctcaattggggtataagccaaacgttttctccctctggatcattttaatttcttcaactgaggttgattgattattgcaagatgagtacgtggaatactccacaagccacacagcaaatatgtgagtgcacaaggattccgaaggatggcataatataggctcatttgcaaaagtagcatttagcaaacatttaggagtagtaaaacaatagagtaattaatcatcaatattaatcaacactgaacagcacaaccatgctgcacaggcccaaccatcctaaacaaccatacccagctgtacagatctaattccaaactaggagctaagcaaattattacctgctatagcatcaataattattatgagaggtgtgagactaataacgaaaaacattgctcaacccgcccataaccgcgggcacgactattcgaatagttttactctggccagagatgtaccactgtacccacaagacacagccccaaaacatgttaccatgccctcagtatcaccacggtacctcgaaacgggactgtgacaatacccctcatacaacacaatccaccacagcgcaccatacctggatcataatcaccccctcaataaccagaggcatggactccgcagcgatccccatggacttctcgctacttcacagtctggtgccccgcaacgaactatgctatacaaaaggtaaagctgttgcccacgctggcgtggaggtactggtccacggtgacggcgacattttggcgatcttcggcgaaggaaaaccggtggccgggcttcagcttggcgctgcgatgctgaggaagacgacggcgaaaaccgaccaccacggagtcatcgacggggctcgaccggaggtggagtagatcgggttcacgttgatgaggggattccaatgggtttcggcttcgggaagatggctgtcgggcttgctcttgaccttgcggagccgagggaggaagaagcaaagaccgaggacggccagggcgacggcgagatgtggctggagcggcggccggcggtagactgagaaggcgaacgcggcggcagcgctacaagcgatggtggagatagggagaggtggcggccgaaagaggagagggtggggactttatttataggcgtgggaaagagagatcggctcgggaacggatggattcgttgaaggaaaattagggtttgtttttgcagagataaactcaatccgagctcgattccatgtcgaattaaaagggataaagtctagggaaacggaagagaaccaattcaagaaacggctgagagaatcgagcgaatcaggcggaggaaacgacagcgtctcggcagctgcacgggctctatctggagctggaagacgacactgtagctggagggaaaacgtatagactttcagctgggcttcatcttccaaggcctgattaaagagggaagcaaatgcccggtttatgggagcttctcccagctgcagcttttcccaaaagctgcttctgttagaagctgcctcaaacagtccacagcttctgagaatctgtagttatagattctgaaaaatgaactaagaagccaaaagctggagaagatgggtttcagagcttttccacattctcagaagctggctaccaaacagctgcttctcagaatctaaagctcccccaaatagccccaaagcagacttcgacagagagaaagaggctgctggatcggctgggctgaaggggagagatgggccagattaagacctgagctttcgaaaggattttaattacttttccaactaaattaatcactgaaatgatatttgaattgttaaaaatacttcaaatactgaaatatgttcaagaaaaatctcgcaactacttggacacttagagtatttaacaaacttaagataagatcatttaatgactaatttaatatttaaataattcctaaaatgttctttgtattattaaaattagtaattgagctctaaaaaatccgagaaaatttcagagagtataattaaccatgtagaatttaataaaatttaatccatccatgctttatatttaggaaattttatttcccacatttaacttcacttgtttattaatgtacatttaatataaattttaataataatttattaaataatttataaatcctaatacgaaaataaggatgtgacaaagactgctagaagaaatcacaagaagaaagatagtgacttgactcctacaaatgaagggatgcatcttacacgcagtgtggagattatgggtagttgggtaccacatacccacatggcacgtatatccgactggttataggtaatagcttgtacagatagaatatgtttaggaaatgactcgggaattatgttaacttgtatgtcaaggaaatatccagtagtgccagttagttacagttgtaatacatattcgttagcctagtacgtaagccatatgggctgtacattgtaatcttggctcctccccctatataaggtcgggtccaagtgtacctaggggcataacttttctcccagatcatcagatcaataatacactcggtggaataattcccccgctgtataaacctttgcctcctacgtcctaacctatccacttttccagcttgattgctaccccttttagtattgccggaatcttgttttgacagttggcgcgtcaggtaggggttgcgccatgtttttcgccgactagtgcgatgggattcgtttcgggcatcaccgacttcgctttccctcccgggcagacgtgctggttcggcggcccatggacctcatcagccacccgtacatgcatgcaaagaagacatcgtacgacagatcaatccatgattataaatcaagctaataatactatatagattgtgaaagaagttcttctgtatatgtgcagaatgaaggatcccttaaagcaaattgtttttgattggttgcaagctttatagttttatttagttccttcgactgtaactttgtaaatattttttgagttatataaaattacactgctcggcaaagcgacggcgctcttcggcttgacgacggcgacgatgctccggcggtcttcgacggcaacgaaggagcggacaaggacggcgacgacttggcgatcacgacggcggtcttcccgagcgacggcgacggctgaaacgacggcggcgcacggctggagcggcggcggcgacggcgaagctagggcacacggcgctagagcgattccgacgacgagaggcgaaggcgaaggtggcgacgggtagaggagacaccgggggtccttttaaaggggctcggaggcggcggcaaaggcccacggcgacggcaacggcgaaggaaagctcgggcttgaaggaaagaggccgatccgaatcgaactcgattccacgaacttccaaaacgaattagccgatgattccaaaggagaaaaggtagaggagatcccggagattgtttcccctctaacaattcggccggagaaggaaaggaacggccggatttggaaaggaaacggcggcggcgcgaaactagggtttcggcggcggcggccgaaggtagacgacgactgacaggtgggccccacctgtcagcgagcgagggcgcgcgcgcgggcggcggactgggccggctgggccgaggagagagaagagaggttttgggccgactttcggcccaaagccaaaagaagactttttaaaacctttttcaatttaaattatttcttaaatgcaattccatttattaaaaatactttcttagctcaaataaaccccagaaaaatctaggaattatagaattaagcaaagtatttaacgaaattttatcttgccccattttatattggaatttatttattaaaattaaatcttcttttcaagacttttaaaattatttctaaaaaaattccatttaaacaacaatttatatattttgaattttcagggtgtgacattagtttatttataatcagtataatcttagtagttaaaccttctgggatttgcattgatgctggtataatgtctgattaccaggtcataagtctgctctggctaggccgagaactatgccccggggactcagatgctctacaccgattgcaaggctgtagagtaataagtagtaacttaagcatggggtttaggttatcacttatcattattttgggatatattcaccgggagagtagcaggccgctgatggtgacagcttaatacgtgcgtcttccccacagtttatatttctacgtacaatttccttgggtaggatacacctttgtatcctactttggtttgagggttatgacaggttgtcataagaaactcgtcaacccagggtaactttgcgatgcatcatatcgggagggcatagctgtcacgccctgaagtacccctcccttgctctaaattcataaaataaatcgttcgaagaaattgtttaatttaacctagagagaaaccctaaattaataaatgcaaataataatcggaatcggcatgtggaatttttcttgggttctacatgtcaaaatacgctaacaggatttttagtggaattttcagagcattggaaataattttaaccaattaaaataagcaaagtgcaatattaaatccctgggaaaatcctttttcctttttatccttcctttttccccctcttttcctcctttgggccgccggcccatctctcccgacccctcccgaagtccaggtcgcctccccctcactccctcgggcgctgacaggtggggcccacctgtcagcaccttccccaacctccagccggagggacggcctccctcctccctaccgccccgcgctccctgccgccccgggccacgtcgcccactcccccgcgcgccccgcactccccgcgcccacgccccactcccgctcaccccgcgcccgcgagatggccgggattcaaatttgaatcccgcctctctctctctcctcctccacctcctccactactccggcgaaattgcgccattcccggccacgactcgccgcctcccctcctatttaagcacgcccgcaccttcctctctctttttcctttctcggccgagccctcccgagccctccatcactcccgcaccgctacacccgccgccgccgccttttccactcctccggtcgccgctcgccgccgctggagccgccgccgagccaatctgccgccgccattagcttcgccgccgccaaagctaccccggccgccgcatccccatccaatcccgccgtcgggacccgcttctccccgcgcgccggtgagtaccaccatggccgccgccttcgaccggcgaatccgctcgccgtagaccacccctctccctctaatcctttccattttgttccctaggaggccccggagatcgttcgcccgtcgccgtcatcctcccgtcgctcgtcgtcgtcgttcgccgtcgtctccactcgcgccggccaacctcggtgaaaaactccccctcctccgtctttccctctctcccgtgtgcgtcgccgtcctccgcgcgcgcaccgtcgtcttcggccgccgacgccgcttttcgcgccgtctgccgtcgccgtccgcgccgccggttgccgtcgccggtgaccgcgcgtgccgccgtcgctcgccatgcttggcctgccggctttgaagccaagccgagccaccagcggcgcccctcccgccttgtgccactgccagtggggcccacgtgccggcgcccctccctctctctcttgagccgccgctcggtggggcccgcttgccagccgcccctctctctccttgagtcactgacccgcgggtcccgcatgtcggcgccgccccaccccttgctgacgtcagccctggggcaatattgcgcaataaatcgattaagggtttttcttttatagtaaaaacacagagaatcttctaaaaatcataactaattcatccgagctccgattaagtccattcaagtctcagtaaattcataaaaatgtgtagaatccattaaaaatggttttgcttcctgtttcagtagtcttatagcatgttttgcttgtgtgctttgtttgtcgcgtagatttcggccgtttcgtcgattcgtggtttctcgaagacgttgctgtggttccatcagtgcgagagcaaggcaagtcatacattgcaattgatcatattgtacctaatttacaaatgtcccgcatttctattaaatattgcattgttttacaatatcatgtgggatgggtcctattactcagctatatgttgtttcccttatgccattgataacttgggtattaaaatgactagatgttggtttaggagatgcttagccatgcttagttcaactagtgcacaaaaggggaccacattaaagcatagacttgattattggcaatagctttggattagtgccaccgcaatggtgttggctaattaaaatacactacatggtgggctgtgggtgcatggttttgctagacgtgcccatggcgattaaggaccggttcgcgggatgccctggaagaatttatcgtacttaccacaagctagcgtgggcaacggctgggcttgtagtgtagcttttctctagccgacgtacccaggcgagggtgggcgtgatggagttgggtcggccggggtgtccggttgatcggctgctggattcaccgcggcacgaaaggggggctgcccgttgcctgctggggacgggggcgaaccctaaggtgtggtgcgatcggttagagagggttatgcgaagggtcctgtcacggcctctttccggtatgtcgtggtggcatgtcggcgcacgggaacgtgtcgtggggctgtgtcttgtgggtacagttgtacacttctgatcagagtaaaactattcgaatagccgtgcccgcggttatgggcggtcgaccagattcaccgtgattagtttcaccctagttagcttttggaactggttagttcaggtggtggtttgggcctgttgcaacgtggtgtaacgttggacagtgattggttaatatggattaattactacaactgttttactgctttcaactactgctttgaaatgccggctttatgcaaaagaacctttagcctcccttggatatatcttgcatcatacctcctcttccggtgtgacttgctgagtacagtgggtagtactcagtcttgctctcttttcccccacaccatagttgaagtccttcccagttgaagatgtctcgaagaggttggtttcgtcgctgccgtcaaggattgcctgtggaatggagtcgcccgctgcaggagtcaagtcttcaggcttagctcgcttttatctttttccgctgcatttgtaatcttttatatttttgtaagacgtggatctgtatgtcaataattgtcgtttgtgtaccctggctggtcctggacaggggtttaatgcacattcagcttagaaattctggttcgtgaatttctgggcgtgacaagttggtatcagagccgaccttgaccgtaggacaagccaaatggaaaccctaagagccctctgaaaccttttcatctgcatatgctttttgcacttggatttgtttcgggaaaaattttggggttttgttcttttgagtttgtgggaaaaatcttggtcgcttatttaattggatttctcgactagggacagtctagggtttggtaaaagtttatttggagtttatttgacagtcagttgggaatttatcgggtgatatgcattaggtcgtgtctatgttcgatggggcaatgttacgcgcaccatttttcatgcatctagtttatgcattaagctatagtttagtcagtcgcattagtgtctttatccgggttcatgaaaaatgttctatgcataaaaatcatcatgcttggctagttgtttgggccagttgttgcttggtttaaatttggatttgagcatgcattgattcctatcccttgtctaccttagaagtcagacatgttcttcgatcgcaagcgccgctccaagcttcagagtcgccgcccttagctttatcgtcttcttagttttgtttgcttgctagtttccgtgcttaggtttgttgcttgtgggttagtcggcggtcgatatcatgtgtgagtggtatgacagcctttattaggagttgtgtgcctctttttcagtgttttaatcaagattaagataattgcacttaatcttataagaaagattagtttccgagccgtctgttttcttcctttctcttatttctacctatcctcctccagatggtgaagacaaggaatgatccccgtgactccaacgacgccagtggcagcgaagagcagaccgatggagctcatgtcagtggtgcatctggcagcagatcatctccaccgcccgaaaacccaacagtcactcaaatgatgacaatgatgatgcaacagatgcagcaacattaccatcagatgttgcagcaggcgcaacagaaccagcagtttggtcctccaccatcacacgtgtccaaactgttagactttctctgtatccagccacccactttctcaaacaccaccaacccaatggaggccaacgactggctccgtgctattgagaagaagctgaacctactgcaatgcaacgaccaagagaaagttgcttttgctacacaccagttgcaaggtcccgcttctgcctggtgggataactacgtggcgacccgtctagatgcaacggaggttacttgggcagagttttgtcaaagtttcaggaaggcacagattcctgaagggattatggcacaacagaagagagagttccgtgcgctccaacaaggaaccatgtcagttacagagtacttgcatgagttcaaccgccttgcacgctatgctcctgaggacgtgcgcaccgatgctgagaagcaggagaagtttttatttgggctcgacgatgaattgaccaaccagctaatctccggagtttatgaggactttgagaagcttgtggacaaggctattcgtcaggaagagcaacgcaacaaaatggaccgaaaaagaaaggcagctcagatcagctttcctcaggggaacaatcagaagcctcgcttcatgacgggacagctaggtgggccttccaccctgatcgtctgtcagcaccgtccctatcacccgagtaacttcgacaacgactacaacggtggcaggcacaacaacagtaagcagcacaaccacaactcgactccacccccactaatggcaccagctcagtcagatccgccagctgtgtcagttcagtcagaacaacccaagaagggggctgtaggaaagccaggaccctgcttcaactgtggcaagcacggccactttgctggcaagtgtccga

SEQ ID NO: 21106 - DNA, 2985 bp, Oryza sativa
ctggatgtcattcttggaatggattggttgaccagaaacaagggagtgattgactgcgcaagccgcaccatcaccctaaccaacgacaaaggggagaagatcaccttccgttccccagcgtcgcagaagtccgtagcgagtctgaatcaggctgctattgagggtcagacagaaacagtggagaaaagtcccaggaagttggaggatattcctatagtacaagagtatcctgaggtgttcccagaagacctcactacaatgccaccgaagagagaaatcgagttccgaattgatctggcacccgggactgctccaatttacaagaggccgtacagaatggcagctaatgagctagcagaggtcaagaagcaggttgacgaacagctgcagaaagggtacatccgaccgagtacttcaccttggggtgctccggtgatctttgtggagaagaaagacaggaccaagaggatgtgcgtggattatcgcgcccttaatgaggtcacaatcaagaacaaatatccgttgcccagaattgatgacctgtttgatcagctaaaaggagctaaggtgttttccaagatagacctgcgatcaggctatcatcagttgagaattcgggaagaggatattcccaagacagccttcatcactcggtatgggttgtttgagtgcacggttatgtcatttggactcaccaatgcaccggctttcttcatgaacttgatgaacaaagtgtttatggagtttcttgacaagtttgtcgtggtattcattgacgacatacttatttattcaaaatcagaagaggaacatgagcaacatcttcgtctggtacttgagaaattgaaggagcaccagttatatgccaagtttagcaagtgtgacttctggttatcggaggtcaaatttctgggtcacgtcatttctgctcaaggcgtggtagtggatccatcaaatgtggaatcagttacaaagtggaccccaccaaagacagtttctcagatccagagttttcttggacttgcgggctattaccatcggttcatcgaaaatttctctaagattgccaggcccatgacacagttgctaaagaaagatgaaaaattcaaatggtcagctgagtgcaaccaaagttttgaagaactcaagaagaagttagtctccgcaccagttctaattctgccagatcagacaaaagacttccaagtctactgtgatgcatctcgccaagggttgggatgtgtgttgatgcaagaaggcagagtggtcgcatacgcttcgcgacagttgcgtccacacgagaccaattatcccactcatgaccttgagttggcagcagtggttcatgctctgaaaatctggcggcactatcttattggcaaccgctgtgaagtttacactgatcataagagcctgaagtacatcttcacccagcccgacttaaatctccggcaacgaagatggctggagttgattaaagattatgacatggggatacactatcatccaggcaaagcaaatgtggtagcagatgctttgagcagaaaaagctattgcaatgccttatgcaccgaaggcatgtgtgacaaattgcagcaagatcttgagcacctaaatttgggcatcgtggaacacgggtacgttgctgccctagaggcacggcctacgctcgtggatcaagtcagagcagctcaggtaaatgatcctgaaatagctgagctaaaaaagaatatgagggtcggaaaagcccgagagttccatgaagatgagcatggcacaatctggttgggagaaagattgtgtgtgcctgacgacaaagaactgaaggatctcatactcacagaagctcatcaaacccagtattcaattcatcccggcagtactaaaatgtaccaagacctcaaagagaaattctggtgggctagcatgagaagagaaatagccgaattcgtcgcactctgcgatgtttgtcagcgagtcaaagcagaacatcagaggcccgcaggactgctacaaccccttcagatcccggaatggaaatgggaagaaatcggaatggatttcataacaggtttgcccagaacatcgtcagggcacgattaatctgggtggtcgtggatcgactcaccaaagttgctcattttattccagtacacactacctatactgggaaaaggttggcagagctttatctttcaagaatcatgtgtttgcatggggtacctaagaagattgtatctgatcaaggaagtcaattcacttcaaagttttggcagaaactgcaagaagaattggggactcgtttgaatttcagcacggcttatcatccacaaacagatggtcagaccgagcgagtaaatcaaatcttggaagatatgttgagagcttgtgcacttgactttggtggagcctgggataaaagtctaccgtatgcggaattctcttacaacaacagctatcagtccagtttgcaaatggcaccgtttgaagcattgtacggacgaaagtgccgcacaccacttttctgggatcaaacaggtgagcgccaactgtttgggacagaagtgttaaccgaagcagaggagaaagtcaggaccgtcagggaaagactgcgaatcgcccagtctcggcaaaagagttatgctgataaccgccgaagagagcttactttcgaagcaggggattatgtgtaccttcgtgtcactccgcttcggggagtacaccgcttccaaaccaaaggcaaattggcaccacgctttgtgggaccatacaggatcttggaacgcagaggtgaagtcgcttaccagcttgagctcccatctaatatggttggaatccacgatgtgtttcatgtatctcaattgaagaagtgtttgagggtacctgaggaacaagctagctcagagcacattgacatccaggaagatctgacttatgtggagatgccgatttgtatcctcgagactagtgagagaaggaccagaa

SEQ ID NO: 21107 - DNA, 567 bp, Oryza sativa
gccggcggcggccatggcgctcatcaccccagctagcggcgggggcggcggcggaggagacaaagccccaccgtccgcctccgacccgagcctcgggttcctcactaagcgcgacacggaggtgaagctgccccggggcgacgcgggtgaagaacaagacccccgcctcggtccagatcaccgcagagcagatcctccgggaggcgcgggagcggcaggagcccgagatccgcccgcccaagcagaagatcaccgactcaatcgagctctccgagtaccgcctccgccgccgcaaagagttcgaggacgtcatccgccgcgtccgatggaacgtcaacgcctgggtcaagtacgccaagtgggaggagcagcaacgggacttcgcccgcgcgcgctccgtctacgagcgcgccctcgacgtcgcccaccgcgaccatacgctctggctcaagtacgcagagttcgagatgcgcaacaggttcgtcaatcatgcccgcaacgtctgggaccgcgccgtttctctcctaccccgggtggaccagctgtggtacaagtacatccacatgg

SEQ ID NO: 21108 - DNA, 574 bp, Oryza sativa
attataacaagaaagtggtgcccaagactttttcggaaggtgaacttgtatggaagttgattttgccgattggttctcgggataacaaatttggcaagtggtcaccgaactaggaaggaccgttccaaatctataaggttgtgtctaagggagcttacatgttgcaaggactcgatggagaagtctatggacgagcgctaaatggcaagtacctgaagaaatattacccaagtgtttgggttaatgcatgatcagctgatgttgccgatacatgatagccgatgtgtttgcatcgtcttgagatggctgatactgttatatcgcccttagttgtttttcatattgtaatcggttatggtttgccgatgtacaatggccgatattgttatatcgcccttagttgtttttcatattctaatcggttatggtttgccgatgtacaatggctgatattgctatatcgcccttagccatttttataattttatcaatgcttgtgacattgtaaaattaggagggcacatatatatgaaaaattacaaatttttgaatcggcataaagattggcgagatg

SEQ ID NO: 21109 - DNA, 8841 bp, Oryza sativa
atattgtttagtgattgcagtgacctgagtagcacctcaagctcccgagtttaaatataagaattggatttgtatcattaaactagcacataaatataagaggggtaatatagtcaattttaaaaaaattaacggtcaactcatgttcaattaacaaaatgggcataaaggagatcaaaatgaaaactcaagggtatataaaggatgaggcaaaattaaggggtacataagggattggacgaattctcaagcgtatatagaggattttctcattatttgaagtcaaaacagtacaactcatttggcattaagctcaacagcgatcattttgtttaggcttataacctcttataagcaaaaagtctaatcagaaataaacaattattttttgttttgctttttgaaatccgtaagctcattttacaatgttaaaggtcctctttattacacttataaaccagcctataagtcgatacgtctaaccataaacaaacaaacaagaagtttattcatttagctttttccaatccataagccactcttaaattattaagccgtggagaagccttttggtttatgtgaggtagatgtatgactctatccttaatcttagaactttaaattcatcggcttgttaattatataagcaaaaggctaacttaaaagtctaagccagtaaacctaagcataaacaaagatgccctaagcaaaatctaggtcgcgaggtacttttttttttcttgtttgaagtggatgtagaacttcaccattaaatttaattctttaaaaccaccaacttataaaacacaaaagaaaatatcggcttaacagtctaaaccaataagcctaagcctagataaagaggatcttaagcactatggttgtttttcaaggtttcttttgaaggtatcttcataatatatcttgcaagattgtggacgagtgatactcgtggaccggaagaatagggtattggggtacgttggaacagggatctgtgtagtacgacatcaaaatagacaaaagacaaggattatactggttcatgccccatatcaggtaatagccctaatatagtttatatgggaataatgacgatgagaacagattacaaagagagtaaccgaacaggcgatgccgatgagatcgtagtcgagggattcgatgaaatctcccggcgagttggctccgtagactttggcttcataaactctggtgggtgtgttggcgatgagatgcgatgccctttgcctctccctaggggtcccttttatatcgtgggataccttgaccctcaagtaagacttggagatatgtaaaccgacacgatatactagagattttaccctttccaagtaggacttctgcaattccttaacttcgtggagatattccttaacttgaggcgaattcctaacggcatatatggaaaccaaccgtatacgtatacgtgaaggtatatcttatcggtatattccatatgtcgtaggatagaggatatgctttatctgtaaccctgacaaagatattttcaaaaacttatttttaagaggaaactttatacggataaaatttctagacaaaatagttttgtaagactattttacctaagatatttttatgaattttgatgcacacacttgatttttttggccaaaaattaggattttttttagaaaaaaaggaattgctaaaaaatatcacaagttttctggataaaacaatttcaagtgtaactatagaataaatttgagtataactacatgtaattctgtcagggttaaggataaggtataccctctacccttggatgaacgctatacggcaatacggtatatcggcgcatatacggacgttctctgaacacgctaaggaaatccatcacgaagtctaccaatgcaaaggttcctacccgtataggactgggtcgttactatatcgtgcagggtttgatgtctccgagtcctacttggagaccacctgacctgcgatataaaagggaccccccgaggggacctaaggcatcgaatctcaaagcttacacaacgaccacagcctacgaagtcggagactacaagggccaagtcgccgggtgatctagtcgaatcaacttgactacgatctcgtcggtatcgccgagttctactattccctttgtaatcccatatcaactggattagggctattacctgctaaggggcctgaaccagtataatctttgtcttttgtttccttgatgtcgtattacgtagatcctcgtaccagcgtaccccaataccctctatatccggtctacaggtacccaccgtcgacagtggcgcgccaggtagggggacttggtgctcaaggttctattactatgacatcgagcttcgtcgacaacagcgtcaacaccggccccatccaaggaatccctgcttcgacaatgctgctgtggactcaagtcggcaaaatcgtcttcccggtttacaccacggtgccaatctcgggctggtccatcaatgaccggaaacgagaacgccgtggttgtaaacccagacgatcccatgtcgaagaattctcccgccgtggcggagaacggaacatcgacgtcatacgagcccgagaaggttcctagcgcggccaagccttgtccttccgacaagtactacgagccgacgaggacagcttccgaggtaaccaagtcctgttctcctatccacaagtccaggaagcacaacttgcaagcttgttgggtttttctcaacgtacaagctgaaatccgtgcttgcaaagaacgtggaatccagcgtacttctccaactcgtgatatctattgtcctattcacaagacgaagaatcacgacttctcaagctgcaagatctttctccgtgccatgaagacgacgcttccgaaggtccaacagtgaggaacctctctcaagggtacagacaaggaacaaggagcgacgttgacctcggatcgattcgttggagtaattgacatcgatccccgcgaaccattagtcctacacttgctcgaagactatggctcgtcatcttccagtacaccacgcgacgtgtttaccatcggtgggactagcatgtctgcacaggctaacgcagaggcggagaatcagacggccatgccagctcaacatctcggcactgtcaacgcaatattgagacaagctccctatgaccccgtgcttaacgatgatctcgcacgatggacggaacgactacgggaatcggtagccaatctcagtaacgcgttcgaggaagctgctaccagagcacaaccggagtgactgacagctggcggtgccgacggtgaaccaccggagcagcgaacattgcctgcacgagctacccgtccacctcgcggcaccggcgatctccacgatcatctgaacggccgccgagaagcacgacgcacgcgagacaacgagaatcgttcccgacatcgcgtgtcttcacgacgttgcgagaacaaggagcgaggaggtcgcttgaacgaggaccaacatcaccgtgatcgtcataaccaccgcgatcgcgataaccgcgagcagcggacaccggatgatgatggtcgggggcgttagcatgaaggtgatgataatggtgaccggcgccagaacaacaacggtggacggcgatagaattctcgagaacctgaatgtcgccctcggaatcgcacgctggagccgactaagccatcgtcgtcgtcgtcatcatcatcttcatcttcgtcatccgatagacgtccacggaggacacacgatcgccgacaacccactgcccccagcgctgggtgtagagctttcaaccgttctctacgtgatgtccgatggcccgagagattccgacccggagcaatagagaagtacgatggaagtactgaccctgaagaattcctctaggtctactccatggtactgtacactactggggcatacgacaacgcgttagcaaactatttgccaacagcgttgaaaggttctgcacgttcgtggttgatgcacctcccaccttactcgatctcttcatgggcagatttgtggcaacaattcatcacgaacttctagggaacttacaagcgccacgcgatcgaagacgatttacacgcgttaacacagaatcagggtgaatctttgagggactatgttcagcgctttaatgagtgcagaaatacgatccccgatatcaccgatgcttctctgatccgcgctttcaaaaccggcgtcagagatcgctatactacccaggagttggcaacaaggcgaatcactactactcgaaggttgttcgaggttgtcgatcgatgtgcccatggagacgatgcgctgagacgcaaaaacgacaaacccaaggcgggaggagagaagaagccagccaaagacacacccgaaccaagcaagaagaaaagcggcaagagtgggaagaggaaagctcaagcagtagtcctcgcatctgaatacgagcgcccgcccaaacacccagacccacaaggcaatgatacaaagagaatatggtgccccatacacaagtcggacagacattctctaaaggagtgcctcatcttcaaaaaatcgttggaaaggcagctggctttggagaagggcaagcgagtacgtgtagtcgagaaggcaactgaggcaaccactcaggactcggactccgcgtacccagattccgatcttcacgtctcacacatcttcagaggttccacaatgtactcttcaaagtgagaatacaaaaaagtggagcgtgaggtttgttcgacatggcaggggactgcatccaagatgaagtggtctgaacagaagatcgagttctcagatgaagaccaccccaaggctgctgttataccaggacgatatccgatcgtggtcgaacccactatttggaatgtcaaggtggcgcgagtcctcgtcgatggcggcaactccatcaatcttctcttcgctagcactttggacgcaatgggaattccacgaggcgagttgacacctaccgatcaacccttccatggaatcacccctcaatcttcatccaagccattgggcaagatcacgcttccgatgactttcagccaagcgagcaacttccgaacggaacagataacatttgatgttgctgagttcgacacagcatacaatgccatcatcggaaaaacggcactcgcgaagttcatggccgcatctcactacgcgtaccaggtactcaagatgcccgggccgaagggaacaatcactattcaaggaaacgcaaagctggcggtccaatgcgacaagcggagcctcgacatagtcgagcacactcccagcccacccgccacagacggccacccaagaaagtgatcaaaacgattaagacgccgaaaccagacggtgcaatcaaaatcgttccactctccagtgccaaccccgacaagacagtcaagatcggggcatcaatgaacgagaaataggaactcgcgcacatcaccttcctccgcaacaatgcagacgtattcgcttggcagccgtccgacatgccgggggtccccagggagatgattgagcacaaactcatcgtgcgacctgatgccaaaccagtaaagcaaaaactgcggagatttgcaccagatcgaaaacaggccatacgagaagagctcgataaacttcttaaggctggtttcatctgagaggtactccatccagagtggctaaccaacctagtcatggtgcggaaggccaacgggaagtggaggatgtgcgtcgacttcacggacctcaacaatgcatgccccaaggatcacttccctctacctcgaatagaccaactagtggactcagcagcaggttgcaagctgtcaagcttccttgacgcttgctccggctaccaccaaatcagcatggcaaaaaaggacgaggagaagacagcattcatcacgccgttcggtgtattctgctacgttaaaatgccgtttggactcataaccgcaggaaataccttccagcgtacggtccaaggggcacttagcgatcagctgggtaacaacgttgaggcctatgtcgatgacatcgttgtcaagaccaagacagacgactcattgattgacgatctacgggaaaccttcgacaatctcatacgatatcgcctcatgctcaaccctgagaagtgcacgttcggggtaccgtcgggcaaactgctcgggttcctcgtctctggcagaggaatagaagcaaatcccgagaagatcaaggcaatcgagaacatgaagtcgctcacaagactcaaggaagtatagaggctaaccggatgcatagcggccttaagtaggttcgtcgctaggatgggagaacgaggacagcctttcttcgcactgctaaaaaagcaagacaaatttgtatggacacaggaaaccggagaggctttcatcgcactcaagcgctacttgtcaaatccccctgtacttgttgctccccaacctaatgaagagttattcctctatatcgccgccacgccctactcagtgagtactgtcattgttgttgaaagagaaaaggtgcaaagaccagtctattacgtcagcgaagctctacacgacgtaaagacaaggtacccacagatccaaaaattgctctacgcagtaatcatgacgtcaagaaagctacgccactatttccaagcccacaggatcacagttgtctccgccttccctcttggcaaagtcgtgagaaacaaagatgttgtcggtcgcattgcgaaatgggtagtcgagctaagccagttcgacgtccactttgtaccacgaacagccatcaagtcccatgttctcgccgatttcgtagccgattggactatgcctgaaaacaggttagacagccagaccgacaacgaaacatgaacaatggcgttcgatggtgcgctcaacagccaaggagcaagtgaggggttcatcttgacatcaccttcgggagatcagttcaagcatgcaattcacctcaacttcagggcgactaacaacacagccgagtacgaaggactactcgctagaatgatagctgcagctgcacttggagtcaagtgactgatcgtgaaaggggattccgaactagtcgcaaaccaggtgcacaaagattacaaatgctctagccctgagctgtccaagtatctcgtagaagtcaggaagctggaaaaaagatttgatgagatcgaggtccgacacgtatatcgcaaggacaacatcgaaccggacgatctagcacggcgtgcgtccagacgagagccacttgaacccggcacttttctggacatcctgacaaaaccatcagtgaaagaggcaaacgacgaagatagcccagtcacccccgacatcagctcgggggctacagaggtagagcgcgctgttgccgacatcgagaccacggatgactggcagaccccactcattaaattcataagcagcgacgagttgcccaaggacgacggagaagccgagaaaataacccgtcaagcaaaatctactatatgatcggccacgatctatataaaaggcgccaaagggggtacttctaaaatgcgtctcgtccgacgacggcaaacacctcatcctcgacatccacgaaggagtctgtgggtcacatgccgccggttgcacattggtcggaaaagccttccgacaaggatttttttggccaaccgccctcaaagacgcttgcgacatggtacaacggtgtgaagcttgtcaatctcatagcaaacacacaaagctaccagcgcaagcactacaaaccatccctctcacttagccgttctcatgctgggcgctcgacatattcggtccattcctacgaggacagggcggctacaaattcctgttcatggcgatcgacaaatttaccaaatggatcgaggcaacacccacgggggaaatcaaggctgacaacgctatcaaattcattaaggggatattttgccgatatggattgcctcaccgcatcataacggataacggctcccagttcatcagcgccgatttccaagattgctgcgtcggactgggagtcaagatatgtttcgtctcggtttctcaccctcagagtaacggataggtcgagagggcaaacggtatagtactacaagggatcaagacctgtgtctacgataggctcatgtcacatgacaagaagtgggtcgaggaactcccctcggtactatgggccgtacgcaccacaccgacaacgtccaacaatgagacacccttcttcctcgtgtacggctcggaggccatgctccctaccgagttacgacatcaaagtacacgagtacagaagtactccgacgaggatcaggagcaacagcgaaacaacgacgtgaacctactcgaggaacatcgagaacgggttgccgtcagagcagctagctaccaactggcccttcatcgatatcacgagaagcgtatccgagtacgcatactttcgagcggtgactacgtcctccgacgagttcagagccaagctgggcgaaacaaactctcgcccaaatgggaaggaccgtacacgatcacacaagtcttgcggccaggcgcatttaaaattgcagacggcgatggtcgcgagttagcaaattcttggaacattgaccaattacataaattctatgtataagtcaatagtgtccacacttgtaagacatcttacaacttcaataaagtctgttttaaggcacagatttcaatcacagtgccccttcccgatgatcccttacccagacgacacctagcgttgaaacccatcctcatgtccctttatgccgttttgataaggcctccgaggaacctaagggaacttcggctggggacgtccagag

SEQ ID NO: 21110 - DNA, 21234 bp, Oryza sativa
cggctgggggctaggatcagtgcttattcaactaaggcaagtcgaaggtccaagagccttatcttccgagaggagctctccgacgacaaggctgggggctaggaagagtgtataactcaagtgactgatcgaagtcgcgaagtgagaagacacttgagcacaccgcatccagagtaagaaagcttagttagatagatttcccttctatttcacaagcatttcttacagattgcaaataattccaaaatatattacatttttcttaagatgtttgtcacagatatacaagcactaccaggaaggccaacgccagtccattgaccgaaagattttctccgctagcggagccatcgactttgctaggttgtctatctccgcaggactcctccgagaacgggaaaacccttcgtgaaggaactcgaggtgcaactgtggatgatgatctcgtatacacgccagcacgtgccctccggcgtatcggctcgatcaacgacactcctcctgtttcagggcctcgtcgatacgcccgccgatgccttcaagctgagcacaagccccgttcagccacgagatgtagccagccgctgactcctcgggatccccgcgaggtacttggagctctctacagacaattctatgacatcttcactctcacattcactaattctattggatgcatgcattatatttattaagataacccaaactacaagataataataattatttcttggtctttggatcaagggtggttgtgccttatattttggaatggatggagtatatgattatactccgatgtaaatatagtttttcttgtttttgttgtaatagattgtgttaatgttgcatatggtgtagtctgtaaagtttctataagcattttctgatatttcactattattatttggaaatggtacacatgttttataatgttttgtttagttttttatgtttcaatgctttttgaaacatcttgatgtttcatgcgtaatatactaatgcttcaataaaattatatatttgcaaatatattttatgtttcaattttctagctagttggaactcaatgtttcatatagtggtttttggtgttgcggttagtattatttttgaatgttgtatatctctaaaacatttcacgaagtgaattgaaacatttgaccaaatgatgaaacaatttttaatattattttttattaaaatataattgtgcaagatcttattgtaattatttaattgtaatgaatacaatgatataatcggaatatagattaggtaagtggtttagcataaaaagtggcttgaaacttactactaaaaaattagttttattaaaaaggagatagatgaacaacttttgggggcatgtagtgaagccaagtacagcagcacacctaggggaaggtggggccgatacaagcagcaatccagtactaaatagatcaaggagccgcgtagtagtgataaggtacccgatttttggagaaaaatagggcgtccgatccgtattctcctcgacaaaatggtgatggggcaaggagcggcgtcttcaaatgatgctcaaatcttagtttttttaggactctcagaaaagaaattccacaagtttttcctagaaaacttttaaatgtaactaaagtataataattgtagtttaactatttataactacatctttttatgtaacttatatacaagtattaaagatcttctgtcctataaaaaaaccaaatctaaagatgattctggacataatttaattatactatagaatttgtcaacggtgggtacccgtagaccggatatagagggtattggggtacgctggtacgaggatctacgtaatacgatatcaaggaaacaaaagacaaagattatactggttcagtccccttagcaggtaattgccctaatctagttaatatgggattatatggaaagaaccacagattacaaagggaatagtagaactcggcggtaccgacgagatcgtagtcaagttgattcgactagatcactcggcgacttggcccctgtagtcttcgacttcgtaggctgtggtcattgtgtaagctctgagattggatgccttaggtcccctcggggggtccttttatatcgcaggtcaggcggtctccaagtaggacttggagacatcggaccctgcacgatatagtaatgacccagtcctatacgggtaggaaccttcccattggtagacttcgtgatggatttccttagcgtgttcagagaacgtccttatatgcgccgatataccatattgccgtatagcgtacatccaagggtagagggtataccttatccgtaaccctgacagtgagcccccgacttcttcttaaatgaactcgtgtaaccaatcgcaacttctgatgtcaaagttgttgtcgttctcgactggtcgatctcggtgtgaggaccgtagagacaaagagtgatcgacaaccccatgcgaagtccaacggttatgagtgaatttaaattgaagtccaagaaaccgcttcgcgcaatggacccagaaatttccggcggccatttctctcctttccttggaattcgcaccgtcggtagtgcgcctatttaagggagttttgggaatccattttggggtccggctgttgtgagaactttcttgcctccaaatgctcttcgtcttctccgtttccacacaaaccctaagttcgtctgcctcagcttcttctccggcgatctccaacggcgatggacctcgacaagtccacctccagcaacgcgtccttgaagaaactgcagaaggagggcactctccccggtcacgggaccatggagagggaaccgggaggtactgaacctgaacccgtcctaggccgcatggttgcgattgaggactacattctctgtggttttcttcctccgccttccgagtttttccttctcgtcttgaacttctacggtctttctctgcttcatctgaactccaactccatagccttcctcagcattttttctcatctctgtgaggcctacattggggtagagccgtttcttgaccttttccgcttttactacaagttgcgctggatggaacccaaaaaggtatccgggtgtgtcggtttctgacttcgggatggactgaagtcgcgatacattcctttccagtgcccctcgtctcgtagcaaatggcgggggaggtggttctatcttcagatagaagattcggatccaatcttcattgttcatgaggagcaaccagacaagattccatcttagaccgccaaacccgccttgaccccatccctccaatctttcatcgatattattgatgacctccgagtacgagggttgtcggggtatgaagtcgctgccgactttgttggtagacggacccagtcgctccagactcgagcccatccagcctttgactactctgggccggaggacgcgacccgagtttctactcggggtatttttcttgtattttgggtttctctccttttaagtgcattcctcctgacttgtcgaaacttggttctcgatctgcaggtctgagcagcgcaaccgtggagcaccgtgttgcccaggtgatgattagcggtcccacgatggcagcaacgtccccacccctctttgcgagagggaggcggctgagcgtgaagccgcgatcaatgtgagtgtagtcgatggtcctttacccttcaattccttgatcgtatcgtgacttcatgttgtgcaggctctccccctgactgacatcatcgggccactcgtggaccaccagacggcggcctcgttgaaggagggcgttgcccaggaggcgtccgacgcagccgttgccgctgctgctgccacaaccagtggcggcaaggttccgaagaaggggaggaagttttcctccgtgcttggcaaccgccggaagacgcccgctccatcggtaagcttcctaggttattgatttacatagtcggagaatgtcgccctcatgtcgtactcggtttacttaggcctcggatgcgtctcgcccgcctctgcgacggcagaggctggtgacgctcggcaagaagtaagtggacgaaatttgaggctcttgacttgatcggattttatcgtcttgttgcgatgaccgacatggtcgtctttcgtagggcgcaggcgaaggcggcgcaagatgggtctggagcaaactccagcgcgtctcctgcagtggcctcgaccgaggtcgtggtcatgcctaggagccgcgaggtgacacccaacggcgcagccagcgacctcgcggctggtcggggtccgccagctgccgtcctcacttgggaggagctccaggtcgagatggggtgcatcctcgaggctggtgctcgcggcattagtcgcgagatcgcggaggcgagggcggcggcggcgtcgtcggcgaatgagcgcgccgactagctgacgtgtgatctggcggaggttcgcgaggacctccagaagatgagggagctagtggccggcaacaagcgacaacggcaggggctcgagcaccgtatgtcggacgtcaagaacaacctgtcaaaaatccgtggctcactgcaggtcacctacactggtctgcaccagctcgtcggggagtgcggtgtcacgaccaccatatcggcgaatcccgacgagttctcgctaatgacctcgcttgcggaactggcgacagtgatggaggcgatcccctccaagcacgcgggcaggatcagagaggagacatccaacgggatctataccggggcgtgccacgtccttgcatgtgtgaggctggcgcaccctgaactcgatctccataagatcttagatcagggggcggctagcgacgcgcgcaaggatgtgatggaagaagtcggcgatctaggggagtccgtcctcccgctttttgaagagtagggccgccgcttgtctgtacctcttaaccaatcacgctttgtaaaacttttcgttggttccgactgcttttgtgtgtgcaatcgtcaccttagttttctttggcgttttgattccgggtactttgtttgttgtttgtagagatgccgatgtcgaggatgtccagtagcgcgggcagcctgaattgcctatagtcgttccggcacttgagcttgagccgtatgtgccgctggacagcgtagaccaggatcttcccggggagatggacgtggcgacgactcctttaggttggttcttgtcgtttccatttcctttgcctcttctgtctcgattagcttgacttagatatttgcatgtcaagcagacctcgaaagtgcgcttgctgatcgcgaccatcgcatccagtactggaagacgaagttcgatgtcgccgaacttgagaggactatattggaagtgaagagggaccgggccgtggaggcgctccgaggtcgcgaggtatggttcaactcgtacctcaggagctgctgtgtgaccatggccgttgtctgcagagagctccgaacaacaaaaacaagaaaaactatatttacatcgaagtataatcatatactccatccattccaaaatataaggcacaaccacctttgatccaaagaccaagaaataattattatcatcttgtagtttgggttatcttaataaatataatgcatgcatccaatagaattagtgaatgtgagagtgaagatgtcatagttaattgcatgtatgactttatattatgaaacatctaaaaaaagtggttgtgccttatattatggaatggagggagtaagatcttgttgtgaagaattaattacaataaacacaatagtcattgtgtaatcgaattgtagatcggatatatagtataggagaaaaagtctaaaaatttgcgaaatcttttatgcatgcatgtattgtggtagtcaaaggagacaggtgcaacatggtactaatgtgcatgcagagctgctaacttacagtgctatgtatgcatggagagagaaatagggaggtaccgctgaggttatcaatatcgggatcctaggtaatatcgttttgctcaatgtagtattgtatcgtagtatcgagatactatgagattttttcttttaagtttaattaatatttgtattaattacatatagccattctatataaaaaatatagtaataatatatgccatgcaaatagagatatttatcaagagaaaccacatattcaactgatttttatgtaaacttgagcataattagatggtttaaaaataatgtaaatagtagctaagattatttacattatttacaatcttaaggattgttgaatcgatacaatagctaagattttgtaagatcgtgtggtaataaataatagaatcgagatattatgaaagttaagatattagatggtgtcagtatcgctttgactagtagaattgtagtatggatacggatcgggagacaacctcgatttttcatatagaataatttaatcgggtacctgggggaggattgtagtcggagaaaggccatttctgacatcctctcatcatttgggcccccctcgcatttcgggcaacaaaacggccttcctgacctcgatcagtttgggcccccatctcagccagccagacagcccatgagtacattctagagacacggcggaaggacgacgacgtcagtttcttacccatctactatggcctatttaaccctgcgcccaatccaccctcatctcggtctcctcttcctagtactagctgcgcccccccccccccccaaccccctcgggcgcccgcttcgctccggcgactccacccggccgcgccgccgggatccgcccccccgcaggccgcccctcgtcgtcgtcctcgctggttccccgccggccccggcgccttttccttctgatccagccagccgcgtcgcgcgcggcgccggggggcatcgaattcgaatccgcgccctcgccgtcgtcgtcgccgccgccgccgccggacaatccggcgcctgccccctccgtgctccccccggccagaggtgagacccccccctctcctaatccgggttgtggcggctccgcgggttgctttcgcctcacgcgggtgtcccagattcgcgtcgctgtacctgtcgaaaccctagatgggttggtggggggagcctgctgctttgcattcggagcggggatttccagtggaggggtctgttgcagcgggaattttggtcgattgttgcgttgttcggtgtatatttggttccgatcggggtgcttaattggttcgaggttgaacgcgccgtggagaattctcgacgagttcttgaactgaccaagttgttggctttgattcagggattgcgggactgatacggccgggatcttgctggaaatggggggttacgagtacgcgaccaatgtaagatctgttcttttgcacgatatatcctgttcagttccattttggatgcgattcttataaacagtaggaatcaaactttgctgaatactacgtttataatcatgagtatagtacctaaatcctttgaaagaacaataggaacttgagtcatttcaatgtgaaagcgcttctatttcccatgctgatgacgatcgatcatcttgaagggttatcatcggggaatggaggatgactatgaagacgagtactacagtgaagatccatatgatgaggaaggggagggtgctggtcaagagtatgccgaggaggatgacgagccgccggagggacagcaagagttccttcaaattagagaacgattaaaggagcagattaggcgaaaggcgcaggctgctagtgctagcgctgctggccgctcatcttcctcacatgatagaaaacctcaatccacgtaagtgttaagtatgtctcttctacattttgattgttatgcaattttgtctctaggatcaataaacctctgttaaactttctcaagcatcatatttgattttctccaggaacttgaataatgctgaaatttttagttgattgaaaaaaggtagtcaatgtatggctcctttatctacgtcccatcacaatctttagcatgttaagtttagttcatcaaaacttgctgagtatttttcatttgttggttacattgtttattactattgctttggagcctgagagttatcagttaatacattccccggtacatcctttttgaaatgttgtatttgaaattggattgtttcatcatagttgttttttaatgcgaacgtgtcgaatcaattttcgtttggattcctgcaggaaacaaaccgtagatgcatttgggtgggggtgttatttttaaatactacaccacacttgtatacattatgctattgctctactctgcatactttgtattttctgatatgtgaggtcaaatatcttttatgttttctccaagacctttgttatagttatgttatttgtgtagttttggatccttctttgggccatccaagccggtgatttcccagcgggtaattgaagaaagaaaatcactgaaagaactacagaacacagcgtcaatgtccagggatcgaaggccttctgcagtatgtagccctacatctgaccctaattatctttgattcaacttttgtaataattgtgtttaactatgtgtagaaggagataccatcatcatctaaagtgcaatctaaaacaaatggacatcaccacaaacagaagattgtaaatgaggtacaatgaacttctctttcattggatcatttttatgtttgctatgttaaaacttgagttgtgtcataaaatagcagctggaatttgcaggcaaaaagaaaggctgaggcacttaaggataatcgagactattcatttctactgtcagatgatgctgacatttcaccttctccaatggagaaacctgtggctaggtcctccttgagtcagaagtctggtgagtgaattgcgatttcactgaacttgttctttaatttttagtgaagtaatgctaatagttggttcgttgacatcgaagatcgcgagtcgacacattcagctgtgaagagcagagcaccgacaggccaaactgctagattgtctaatggatatggattgaagaacacattgtccagtcagaggcatactgaaggtagggtagattccaacagaaaggtggctggtgcaaacagagaaagggttgtcttgcctgacaatggaagaatgcatagtgtggttagaaatggatccacccaggctactacaagcaaagctgcaagtcaaaagcttcctagcaaggctcctattgccaacaggcctcctataaagagtgtaagtgatcaatctcttagggcaaatcattcagcttcaaagcaacttttgtcacagaatgggagaccacaatcctcacagagtcagaggatgcagtcgacctcgcatggtcagaggccacatcaacctgtgcaaagtcagtggccgctgcagtcattgcagggccgaaggccacagcagtcaccacaaaatacaaggccacaactgatgtcgaagagtcagagaccgcagcaatcattacagagacagagaccacagctatcctcacaaaatgagagattggaatcctcggagaggcaaaggccaccttcacaaagctacaggccacagtcgtcgcaagggcagaggcctagttcagtacaaggccgccagtactccgagcaaagaagaatccaggcaaatgatagagtaaagtcggcagaaaggcagataaggcctccctcgaaacccatggtaatacttctgcgaagcaaatttgtcagcttttcctttgttgtcatgtttcacatgcatttgggcaattatttaggatcatatgtttctctgaagcttatttcttcgctatcatgttcctgtagccatcacgacaaataccttccaacggaatgcgtgatgcccatgcaaagaaaaagcaaccgatgaaacgaagatttaatgatcttagcgaagatgaggaagatccgttggcaatgatcaggagcatgtttaggtatgtcagtttatgaatttcttgtatgtggtcctttctgcacaagctgggctagtcttatatactttgttggctagtgttttagttgttattgagtgtctacaaagagttggaatgatactctgaacagggaccttgcactagttatgctaagcattgttttctgatttcaagatctgctgaaaagatagatcaggcttgccattatgcatttcagtttggtgatttcttgaaatcaagtccatttgctttaaattttatggcatgcgaatgagctaattttggactatgcttccatactattttttgttttgaaggacactatatgaaaactttggttgtcctgtgcaggtatgatcctagtaaatatgcaggcagagatgacgatgatagcgacatggaagcagattttgctactatagaaatggaagagcaaagaaggtatgtactcccttattgctttctaacacaataccttcttttcatttagaacattataatctgttaaactatggtaagtgaagaaaaatagggatcattaaggattatcttatattctgcctcagtgaggaacataatggaaaaagaatgcttattttcgctataatattgtactatcacatgctaatttatgcatgattttgcgctgcatatgcacttgatcaagatgcatttgacatcatgattgagtatcatttccagaaacttgaactgcaggactgctgtacattcaaattcacttgtcatatggatattttgcttttaatctcttaacttattagctttttttttgttacctcttagcgcgagaattgcaaaggaggaggatgacgagcaacttcgcctgattgaggaggaagaaagacgtgagcaggagaggaagaggcgaaagatggcgcgtggccgatagtagcagctaagttgtacaaatgcttgagttacagcttgagcaaggcttgaactgcaattccacggtcgtacgggccatggtgcttgcagatgatagcacgctttacccccatttatttgccgtgcgatttctcaagagatctatcaagaaaaaaacggcagggatcaagcaaaacggcaggagaacgatgctccaacgtaatgtgaagtggtgtagcttgtgctgaaactgttagctgtgccaactacagatctttttgatgctgacgctgatcgtgcagaaacttctcccgtgagggtgtggtgatgccaacgtccctacaccttgtcactttgttgggttgtacatgatattcttcctcatgtagctgattcgttctgttggtcgagtactaaagatgccagaaatcaactggcgcctgtccgtgtttggattcgatttggatataccggtgttctaataaacaatgttttagacaattattactggactggttgaatgaattattgaagcgattatcggttagccggaattatcgccaccgttttctgcatataaatgataaacgtctgattttatggtttgtccctaacgaggaaatgccattgtataagcaattttgttaccgtagtattttggccctgcgaggaggaccacgcaagaacggccgacgcagtagagtgcaacggtctcccagagtatgaaaccacggttctgccattttgtccgtggatagcgctgcatcagattcactagaaaggactttgcccaaatttttttcctctttgggcccttacatcttcaagcgcgcacctctctctaccagatgtttacggagtttgctggccaaaacaaaacaaaatcgattgtaccatagcatcttagagaacttgcactagcctataatgagggcgcaatttaagggcgaggtcaaactctaaataacccctccatgttgttattttccactaaattctcatttcataagggtattaatttctgtattatagtggatagcatgaaagaaatagctaactatactcgttccagtttcaattttggagtttttgatgtacgaatagtcgctaggatactgccagcgcaagaatgttgtaacaattcgatatttacatgttaatttagctattcaccgattgcatcactgcaacaacatgcccttgttgagtaagcacatgctgcgatttcttcacattccctaagttaaagtctaacttctttcatgtatgttagtacttctcatcctttatatttgaactttaagcttcttccttttctttctgaaattcttattcttgctgtttttatacctgtaggcgtggaatcatgcatatgctgctctacccgcggtaagggcctacttagaaacacagttttagagcttaaaccaatataaaatacaggcacataaacatttttcagttgggcccataaaagcgcacctggataggcccctaaacagttttaggtgagtcacctctctttgcactgccgctgccattgtcacttatctacgttgcttcctcctaggtgccgccatcaaggagcattcgatctgtaccagagatgtctgaggggatcggaagatcacttgatctgcagtatggcctaggggaggactcatacaccaacgtgttgttagcattgagtcgctactgtggcgatgcagatgcatgagagcaagtactgtaatggtaatgtttgatgcgttgcctctaagaatatcacatctgattgggtgatgagatggaggctctgatgcgaaagttaacaaccacataaactccaaaaaaggtacgagaggaatagaggcattggtatttatatatttgaggtgaattactgtatacgttgcttcttaatttattggtggatgatatggataaaattaaaggcagtagttacctctattatagaacttgctctgatcgatgcatctactcccgtttgattctttcgctgtcatcgatgcatccatctcttgtcaattctttcgtaattatgtttcggtgttgtttttttatttttgatttcagaaatatgcggatcatgttcagaacttcaggtactctgcaatgccccgtaggttttaactgtattttacttcgatgtaaacatggacatttgtactcaaattggaagcggaaaaacagagtaggaaaaatataagattttaataggaatgtaagtgcaaaatagaagattgcaaaacacatgaatagtcgtttgattagaccgcataaaaatactgcaatcgaatgagagagatagatactcaaaggaattttccatgatgttgaagcacttgctaagtttcttctaaaatctacatgcaatgagttattttataggattttcataggatttggacagctccaatcctttgtgtcaaatagccaaataggatttgaatcctttaaaattccatcgtaaatcatttgattcaaagtagtcctaatagtctttaaagtgttctatttccggtttggtgaaatactattgactgaaacactccgcctgttgttgatgttgaatttactggaaaaagagaaagatggaacatattttttttattgaattcatgtacatacagaaattattccacataacaaaattactaagtttacaaccaatgttttccatgtacacactgttcacaggcaggttcagacaagtacactctgatcaaactgttttgcattttatgacaaacacttggcacaccattgaaagtagaaaagtagtagtaaaggtgatactagtaccacacttgctcttttcagatttgttcttcctgcttctgcagaggtttgcgagccaagacgaagaaaaggggtgtaaatatcccttccctgggaacaaaaaaatcaccattcaatcagcaatgttttgtttcaagttggacatgaattcaaactttattgcttcaaatttgctcgaggatggcagggctgatcgacttacttcccgcccttcacgagggaatcgaccgatgtcgcaaggaatctgcagattctcaggcttccttccggggcaagatggaggaactcaagccacttcaactgtggatttttcgcaggtaaaaagaagtcaattgtactgtacagtctctcccaagaacatgctaaaaattcagttgcttcagtctgggtgatgaactgcttactaaccagtgtttgaccgaggaagcggccgatacgggtgaactggaagtgtgtgagcgagagctggctgggatcaagaggctggtaccatggcaacggcgattcctctgccatatccttcgccaatataaccttcataaacacaagatcatagagttaagaaagctttaatctgatgatctggtcataaataaatgatttgccaatttgcaggtttgaagaattcagaagctttaatttgctgggctctgaaattaagatgcaattaagttcatttgcacctcaaagcctgcatctttcagagcctggatgcactgcctggtggttctgatgtccggcaagccattgccgagctagagctcccccttgatgctcaggtgcctcgcgttgtcaggatcatacttgtcagtcaggcaccactcgtccatcgcgaacaactttcccggtttcaacactcggaagatctcactgtagacaccgacctgaacgaactcacacaccgagaacgattttcattttaccaaatctgctggagatatgataaattaaagggaaatttttttttctttgatctctgtgagctactatgcatacagcgtcaggggcgtggcacgtcgcgtcgagggcgtaggctgcgtcgaaggtacaatcagggattggcatgttcatgaagtcaccctgcatggcaatttgttttttttgttgctgaaatgatcctagaatattgaaatggtggttggagggtacgtgtctaccttcacatagttgcaagtttcactcaaaccgacagaaaagttgagttcctgaaattgaagatcaaatttcaactgtttatttcgccatggtggcagtttcattttttttttccacttgaaggagtatattatgactcccgacaaaaaagttaaaaaaaaaagaaaacaaagaaacaagaactcattacctggccccttgatatctggtagtcattgttgttcaatccagtcaccgatgctgagctaaatttgggtagcattgaattattgttttactaaagtcaatttacacatgagcataaatttgtgtggtgattatagaatcttcattacctgaatctggcaattttctcaagggccctccaattccacaccccacgtctaggacctgcagtatatacagagaaggaatgcatgattcaactgtgtcatcagtagcaataatcacattgccatgtcccatcgcatgcaaggttgttaattaacagaacattgaccttcatccccttcttgaggccgagttgcagggccagaaaatgctcccggcgcttaaggctttcgcgtaaagtttctccatgccatctgaaaaaaagattcaagcaaacaaaacttattacaacttgaaatccatctgtgcataaattctcaagcattttattcttgcgtgtgtacagaatatttggatcagatataaacatctctctctatcttatggtcacacaggatggtggagagaaaatagaggcccacaaaacgcataaactatattgaccagcacttgcttgattgttggataacatcagggttcaccgaaatgctcacgtttcgcccgaaaatttcggttttttgcaatttctttttttgaatttggtcaaattttattcaaattctgtcaaaaattcaaaaaattccgtagaaaatttttctgaaatttccaaaatttcagaaatttcggttctatcgcccacctgtggtagaagtgtcagtttcaaaatttgaaaccctggataacattgacataactcaagttgctataagtatggacaacaatttattggccacaagtaaggcaatgtctggctagacaataggtatatggtatacaagccaatggaggaacaaagtgtggcttatcacaattgaaacaaacaaataaaaactaacctaataaactataacatgtctaacatttgacgtgatactgtgtgtctgtgtggcacttaaccaaataacctctcaagtgcattgggtgcagaagagcgatagagcctagcttgtttcttgtgctagtgctccacgacagatgaatttccgactctcttctgatcgctccttttgtttctctcccttccatataggattgtgctaatgtggaccaatttgtatagcctgctgatcagtgatcactcaaccttactatacttgctgtgcaagatctctcttacgctgtcacaatcttcacctgttgctatgtttggtatgggcctaccaccaataacatctatctatcttctattatatactaaaaatctattaagtattctataaatgctccaaagccatcacgtggcacttctacaagcgctcctaggccgccatgtgacattctacaatcccaccatcgattttcatttaaaatggtggactcattattttaaaccgtcggattagatctatttgaaaagtttatgctttctatatccgagcaatttaccaaaaatacttatttacatgaaaatagttacgtaggatggaaatacttacatacgtgtacgtatgaaagtaattactccatccatctcataatgtaagactttctagcattactcatatttatatagatgttaatgaatctagacacacatatatgtatagatttattaacatctatatgaatatggacaatactagaaagacttaccttatgaaacggaggaagtacatacatatatgaatctttaggtactgtttattaaaaaagaaacaaagaacatacgtgtgtacgataaaaaacctatagagacaaaaaaaacattgataaactgttcacttggatggaaatatacaaaggaacatgcgtacatatgtacggtgaacgcacgataaaaaaaaatgctataaagccttaaaggaaaatatatgtacgatgttataaccatcggaaaaaaaatagacggtctttttaaaataagatcttctatactataaaaaataaaatttattactctataaatatagtcacatggtgcttccataagcgctcttaggtcatcacgtggcactgtgtaatctcatgtagcactatatttaaatttatggatccgttattttatacctttacattagcttgcttcatcttaacactggtggagaaaccatctttggtcggtcgaccaaattccacaatagtcccggatgcaataaaaaccgggactaaagatcatttttagtcccagttaaaaaatttttgatctttagtctcaattggtactaaagatcatttttagtcccggttcaaagaagttggtgggtggagtcaagctccaattatctttagtcccagttggtataaacaaccgggactaaagatctatttttagtcccggttgtttatacaaaccgggacaaaaaatgaactgccgagccgcgcgcatgccgctaccctctcctcggtacccggtacccctccccttttttctctccttcattttaagactccctctccttttccattgtttaattcctcggtataccagcctcctctccttcatctccccttcctcccccttcccctctcctccgattcccctccccgcctcctccgattcttctcctctctgctgcgggccgggcggcggcgacggaggtagccggccgcacagcaggcgcccgtgcggtggatgggtggcggcggccgtgcggcagccggtcgggcggcggagcgaggtggccgcgcgacaggcggccgtgcggcggacgggaggcggcggccatccgggagccggtcgggcggtgacggccgtgcggcggtggcggagcgaggcggccgtgcggcggccggtgaggccgcgcccctcggcggcgggcaggcggccggcggggccgctggtggcggccggtgggccgcgcacagcagcggcgggcaggcggccggcggcagcggcagcccgtattgttttttttaattatttgtgatttcactgatgtacttttggatgaataattttgtgattcattgcatatttgtatggatctgcgatgtatttgatttgtttgtaatttttataggatttgtgatgtatttaatttgtgtgtataagtaactttgatttgtgatgtagatttgagatgttactttgagttttggattgggggtttgatttgggagaaaatgaaaaagaaaaaaaaagaaaaaggggaccatctcactgccccaaccctctctttagtctcggttggtgttactaaccgaaactaaatatcgatgtttagtcccgggtatttgaaccgggactaaagatagattggtagtcccggtttgaaaaccgggactataggggggttgcgaaccgggactaaaaagcacttctccactagtgtaatatcgtctattatatactagtagtccattaaacatcctacaatcgtactcaggacaccacgtagcactcctacaaatgctcctacgtcgccgcatgacattttaataaattagaaaaatcacaaaaattttgagaataaacaaaacatttggccgtcgattttctgtaatatacggtggacccattgttttctactattaaattatttgtccaagtaaaaaaggaataccacctatttcttttctctcctattttcctctattagaaaggtggaaatatttttttaccaattatattttgtcattatatttatttcaccaaaaagaaaatgacaaaaaaaggcccgcatatctcatccccgccagtccagtacgtacgtgcgtgcatacctccacacctatttcctttctctactattttcttcttttagatagatggaaaaaatattttatgataacaaattttaaacaactgtattatctaaatcatatagctaattttttattggtacactccaatagattatttactattatatattttaagattgaagatccaagtttgggacatatattattaaaatcatatagctaatattattatagaaattcattaatttgggacatatatattctacgaactagctatggttcactcatccataaatttttaagaaaaaatcaaatagatttttaaatcttctgattaataacatgcacttaaattataaaaatttaagtagtttaattagaaaatacaatacccaaagtatttctagtagccgtaagataaattgtatttataggatccattcgatctatcttgaaaaacaataatctcctcgtatcctcttgccttaaatatacctctggccctccctctctgactctcccatcctctcctctccagctcaattatcccatcttctattttgttttaactaacataatataaaaacagtcatagctattgttttattttataactaaataaataaatcaagatcacattagctatattttactatacaaaattaaaaatgcatcatttgaaggtagacactatcgtttgcatgccaattaaataacaacgaaaaaattaattaaaaatatgtaacatgttgaactaaatcattgtacataacaaaaatcaataaccgccctctagaacgctcatgactcattgtgtatcatatcctaaaattctaaaaaaaaatccaattaaattgttgtatccattatttttaaccattataagatatataaattttgtgaataatgttactatcactttatcggatgaagaaatgaccaaaataaaagttatagatattgatgagttgtagaactttaatgttgatgacttcttcagttaaaatcatttagtatttgaaaatattgtttgctcttgtcataatttgaaattcaaattcaaattattgaaacagagtcatataccaaaataaccaaaacaaaagttgtagataatgatgatttatacaactttgttgttgatgactttttcagttgaaatcatttagtatttaaaaatgttgtttgaagttgttataatttgaaattcaaattcaaattattgaaacagagtcatatagcaaaatgacccaaacaaaagttgtaaatattgatgatttatatagctttgttgttgatgactttttcagttgaaatcttttaatatttgaaaatgctgtttgaagttgttataatttgaaattcaaattcaaattattgaaaccgagtcatatagcaaaatgaccaaaacaaaagttgtagatattgatgatttatataactttgttgttgatgactttttcagttgaagtcatttagtatttggaaatgttgtttgaacttgtcataatttgaaattcaaattcaaattattgaaacagagtcatatagcaaaatgataaaaacaaaaattgtagatattgatgatttatataattttgttgttgataactttttcagttgaaatcgtttattatttgaaaatattgtttgcatttgtcataatttgaaaattaaattttatataggtcaattaaactcatatggagaaataaccaaaataaaatcggtagacctcaataagttatacaactttgtttttgacaactttttcacataagtttatttagtaagacaaaattcgatttgaaggtttaatatttttgaaataattgaaaatagggaggcagaatggacttctcggcgagagatgagcaaaagggctggcccgtaataggccttttgctcctcactcaccgagaagtctattttacctcccttctttcaattaattcaaaatattaaaccttcgaatcaaattttatcttactaaatgaacttatgtgaaaaacttgtctaaaacaaagttgtacaacttattgagatctacctatttgattttggttatttctccatctgagtttgattgtactatataaaatttgaatttcaaattatgacaaattcaaataacatttttaaatactaaatgatttcaactgaaaaagtcatcaaaaacaaagttgtataacttatcaatatctacaacttttgttttagtcatttttctatatgactttgtttgacagtttaaatttgaatttcaaattatgacaacttcaaacagcattttcaaacactaaatgatttcaactgaaaaagtcatcaatattaaagttatataactcatcaaggtatataacttttatttgggtcatttcttcatccagcaaagcgacttgtaacattgttcacaaaatgtacatatctctctaatagtatatac

SEQ ID NO: 21111 - DNA, 7933 bp, Oryza sativa
ctttgccggatgaagaaatgacccaaataaaagttataaactattagagagatatgtacattttgtgaacaatgttacaagtcgctttgccggataaagaaatgacccaaataaaagttatataccttgatgagttatacaactttgatattgatgactttttcagttgaaatcatttagtatttaaaaatgttgtttgaagttgtcataatttgaaattcaaatttaaactattcaaacaaagtcatatagaaaaaatgaccaatactaaagttgtagatcttgatgagttatacaactttgttattgatgactttttcatttgaaatcatatattgcttcaaaatattatttgaatttcttatattttaaaattcaaatttttcatagttcaatcaaactcgtatggagaaatgtttaaaagaaaattggtagatctcaacgagttctacaaaaatttttcatatgagttcatttaataccataaatttttgattcgaagttttaatattttaaaattaattgtttttcccttctcttcccttcaaattttttcatctccccttctcactcactctctctttctatcatctcccctcactctctctttctctcctctcttgctctccactcctcctcgggcggcggtggcaggagctggcggcgtcaaggggggctctcggccgcctcgggctctggcctggagctggcggtggctggggcggctctgcctggagctaacggcggcgggggcgacgacctcggcgaagagtgggcggtggcgggcctcgtctcactcggatccggaggcggcaggccttgtcctgctcggatccggcgacggcgggcctcgtcccgcccggatccggtagcggcctcgggggaagagtgggcggcgacctcgttgaccttgggggaagagtgggtggcggcgccatcgccatctcctcctcaccgccgacgacgaggaggtggccagatgcagccccttcgtcgccgcctcgccgccctattcatccccccaccccccggggcgggtaccggcgcctcggctcctccgcctccgtgtccacgacaacggatgtgatttgggtggaggttgggacgacgaagggggataggagcttattccatgtcgattcggccgtgcttgagaccgggtcggtgcggcgcttcctcgcggtggctgggcagcgggcccgcggcggtgcggtggcggtcgccatggacgcgctgctgttcgagcacctgctgtggctgcaggcggtgggtacatgagctcaagcttgccatgaaggtctggatccagtgatgttgcattgccatgggctattgctgtgatgaattctccgttgtttagtagttctttgtctctgtaattcatatttggttctttttgctttgtgttctcttcagccggtgcaattcttctccagctccagtgggctggcgccccttctgcatctcgatgtggatgggttcagtggcctcttaccctaatcccccacctcgtgctcttttctctcgctcttcatggcgtggcaaaccagcgcccagcggtgccgccgtgctgcgcgtgtggtggcctgacgatggctcaaagcagaacatagcgccagatttggtcaagccctccagattttccctttacatggtgataaaactagctataatggttgtatttttttggtcgaactgcaaacatttcagtgttggtatcgttgcatgaattttgtttacgaatgttctatggttcacatgtgcagctgcccattgccattcttccttctctgacattatctatgaagtatgtattttttttccttgaagatttatatatcctgattgaccaatagaacgcctttttttttgcaaaacccataaatgataaaagggtttcatacttgccagatattttgaagaatatcttagctgatcaatttacctttctgctacctaatgccgaaataattagtttagtagagatgttttagggaagccaattaattcggttaatggctttgtggtgatcatttgaccctttgtgcttcgttatagatatgatcaggtgccctctgtaatgccattagtgtgccgcacaatgtgccaaaaatatgtttgccttttatctgtttacatgttcttgataagaactttttctcactgacaaccttgaaacaccacaagaaacacattggttcctatcaagtttagtctgctctagatgctttcacgttctactcatataagttctagttttacaatgtctaaaacaaacggtaaggcgccgagccatcgtcattagctaattaaaaagcagattactagatttgaatgtacattacagttgtgtttctatgtacaagaaggataaatattgctaatatctatgttcttttccagtttaccttctactctagatggtagtttgaaattatatgtagaatatgtttttagagagaaataagtgcaatctaattgtaaatgtgaatattgaatctgataattatttttgtcatatctgtataaaaatgattggttgctaccacagaaggtgctcaggcttgtgaagactgtaagtgcatgcttggctatcaatcagccttgagcttgtgctttctcagtcctaagcagttgcattgccatctcattttataacaatctttgtatatgtgagaattgccatttagcttaagtatattaagggtgtcactgctaattagttgcacaatagagctttgctgcacaaacagactgataatagagctttgctgcacaaattagttagctgggatgttcttatctacctgcaagtttcaagaaaaaaattgaaaatatactgtttatagatttgttttgctaaaatataccggatggagaatgatttgcacaaatatagtatcggtatcgcggcttggaagagcgataccgaggttcgcgacaacaaaatacgataccgccacgctatcgcactatcaactcgcgagggtgcatttgagctggcggtgtcgcttgtggaaacaacgagactgtcatgatatcgctctttcgtagagcgagagcgccacgtgaaggaattgatccgttgtcacgccggtatcacggtgtgcaagcgtgagagcgaaatcggtcttgtaatcccaacacgcgagaccgagcatgtcgcgggacccacattggcgaaacgactgggcgcgagtgggccgttggtctcgcacgcgcaaagtgcgagaccgatattggtatcgctgtcccaatgcgcgagaccgacggcggtatcgctctggcaaagcgagagagcgctttgctatcgctcaatcaaaaatcaataccggctataccagcgaatacgtgcatagccttagtgaatacggccgctgaatcgtgtccatgcaggccacaagtgaacatgccgtatatacgaatatgcatacacatatatatagccgtcaaatagatcatctagcttcttgttggctcatgcatgtatacgtatatacattagccaagcatgcatgtatatatggctgaacacacatatagatggacatatgccagtacgtgcatgcatggctcatgcattcaattagcaggtgggacacgctctcacgctgtcaaagcgcgagactgcttggggccccgccggtctgggttcgcgtcagacggccgcgaaatcgctctacgagcgtttttggaatgcgagaccgatgcattagcgctcccgcggtttcaattaacgataacgctggcaccttcactaatacattatgtgatatcgcgctctcgcttaaccaaagtgcgacggcggtatatttccgcaaatctttccctaatcagtatattcttacaatttcagtaaaaaaattgtatattttcaaaaaattttccaagtttcaagttgtacggtaggaaatcttactcctgttgtactcaacattgtcccttatattggctattccttgaaattccttcttttcatctattattatgctcctattatttgctttcctcaaagtaatctaccatgttagtgtatatttgtcccttaactgcatagccctaaatgaacagaggggcgcagcgaagcgcgccaaaagtcctagttcattttacacttggaattcctgccctaggaatcctgtgcattgtctgtttggaattccttttgcctgtaagatattaatggctgctaggagtacaaggattaggtctttctctaacttaagtgataagaaatcaaactcgtatggtttgatctttgatgattaattttcttttttataggtgcaaaaattagtggaaacttggtttgtttctgcttatcttcatttcagttcgttaacaacaggtaaccaacttcccatgctaccataaagcttcagtttaagacattgagtgttgccctctttgttgaaatcccattataaccaagttatgtatttgactatgttgcactcaccatattccttcaaacatattgtatctgctcacaaaaatattgtgcttgcaatgattgaagtactaagatcgcatacctataatctatacttaaaagatgcacaaccaatagtttaacttgacatattgacgttcacagtcctgtccattccaaaattttttgctgaataaacatcatgttggataaattatttggtttactttcctgattatgagaaaattactacgtgaacagtttagattgtttacctatcagttgtgttcttttagtatggataaatcattactttggttttggctggtacctttttgcttttccctcacatttagaaaaagaaaattaggagggaggactaatattgttgagtagtttagtgacttaatattgttgactcccggtattgacaataaaattgtatttttgcagcacatctcaagaagctatgtataagttgtagcaaaaaattccatttgcacatcaacaagaaagccttgctgtaattcaatcctctacttgctatgggtggaggatgagaagcatggagtgactccattgaatgtttgaaagatttgttttggttttctgttttcagatttcgttattaggttgaatctgagatgaactattgtttgaattctgttgtattctgattgtatctgttattagttgaatctgagatagtatctgttattatgtttgaatctgagatggtatgagaaattggattgaatttggtgggctcaaatttaatgggactgtttagtaggctttgatctgataattggttaacaaaatgggccaattttaaaataggcctattttaaaatggactagttctaaaaaaaatgatgggccgctgttaaataattaatgggccatcaaaacagttggttgccacgtcatcacacgtgtcaaccacgtcatcacacacgtgtcaacaaccacgtcacctgccatgttggccaccacgtggcaaccatatgtgacgtttaattttgtcacaaaggttgggcctgggctggactacacgagcccaaaagcatttcatgacggttaaaaaacgtcatagattgtgctgatccatgacgatttcggagaaaacatcggcagatttaatctgtgacgctcaatagatgacgataagtagaatcgtcacagacaaatttctgtgacgaattttaagtgatccatgacgaattttttcgtcacagattaaatagattcttgtagttgttgttgtggatggtttgagataatggatgatgattttgttgtcgtgaatgatttgggattgtggatgatttgggatgtcgggagatgatccgtgtatgagttcagccggaaaacaagtgcaaatagctaaaaacaataatctacaagcaaataaaataaaatgtctctactcccggttggtaacaccaaccgggagtagagatgcatcattactcccgggtatttaaaccgggactaaagatcatcatcatcatcatctctagtcccagattccttctcccggtttgcaatccgggattacagggggttgcgaaccgggagaaaagaggcattctccagtagtgagcatctcctatctctttaacgcaatcttgtgtataccctaatatcatcttgaatattttataaataattacattcagttttcaaatgaacagtcggaaactgctggactgggtgaaggattggcctaaaaaagttatgttatagttgaatttcactgtgagctgtccgttacattcgaccgtctgtatgttgcttgagacggttggtagccataactgtcacgcccaaaaattctcgaatagaattccatgcagaacgtgcattaaaacccctgtccaggactggccagggtacgcaaacgacaaagttgacataaacatccacgtcttacaaagttaacatcataaatgcagcggaaaattaaagataactagagctaagccttgacttggattgcagcaggaacaccacttcacaggcatcctcgacgacacggatgaagcctactcctcgaagaaaccaccatcggacgcatactcgaactgtaagggttgggagcggcggttgcggggtgtgtgggaggtggcgcgggagcatgggcgacgtatgcgcaggtgcgcgcggagagggcgggagcggcggtttcgggcgcggcggcgctggccggaggtgggagatgggcccgacaggtgggccccgccccacctgtcggtgacccggagaggggagggggtggcgcggcggctggctgggcctcggcctcgggccagcccagctggcgtgcgggaagaggagggggagtgggtcggcgggggaaaggagggaactttaatggatccgaccgttttttgctcaatataaactaattacgaacctgcacctcacaggcggcaatttttgaggtggacttaaagatgctggtttaagaactataccttagtggttcctaaaatgaaagaaaaggtatgctcaatgcatcggctcgaattaccatccatccatcccacatccatccacagcacaaattgaagaaactaaatcacatttttttggtacaaatgaagaattccatcactccaattacacgaattatttatatgcataaaaggtaaagaacaagatgaacagatcagaaaaaagatataaagtccatctgcacctcgcttggtgggtgggtggtggggggcaccgaatccggctacccccgagcaccaatgggaagggacagagaggaggaggggccacgctggatccgaccgcttgccgagcaccggatttggccgttcccatgtgctggtggggaggggcggagccggatctggccacccccgagctccaatggatgatatgaaggggcgagaggaaggttaaggggcggagccggatctggccacgccgccatcgccgtcatcttgcagcatggagggttaaggggaggaggaggaagaggaggtgcggcggtagttacagagagaggggtgagagaatgaggggcttgagagggagaatgaggaggggggagggcacgggagcaagagaggcagagaaaaggataaggatgactgggttggttccgctcctcacctaaaagttgtgattttttttaaagaaaattggtcacttttatcccgaccctactaacaactgctcccatgggacaacattctcagttggttttaatagggaacaacacttttctctgcaaggagttataggtgtcggttcatgaaggtatcggttttaatttaccgtatggtgtcctgcagttgtgcgtttctggttggaaaaggtaagtgttggtttttcttaattactgatgggtgaatagccaatatggtccctgaagtttcgcttcgggctcagtttagtccttgatgtttcaaatcgtccaaacaagtcctccaaattaatcatttgggttaatatagtccttggactcaaaaaagtgccacgtga

SEQ ID NO: 21112 - DNA, 7414 bp, Oryza sativa
atctaagttccttgtttttttcagtctctttttgtttggatgacaaacagctatacaattcttgtgtgagtttgtttgtttagtttggatgtcaacaactatccgattaatgtgtttacagttatgggagtataaccatttcttgcattctggcaggagaaattccagaactatctttccgttgaaggtcaaaggcttaggcagcaggacggagtggcgatgggcaagaactaatgaaagccatggtatttatctctctgtaccagaccaaattttcttctcctagagctatccctccaatggctttccctctaagctatctccaataaatcttgatgctcatggctgaagcttggaatgagctttagctctagtttttggctgctgcgcagcatttgtgtaaaacgattgacgatttcgctttaacctctgatagcccttgttttatcatagcttttaacttcgttttgatcaacttgtgtgacatgtcgatgtccaacttgtgttttgggtgctctgaatgaataaggtggtttcatttgatgggacatgtaaatatgttaaagggggtgtttagatcaggggtttaaagttttggcgtgtcatatcgagtattatatagggtgtcacatgaggtgttcggacactaataaaaaactaattgcagaatccgtcagtaaaccgcgagacgaatttattaagcctaattaatttgtcattagcaaatgtttactgtagcaccacattgtcaaatcatgaagcaattaggcttaaaagattcgtcttgcaaattagtcgcaatctatgcaattagttatttttttagcttatatttaattttttatacatgtgttcaaacgttcgatgtgacatggtgaaaaattttatagtgggatctaaacaaggccgaagttctagtcggcacctcctatgtgcattgtgctataatgggaagtcgtccaacaagcgccgtccgggtaaattgaaacgtttttcacgggcagcttacatcatctgctgcctagtgtatttatagtttacacggggcagctctttaaagccccccaccccaccccacccacccccctcccccacaccaccgtggtaaccataaagaaagcgtttcatattttatccacctaggaaattaatggtgagggcttgtgaaaattgtttttttctatgctacccctcttctctcgacgagacatcgagtaaactcgagtcccttgcatacttctcctacagtctgtttggttggaggaagtttctaggagggattgggagtttaaagggatgaggctattaactgttttgtttggttgggggacatgggaattttggtgggatggggatggggaattgaggaatgaactccctccttttcaatacctaggtaggggcaggtaattgggagggaattcctcctttacttcgcctaaacaaatctcagccatccattttcattaatgatataatctccaactaaattccctatcaatttccaccacctctaccaaacaagagactgggatgaaaaatcaaattcacatcttaatctcaccatcaattccctcatgtaaactcccaatcccctttcctcaagttgccaaacaagccgctagagcaagatgacggcatccccttcatgctatcacagatgaggtgcatgctggatcttctttcgtagatcctgccacagacaagctccacgccaccctcttccaccatttaattgtgcacactttgacaataatttctggtttgaaagttttgtaactaggtttaaaagtattttttttaaaaaaaaatgagtttgtaacggtcagatttgagttgaaagtttaatgttgtgaatagaaagtttgaaaatttgatttgaaatgttaggttttgaaacaaagtattaacagctgtcaatgaaagttctatattttgaatataaacttttgattgaatgtagaagtttcagggtgctatttgtaagtttccagagtttgagttgaaattgtgcgtgtagaaaaagaaaaatgttggttgaaacttctaagatttctttcgaattgctacacgcaaggcgttagaaaaaagggttaattagatccatactattaaaaatttactgattttgaaatatactattactatttgtgttttgtaacgatgccactgcaacgtattttacatgtattagacaaaaatgcccttatcttctacctctctctctcttccccatcttctacccctctctctctcctccactgcgctgctgcggcggccgcatcgctgctgcagctgccaccgccgcgccgccgctgctgcagcctgcagctgccgccgccgagccgtcgctgctgcgctcgccgcacagctgccgcgtcgctgctgcagctgccaccgccgtgccgtcgctgctatagcctgcagctgccgctgccgcgccgtcgctgctgcgctcgtcgccgagccgccgcgccgccgctgctgcgctcgccgccgagccgccgcacgccgctgctgttgctgccgccgtctcaccgctcactccgccgccatccccgccacatgctgctcgctcgtgctgccgccgcgcgcgctctttctgctgctcgcgccgccgccgcgtcgctactgcagctggcgccgctgttgcttctgccgccgccgagccgccgtcgctgctaccgccgccgccgagccgcgccgccactcacctccgtgcgcacatcgccgctgctgcgctcgccgccgctgccgccgacgcgccactgagaagaaagagaggaggaaggtgaaagagagaggaggaaggagaaaggggaagaaggaagaaggaaaggtggtagtttgatccaatttttcttggaaatgcatagaagagtcaagtagtggtatcttttgaatatatatgaaattatattggtatatttctaaatatatgaatactaatgatatattttaaaactggtaaatttttaatggcatgtatttaattaaccctagaaaaaaaggtttgcgttggggattctgaacaatttgaacctgaaacatcatagatggatgtgtgggtaccctggtatggccattcaccctgggccgttgtatttgcttaacaataatgacacattgtgtcacatcatcgaaaaacacctcggtttttttaaggatgggatatagattattttaaaagttgaggaaccaactttaattggtttcacatctaaaggaccaaaactaaaccaaaaccataattaagaaatcaaaatgaaccttttccttatatcaaatataggtatatacttcctctcaaaaattacaggcatataccacccatggaatcattcactctaagcatcacggtttttcttttattactgaataatgaagcccatgccacagtgatataagtaagaaaatcatagcatcgtaatgccttatttaattctcataaaaatttaggtttttatcagatgattagagccgaggtcatgggataaagccgtttgcaattacaatgcattgatataaatgatacaagaatattaattcgtgtatatgcgctagcagtcgaactcacacgtgtggttttgaccgcgtcacaactatagggtgagggttagtgtttcaggggtaggtgggggaggaaggccatgatgatgggaagtgagggatcgggtttagagggatagcattagaggcggtggaccgacagtgggcagtgcacaaagatggacaatgagctagtgttggtggctgggcaaagcggggtgaagaggaggatgaggccgggcagacagggctcgctggcacgttggcgtctttcggtgccagcgaggccagccaactacacatgaccaagataggggatgagtataaaaagaattgacatagtttccggatgatctcgtcagagtaagctcgcagaacgagaaggaggggcctcattggggagaggtcttcgccaaagaaaagccgctcgactacattctgttcttctttagaggagttcacgttcaccggagaaagggggactcacaagatcttatcctatcttactataaaattataacccactaaattctaaagctcaacatgcaaagatgctacatcatcatccactaacaattattacatttaaacatcatgcaagcatgttatattatatataattttataatttattaaattttagagttttaagatataagcatgttaaatcatcatcccatataattcatataatatttcaatatatctcttcatcattttttataatatcatatatacctatatgattcatcctcacttagttagtgttatttttctcttctcccattaaatcatatcacatcaattggttttagtcttagatgattaatctatggtccaaagtatctctctttcttctttcataaaaccatatcatcttacttttacatttgaatcatcattctatatactatttaaatttaaattattataaaccatattaacttattaacttatataagtttatgtagtttagctatcttacacattatttttatttgttataattatattgaacacctgcagtaacgtgcaaggttttagctagttttattaatccctattaggtgacattctaatcctattcaatccactttaaaccgaacaaaacaagacctaaagagcaaggatcgagctcgccgaaggggctgtgttgccgttcgtacggtgtagaggaagagaacgaatacgatacggtgaggggaagatgggataaggcatccgaggagggacccagtggggctcacccgccgcgccacgtgcagtttacacgtctcttcgcttcacccacgcgtcttcttcttcttctccttcctcttccgcatcgcctcttcctcccccccctccctcccccctctcgcgcggaagaacggaacggaacggaacaccagccgctgctccggcaagcgctcgccgccggcgaggcaaaggtatgcgccacacgctctctgtacctaccaccactcgttgtcgttttcctcctctcgcggggggtgttttctttgcttgcccgcgcccaccggtggatggcttaatttagcttttccgctctgcgcgcgaggaggatctacctgctagctagacggattccttaccccccgtgtgattgatcgatgaggggctttacgctgatgcggtgaatcgaaccggcaccgctctccgtcatgggctttggaggctggaaatccaaccaccgatggatgcgttgggggagaaaaggaaattggggaatttggtactaggagagcttccttgctgtagagaggaagctagctagcttagacttgttgagaaattagtggagagtgagttcgtgagtggttttattgcgcattgcaagggaaatggaaagagggtgtctgatgaagcatgcgttagaggtgcacaaagtagagattcacatcgttgctgaagagtataggctactagtttgatgtatgctccgcgttgctaggagacatctcgcgaagcaaaatttggagaaatgagcgcactgaaactaggaggttgatttttttttttaacaatagtgtagtcaaagtgatgttggatggttgatgtttaaatgctgaacaaatgaatatgtgtacatccattcaaattaagctcgccattgtaagactaaaacacgacaaaatgacagagaaagtggatgacaacaatttaggaaggaaaaaggttaagcactgcattacgttacatatggaaatatttacttgttaattttcattagtttgcaaacaatctgtagatcctaacacatgtattatatatgcgatcaaattacaggctttaaattgatgccgctgtgactaaataagttttattcagttgtacatctctgatatccattcttcaatgagataagcactccttttgataattttcttttttctataatctctaatggttataaaagaaatccgttagaaacaacacatcattactaatagttcctaaccttcttgacaaagtcagatgattttcctttagaaccatctgacgtcacataatcgcaaatggtttccatatacacctgtttacggtagtaatgccagttatgttttgacttgctcatgtgtgctgccgtgctgcacctagtgaacctataggcactgtatttttgtggcaagaaggatttttttttcatgaatgttatgcaagtcttttttttttggtcaacttgcttcacttaagcagttgactaattcctcattagccttaatgttttcgcttggatgtggtaacaattttaatcaacttcgtagatggagaacactcaatttagccgtccaaaggcggtaccctataatgactcctgggagatacccaattctgactatattctcttgtatctcaatgacaaacaaactgggaagatcacttgcatggtatgtgggaaagaaggacactacacttgtgagtgccccatgaagaataaagaaaaatatgtcatatgtactctttgtggcaaggttggccactgtcacttatggtgctgccatcagaatgagagtgagaggcgtgcttgccgtcgttgtggagaaaaaggacactatgataattggcatcacctaggttgctccagctgtgagaagcatcatccactcgggagatgtcctatgggaaaaattacatgttttctttgtgaaggcaatggacatgtccctgttcaatgtcatttgagtccaatgctcactgcaataactcagaatcaacgagagagtttccgagctactctgagacaagcattgagagaaacaagcaacacagcagtcacaccaattacattgaccagagaattagagccatataatgataagaatggaggccaacctaaaggggacaatgaaatggtgcccagggtcttaggcttcaatcaaggagaggaaggccattctgctttgaggaaccctaacagatgccatgtaccatcctctgacaaggctaacgttgctgcagataaggcaccaaaccaatctttaggagtaacctgcttcaactgtgggggcaaaggtcactattcaaataaatgtcctcaaaagcaaaagcaacatggagtcagatcaaccaatgctgcagctatgaaagataagacaccgaacctaacaggagtgacctgcttcgactgtggtgacagaggtcacttttcttatacatgtcctcaaaatctactagaagtcatgttgactgcagaactagagccacatgatgatacctatgaacgccaacctaaagcggataatggaacagtaccaactgtcctaagcctgaattgtggtgaggcaagccattgtggtaggaataatcccatgaaaagtctggaatcatcctctgataagatcaattctacagctatgacata

SEQ ID NO: 21113 - DNA, 11592 bp, Oryza sativa
agatactctatactactacaaggtcgctctgattagcgcgctagctagctagcattcatacacctcttggagcacatatggtactgtacctagaatatcatcatcacttaatttcacatgtcacacttgacaaggtctcaaagtatgaagagtttatataactcggatcaagcaaaagggtgaggtgagggagcacaatggaagagccatagtacataatcatgtcaaaatttatgaaattatcacctccctactgacggtgcatatgtaccaacctatttaactcaaaattttaagctggtgagagaagatgggggagaagatggacaaagagctcccagcagtagcagatccagaagatcgattcgttcatgtgtcataacgtgtttatcggtgtcatagtatgctaattatgcttcgattatgaagttataatatggataaacagtttcgctataggttttaccgaaagtcgttggtgtcgcttgacaccagcccttctactgcaaactgcatacggactagaggaccgactctcttgactctccactcttgtataaacataagaggacgtgaattgattgcataatttgtcctgtaaatttggatgggttcgcgcagaaaattggaaacgcgggccaaatttctctgtagcttgtacctgctctgtactgtataccaaagctatcaaaatcgtgcaataacttttccacagtcggtgttaactatgcattcgtaggactacctccgtcccaaaataagtgcagtaataagtttccgtgtctaattttggtcgtccgtcttattttaaatttttttatgattagtatttttattgttattagattataaaacatgtatagtactttatccgtaactaattttttttagtttttctaaaaaaaattaaataagacgaatgattaaagttggacacgaaaactcatggctgcactatcttgtgacggagggagtattggcttactgtgatttaaaactgtgagtactactgctagttccagctatcttttctgatacgccttctaagctcaactgctgctctaatctgcctatgaagtctgaaagtctgaaaccgaagaagtgatggactgatggtcttccctgcatgcatatagcagaaaatgtcgaaactcattctgttcacttttctaaacgaaaaggaccgtgtaatgactaatgagtcatcccttgagatatattcatatatatacaggcagctgaggaaaaaaataattagataggtgttagcttgattgtaggtaatgctggttccagaaaaatcaaagcgtgttgctgtagtctcgacgtgattgataataacagaacaaaagtgaaagtgcatgttttttttcctttccatgctttgcgacgtaagcatcgtgcgtccggtgcgtcggtttatggaggtgttcagcgcatcagcaaaaactgaatccaagcaatgacgcacagagacaaatactccctccgtttcaaaatatttgacaccgttgactttttaatacatgtttgatcattcgtcttattcaaaaaatttaagtaattatttattcttttcatatcatttgatttattattaaatatactttcatgcacacatatagttttatatatttcacaaaattttttgaataagacaaacggtcaaacatgtgttaaaaagttaacggagggagtattttccaaacggacaagaagaaagaaaacgatgagatatgggagtaagtatgaacagcttgtattactggtctgtcttaagacaattaatctagtagattctatttaccgtttcaacaacttcactaatctaatatgctaaaaaatataaaaaggtgaaaaaaaacccaaattggtcctcttcgggggacaacccgtaaaagaaaaatacagatcggggtgagttctaaacaaaagagaaattaaaaaaaaaagaggaaggaagcttttttttttttaacttgagtcttgacacgaccttggaatgcacgaccggtcgagcaatgggcacacgtcgcgctgccttgccggagtccggtcaggggaggaggacgtggagcgaggcgttcttggtggccgcgcagacggggcacgcgtcggcggcggcctcgcagccgcggcacaggcagaggtgccggcacggcagcagcagcacgcacgcgtccgcctcgccgcaggccctgcacgccctcctcccgttcccgccgccggacacctcggctgcgcctccgtcgggcgcctgcacgaagcagcacgactgcgcgtcctcggcatcgccctcgccctcggcggcggcggcggcggcggcgcagggcgactggaggagctggtcgagcgtggcgcggaggcccgcggcggcggcctcgtggctcttggcgatgcccagccacgcctgcccctccgcgcccatctggcggagcctctcgtcgagctccgcgttccgccccagggcgcgctccagctcggcctccgcggcgtgcagccgccgcgcggcggcgcgatccaccgccgacaccaccgcccgcaggtgccggcgccgcgcctcctccagcccggcgcgcagcctctcattctgtaggtaggtgcagatcgagtcaaacgcccattcgagagaggagagcagacaaaacgacacggagctccagcgcccatggcgataaataaatgcgcgatcggtggcgcgcacctcgaagcggacgagcgcgtcgacctcgacgctctggcggtagagatgcgacaacaggaggccaccaccgcagacagggcggccgctggtggacgccgcgccggagccgacgaccctgctgctactcttgtgcacgtccccgaacgcctgcggcgtcacctgcggcggtggcggcggcaacagcgcgcggtgcccgccgccctccatgacgctgctgctcatcaacagacccgccgccgcctctccctcgccgccaacccgcgcgcgcttccgcggcacgaagccgccgccgaagtcgtcaaagcggcgctggctacaagtaagctcgcttcgcaggtcactgaacaccgccgtgttgttgttgttgccgccgccgcccaccgccgcagcagcaacaacaagctgctgctgtagcagcgccgctgagacggcctcgtccaggaacaacgccgatgcgccgctgctcggcgccgcgttctccagagccggcctgcgaagaaaattgttagccactcgcgcgaggataaataggtggtcggcagcggaagaggaaggaggaggagcgcgaggcgcatgagtgcctagagcgcgcgcgcgggaagggaggcggggccgcgcatgcatgcacgcgcgcggcgcggcgcggggtgacacggacctgatggcgtacgccgcggaggaggaggagcgggaggcgtgggcgacgtactgcgcctgcacggccatcatcaacacaaacaccgcaaaaccaccaaacaccgcgcgatggagaagaggcagcagagcgcgggggttatatatgggaaggggcggtggtaaagacacgttggtgcggggtgggggaagggtggcaataaaagggggacaaagcctgttcgtcttgacgaggtgggactaaactagaacgagaaagatgagaggaggcgggtgtggccttgactgggcgagcaagcaacggatgcgtggggtggcggattgatgggtgccggtgcccggtgatggatgatgcccaccctagcttccttttctctcctcttccctttctttctcctccttttccccgcccgctttaataattttatcgtttagagcacccgcaatggtaaagtaaagtgctctctataaaacatgtataactcagcaatagactagattaatagtaaaccacctcaatagtatgtctacatgtgtatctatagctctctaatgcattgcctcgtttttctctatagactatctccagattagtagatagctttgctctctcttcatttaatatcttccaagtaggaaaatatactgatatggatctcttatagagagcctatagataaccattgcgggtgcccttaccatattcgtcggagcatgcacaacatttcgagcatttcgcccctgctttgcttttcgatgccgcaccgatggcgaggcgacgtgggattcggttcgggggcaacgcaaagactgcagcactgggccagctctatcgcccaagataacgtgaaatttgacaatatggagtatctactaatacacgcgtctttgctgatttatcatctaatcatggcttctaatatatagcactggagccataatttttttatttcataccattttctctttttattccttctcgtgttcacggactattttgcccataggctcacataacatgagaacaaaggtgaagccgtagagggagggagggataagataatacaataatctcccttcagtaaagcctcaatgataacaggggcatcatagcggcaggggcggcggcaaggtgtgtccctgatgttgaagcatagtggtgtcggcgccagagataaggggatcatgacatcggtggcgacaggccaaggaggcgggctagcggtggtggagcagcgttgggatgctgccacatgcactatgatggagggcctggtttgcggcagcgctcgttggaagccgtgactcccatttcttccaatcccctcgctctttcttttccttgtcgtgtgggcctaggggcaaaagagtacatataagtgaggaggagaaataaaaaagaaaagcaaggagaaagtggcatgttaaaaaatcatagtcgcattattgtattttagaagtcatacgaattggataatatatacgcaaatgtgcgcatattagatgttatattgtcaaatttatcgtgaggtaaaggctcgtgttttactcaactgttcagagtctttttccccgtttctttctgttttcgcttgtaagcaaatgaagagtggcttaagcaagttgtgtttggtgacgctggcgtttccgttttgtgggtgaactgttgatgataattcaatactgggtgcagaagatgtatcaataatcccacgaattaaagctaattaaccccctcaccttttccttctttcatgtgcaagcgttttctgatagtacgagagtactactacagcgttattagtggcagtgcttcccttttctaaaaaaagtcatgcgccttggtgacaattcacgcgagatatacgattttcgatcatacgagcagtgaagcgccgtacgcacgtacacgatccgatcgatcccttagcagctttgatcgatcctccacgtgtacggccaccgccacacagctgcccaccacgccgtacgtttcgtcgtcttcttcaggattattaatccgtataggatcgagtacttgcaaagaaaaaaaaaccgaaacaattaaaccacccgtactaattgggagtaagtataattgataatcccatggacgcattcataagtcctgcccggaaaaaccgagcgatttttgaaacggctcgtgaccgcggggcatcaacgcgcgacacgccacgagtattcgctggtcccatgatataacgccaagtatagcactagtacctgacgtgatgtggtagctgggatttgttattggagtaaatttcacactgaaatgattttttttaactaaagttttataacggaacatgcccgacccattgtttgtgcttaacaccaaggacgaagctataatatatttgtggaatgaaatccatgactatattgtataggctatgaagatgacacttgaaatcaagtaacattaataatgcattacgatactgatgagccaattttctagctccgtccaggcttaacaccatgtattcataatttgcactttggactggcccaatagtttggctcggcacgtaggcttcagcccatgcacacgatcaggcagttgttgccccttttctcttttctcctcgcacaggcacccatgagggccatggcccggccgccgctacaggtgaagagcgcaacacatctagtggcaccgatggcgtgggaggagggaaacctgtggctagcccgcgcagggccaggtggtgagtcaccgttgccaagcttgcacagaaggcagcagctccgacattcacaatgaaagcatgtcatcgttgcaaagcttgtcaaaacaaagcagctccgacttcaccacatacttgtgtccttgttaccgagctcatcacaaacgaccaagcagctccaacttctcatggcggacatcaaccaaagccaccgtaccacctcttcctgcctattgctggcaccagcatgtacacttagaaagagactgcaacatgttatcattgccgagcttcgtctcaccccaacaacaaagcagcttcgactccacctagcaaaaatcaaacaaggatattggccacctgccacaaagcaagaagcggatccaacaaggagaaggtctcgctgaacattttcgccttgttgagtgttggtgtggaagtaggaagccccggagctaacgtcaaaatcataactagacatgtgcatgaaaaggttctccaaagcggcacccccaatagggacgagatgtgaatcgccgctgccgcttgcccattaaccggggcaagactttcacctggagcacaatgatggaagaagagggaacacgtcttaacaatgcctccgagaatggaaacggcgccgaaggcgttgccagagccagaaggcatggcaaggctttcgcgtatggttccctgtgctcctacacacctaaccaatccgcagacacgactatcgcaagaatgccgcattggcctcgactcaccgacctccggcgaccaagcaccccggagctccccatgggcacgacctcaccgacggccgcaaccaacgaacaacctccaccacatataacagcacaaagcgtccccgcgggcaccgcgtcaacgccgcacggccgcccaagcttctcgaccaacgctgccaccaccaagctcgccggcgtagcacggccgccctggctcttcgctcgacgccgtccaagcacgccggcggcgcccagtcggccggtgtcgtcagccgctgccacctgcgtcccgcctgccagccgcgccgtcgcccgcgtctcccacgccatatgccgttgtctttcctgccaaacaccatcgtcctcgcgccacccaccgccgttgcccacgccgtcatcagcttaccagccagatccgatgacgacgggccggatccagcaacggaagggccggatccggtgacggtggcggtgccggatccgcagccacgcgccgcgccgccgcgaggcctcccccgcacgccgtgccacttcctcgcatcggagacagctcgccaccggggtttttgtccccgctgccgtcatcctagttcctacgtggttttcggtggcggcgaggcggtgagaggaggggagggtggcggcggccaggggctagggtttgcccctggtcacccgtgtgtggacgaccgaaggcgcgtggagctgattccccctcataggggttgtttggttgatggctaagttcgccacatctcactttgccacaagtatgctatgctacaccaaatgatactaacaatttgttgaccataagcgtggctaaattttataaaaatttaagtctacgatgcgtaggcccaaagattagtaaaatgaggcatgacacagatgtgacaaccaaccaaaaactatactaccaaattgtgtcatgcctaatatttggcatggtaatatttgggagctacctaaatagccccataatttttggagcgggtgcaacaatgctactaggagatttgaaaaactaagttgtggtaagtattatgtgttgccacagtacgtcatgaagttcatgtaaagtgtatatctattataatgtgagcaaaataaatctattagcttaaagaaacacttgtgtcacagtcactacgtatcaagttaagtgtatatattaactctactggtgagctaggatttgttagtggcgtggttggcgcctgcccgctgggtcttctaggcagagctttggatgtgagaccgagtggcaatgcaaggcaaatgattaagatggaaccgagaaagaagcaagtgctattatacaaagaccagcagcgactttttttttctttcgaaacacatccctttaattacatacatgcatacactacctctataattagctctgacaaactgtaccgacatatcttgaaatttagggttgttgaaatgctgggccaaaaaaaaaacaaagagctgcactgcctgttacttgaaaggagcaagtatcagaaatacaaacagtagcctttaggagctgaagtaccagaaatttaggagctggaactaacaaaatgtctgtcttgcactgagatttatgccaccaaaaaccttacagatcaactaaaagagggggggggggggggggggcgcagaagtagtctcatttcttaagtgcattcatcctgtcccgcaggtaatacaactttgctctcctgactttcttcctgtccaagactttgatttctttgatgtttggagagtaactgagcacaaaagaaaggttgcatcaagaaagactgaaagtcaaaacaaaatgaatcatgtgtaaagatatctttcatatttgactccagcaacttatgataattttgtatgaaaaatttagatgaactacagaacaaggggaagagagaacaagaaatagtaagtaaatatatatgaaaacatcctattgcattacttccattctagaaatatacccacaacaccacagtggtgaaggaacatgtgtttctagtggtgaaaattgcagtttcgtccgagctgaacgtgcatatttatggaactacattctacaagctccatgtgcaatagagctcaaacacacacaggagtttattgcacatctgttctatcaagtactatcgatatcaaatctcggcattcactttcttaggaatttgttaacaaggtatttatcaatatatgattatgaaagttatacttggatttacagaatgcaaacaacgaaggtagtgctagcatgccactgttatcatcagcctattagggatatcaagaaggctaaggatacccaagaaacaaaaacaccaaacttgaatgagcatttctaaatttgcaagcagataactacacttctaatgcaaaataacacgcctatagttctatgttcacttgtagccatatggaaccgaaagtatgtttacgcacaatcaaagaaaacaatcctgtctaccaagcaaaaaaatagtgagaatagcctgctcaaaccttaaagtattaagtactgtatgatgcacagttctcacatttgaatgaacaattagtcactcatgagaccaagaggtgattcgatatctctatatgcatttcttttaagaaaaaaaaagatgaggcggcaaaagggaagcaaatatttggtgtcacttaacagtggaaagacagactcgactccaacaccagctactaatctacgcagtctgaaagttgtattgatcccagcattgcgtcttgctatgacaatgcctttcaacgtagactcgcgccgcttcttctcaggaacttgctgttttttacacacataatcagaacggcagaaatgaccgagcagacaaaataccagtaaactgaggatgcagatgctttaccagtctcatttggagaatacatccaggctgcacatcaggaatctctctttccccaagtaccttgtcagctgcctccatgttcaagatctgaaacacaaaataacaaatatgtcctgcttcttttaagtgctcattttgacacaactgtaagtttcttggatatgtcatttgcacaatactaggcttacattcgtaagagcaaggctaataatacagccaattatttactatataaatttttatagtctatttttttactcactcatatagtgattagctcttcactataagtctactgtctgtctcacagattttattgatttttgtgcctaagccggttgtaaacttacagcctgtttctcatctctttcctctcctctctcatccacctcagcatttagccatcttagagcaagtttaatagtatagcccactactagctccaattcatatatagtcaatctaatagccaattcatacaatagttgcttactatactattaatatatggtcccatctgtcatacacaccgcgtcttagagttcgtgctaaagctggctacagatctgtagcccgctgctcttctatctcatcttttatctcattaaaatatgtttatagctggctaatagtctgctattgtacctgctcttacagttacagctctctattatacttgctctagcgtgcatagccgtcttgtcaggcctcttgagagcaagtttaatagtatagccaactgttggctccaattcatctgtagtcaacttaatggccaattcatacaatagttacctataaacatatactacataattaatatctggtcccacctatcatataacatgcatcttagagtctgtgctgcagctggctataaatctgtagctcgctgcacttctctctcctcttttattttcttaaaatatgtttatagttggcttatagcctactattatacctgctctgaacttaatgcacggaggatggtctgcagaaacctcagcactccccactgtcgatagacccctcattgacatggtattcacgcagaacccaccgggatgaacgctgtcaccggaaatgattggattctgtacgcatcaagaaaccgaagcgacaggcatgaccaaaaattagcaggatcacagacagcggaaaggaaacaaacacaactgatatcccggatgcaaaccacgcaccccgaatggacgaatccagctgcagcagggcctcaggtgttcgatggacagcgcaggttagagcaacaagctcactttctactattaacctatcttgaaaccaacgtatataatatattatctataagattgattatactttttttctcctacctctatctctcacttatacatttaatacatttgtcttgaaacttgtgataagttagctcttatataagagcaagttcaatagtataacctactactaactccaattcagttatagccaatctaatagctaattcatacaatagttgcttactatactattaatatatggtcctatttgttatacacacactgtgttttggagtctatgctgcagctggctacagatctgtagcccgctgctcttctctctcatcttcaatctcattaaaatatgtttatagctggttaatagtgtgctattgtacctgctctaagagccaacacccttaatttttcactacctcttttcttcacctaaatttatagtaagcttatatagctcactattatacttactcttagcgcccgactgcgcgatttcagaggctgcagagctcaacagtttcgcggcggagccatggcttccggcaagatggacacgccgcagcagagattgcatcttccgaaaagcaaggactactgccaagg

SEQ ID NO: 21114 - DNA, 4405 bp, Oryza sativa
ctatgtactccactttgaactatttatcattatagatgtacggatttgatcaccatttatatatttaatcaatattgtttagtttgaatcagtaatttttatctttgtgtcactttacaccacccttacttttttatccatctacatccaatttatcatatgtcaaacaaatagtctacatacaatttatcatatgtcaatttatccatctaccacccttagctcttttaactatttcgccctcaccgcgtgaacttgcgcggtaacgcgcgatttcgcacttccattatgtaaaaatagtatatttctataattttcttctaaacgtgtatatttatgtaaaaacagtaaaaaaaaagagtatattttttattttttttcctttattggatgggttcagaaaatctgatcttggttaggctcaggccctgttccaaataactaattgagcttaactacttctcattttctgttgatgcgctttttaaacagttaaactttatatttcatgaaaaaagttatatataaaatgttctttaaaaataaataaattaatttttaaaattttaataattaatactcacttagtcatatgctaatcgtatttctcattttatgggtagctaattagtaaaaacttatagacttaaaataacgcggtctttagttttatcggagaaataggaactagggtcccatcactagctactcgaggcacgttcacctccagccacggtccctcacgggctatgctcggggcacttctttcattaatcgcgcccccgtgggttgggctttcacacatccgctctcgggtgcggtccttcatgggctgtgcttggggcacttctctcctctggcgtggccctctatgggctatactcggggcaaccaactctcgcaagcttagagacatctaagacaaaatcaaaaatcacacagcctaccaatgacgtggcaggaatggcggcgcttgtagcgcacgtctccctagagaaaaaagacatgcaacgtggcaccctctcagtatgcattccatgtgccctcctttgccctcgaaggctggcagctaggccagtggacaactcagatgaagaaacctttgacttcttcgctccactcgtcaattgataggtgaaacagtcacctctatcccaatctcacatgtatgtattggcattttggactcccttggtatataaaaggaggatacataccaccaaaaaggggggttcaactagttcgaatagcttagctctcgttgaagcaagttagcttccacccttagactccactcattgtaactcattcccgatcatccatagtccatatacaagaatagggtgttacacatctgtgcccgatcctgtataatcccttatgtttatcactctcgtgatttggatcagggcttgactcgctacttggcccatggctgaatctccaagggcaagtactcacttcttgactagatgagttccgcactccgataagtttgaaacagattattgagctcattgttgctgcagattatctacttgattatatggtatattaaatattttaataaatagacttaacaaatataagaaagtcttttgaaaaagattaatttttccaaacatagaataaatcaacggtctagtaaataatccgaaaagaaccaagtgttccccttttttttaaaaaaaaagaaactaagccttgaaatgttggatagtgaaagcgaagggtaaggaaatgagaagacggagttggttgcatgttcaaactgaaatatcttggtatggacaaaattgaaatatccatttgaaaggtccccaaatgaaatatcagcactgacttcatgatgaaaatgatcggcaccgacgccgacgttactctgttcaatttggatcgacttgaacctgactggacgctagctggaccaaattgatggcgacacactgattttgtccactttgccgtttgatgccacagcccaattaagcgttcggaacgatggcacgtacagtagtactagtagtaaaaaagggaacggttcagatgagcgtctcagataaacttgcgggttttattcatataaaagcagtataactttgttaggtacgcaatcctcttcagagttaaatacctccatgttgatgctgactgtgtggaattctagagtgacgagtttttttttttcttttgggtccatgggaatgtgagatgcatgcaacagcaatgaggtggcactcacgttctctaagctgggatcttctgaaaccgggtggtcagcatgaagctaattagcgagagtaatcacatgaagctaagtcacacatccctcccccccccccttagtacgttgagactacttcatagaatgtttatcatttgtaaataaaattaatttttttagataatgagaatatgaattacctttctgcttgtttgtgaccatgcttgcttgatattccatccttgataacctgggatattaatttaactagcttgtatcacttgtattgacctagctagaattgtgatatgtttagccatgcttaattacctctggcttgtgcagatactccactggtggagaaatgctttttagtcacggttcgcaactccttgtaatcccggttttcaaaccgggactaccaatccgggactaaagatcgcccggttcaaatacccgggactaaaaatatctttattcccggttattaacactaaccgggactaaagagatggttgcggcagtgagatgatcccctttttcttttttttttcttttttattttctctcaaatcaagtggtatacatatcccaaatcaaacccccaatccacaaatcgaagtaacatatcaaatctacatgacaaatcaaagttacttatacacacaaataaatacatcacaatatcctaagaaattactcaaatacatcacagatccaaacaatgaatcacaaatttgtaacttctcagttaaatacactcagtgaatcatcacaaattaaaaaaaaaatgccgctgccgccgtcgatcgccacgaacgacgggcgcggccccgccgcccgccgcccgccgccgccgcggccccgccgcccaccacgcccgccgccgcgcgcggccctgccgccctccgtcgggcgccgtagcgcagggccccgccgccggccggcccgccggatgggaaggggaggccggccgggaaggggaggaggaaggggagagaagggggaggagaggaggaaggggaggagttggagaagagagttagagaggatagatctgaggagagggggtgagattcaatctgttaaattgtaactgtggaggagaggataagggatagggattatatactacgtgtttaattttagtcccggttggtagtaccaaccgtgattaaagtggtgatctttagtcccggttattgacaccaaccgggacaagatcctcgaccccctgacatacctctgacaggggatgaatcgggactaaagatcaaaatttttataaccgggactaaaaataatttttactcccggttctttttgatccgggactattgtggattttactggaccgaccaaagatggtttctccactagtgtctcggatgtcacttgtgtggaactgtgaacgaccagatactctacttacgcattctgttgatcaaagaatttttcctgccggtaaaagccgcaatactcttcctgcttgtgaccctcgatcggaagcagactccggagcgacgtaacaactgaaaataagagcaaatttcgcagccataagatcaccaatacatgcactcactgagttgtactgttatttggcaatcagtaatttgtcctagttcagcattgccgcttctgcactgtcagcaaaaatgcgaacggatgtcaggaccgataatcagtaacagtcagcaattggcaaaaaatgaagggacaaaaagatctccagtggacagaaatgaaaggaggcccatggtcatggatgatgaacttttgtaggggtaggaaaaagtccaatttcacaccctcaaatatagatcggatcgaagcaaaatcgggtagtaaccactactcaaagtattaaaaccgtgaaaaatgactctcaacaatattaatggtggtttcgctgacatgacacgttcacttggtccaaatgtactgacgtggcatctatatgattatataaaaaataactaaatacctacatgacctatatgtcagcaagtacatctcattgtctcggccatatcgtcgtcgtcctctccgacaggagttcagcaccgcttctgctagacactaggcggtggcaccagtgctgaaccggagctcagggaggccgggagtaggatgtaccctgactcctttgcgcgtgcatgagagtagtcatcgggggat

SEQ ID NO: 21115 - DNA, 12922 bp, Oryza sativa
atagtctatagagcaaaaacgagacaatgcatgagagagttatagatactcatgtagccatactattgtggtggtttactattaatctagtctattgctaagatgtatatgttttatagatagcaccttactttaccattgcgggtgctcttaaggtaggagacgacgagcacattcgtgagagcggagaaccccagcctcgccatgggttttgtcgattcgctagccgctcaaactcctccccctagacactgtcgtctccctggtgccgccatgggctcgcatcgccccgacatgaggaaatgatactagagtgtggagaaagcaagagaaaggaaagagagagggagaaaagaagagaggacactaacacatggacccatatgttgactcggtcgattggaccaggtcatgcaatgtaacgttggtgagaaccaccatcaatattgtcgatagagtcatttcgcaccggttttaatagttggagagtcggtacatatggttttgcggttgagagatataaattacatctgatctatataattttgagggagtcaactcagactttttccataagtgtactgaagctgaaaagatgcaagcttttgttgtgcatgaactcgtcgagtcgtcgtcatagtctcgtagatgagcctggattgctggacacagaaggccagcccaatcccagcagcctaaccagtcccgttagtttgttggattattgggcctttggctatcattaaaggaaatgttggattgcgtcaagcccaacagacatgaattgaacaagacgacaacctcttgatcgccaccggataattgaccctaaaacaaaaaaagaaagggacaattgcatctatcccctcactttcaaatctaattattattttatccttattttttagggtttgcagttttacctgggtgtgctaacgggcgatcgatccccacgccccctgtacacacctctccttccttcctcctcttcttctcttcctactacactataaatttaaaaaattaaaaaaataaagttaaaataaatttatgtatatatatatatatgtgtgtgtgtgtgtgtgtgacactcatatgggggcaccatggtgcccgggcaccatggtgcccgggcaccatagtatctaatgcacaaaatcactcaaatttttaaaaatttttaaattatgagtatataccatttcacaatccatgattacatacataactaattatatgtatggatgctatatacctagaatcaaaatctaataaaaacaagttcaaattcagtacaaacatgctttgaactagttagtaaagtagttaatgttaatacctaagtaattgaaaaagtttcatactcatttgaattgggtatatactcaatttcaacaatggtgcccgggtaccatggagcaccaaacaaatttaatatatatatatatatatatatatatatatatatatatgtatatatttgaattcaaattcaaatttgaatcgggtatgtaaacttttggcttataaactttgggtctataaactttaggtatataaactttagatgtatagacatactatatatagaaaatatttgaattcaaattaaaatttgaatcagatataattcaaattcaaatttgaatcaggtatgtaaacttttgacttataaactttagttctataaactttaggtgtataaactttagatgcataaaaatactatatatagaaaatatttgaattcaaattcaaatttgaatcagatataattcaaattcaaatttgaaacgggtatgtaaacttttgacttgtaaactttgggtctataaattttagatgtatagaaatactatatatatatatatataattgaattgaaattcaaatttgaatcagatatataaacttttgacttataaactttgggtctctaacttttagatgtgtaaacttgaggtgtataaactttaggtgtataaattactaaaataagaaagtaatacggtgccaaaaaaaaaaagaaaccaagtggagagagggagagacccgatccgatcgcccctggcgatcaatctcccaataggagcctgctttttaatctgaaccaaccgtctgcccctacttctaacagccggtttaacggtgttagttgtagagaaaaatggtatttatacccttagtggttattgtatttttgcccctatttttttttccagattgtgtgattctgtacctattgactattgtgtgaccgtgactgtgagaggaggaagctaagccagattcgggcgcttcttctatgtgtgcctgtgtggtgagagaggccgaggctcccgatgcaacggcatggctgagaggcggtggatcggaggtcttgctggcagccgccgggatggaggagttgctcttcgtcgccgtccgcatgtcttcacgctgcctcaccagatctggcggcaacacgaaccggcgccaccggatcctctctatgctccaaccatgccatatctgcatggcggcaatacgagggagaggacggagacggcggcgccagaggtcttgccgggggcggtagggatggaggatgcgccgccgctggatccccttctcttttctctcgacatgcgctttggctctttgccaccgcgtgaaagccctgcagccgccgcccccaccgcgtggaagccccgccggagcgccgcgcacgcccgcccgtccttgctgccgctggcgcgcgcgcctacatgtcctcaacggcgctgccgcgccgcgtgcccgccctcgccgccgctgccctgccacgcgccgccgataggttaggatttcaggttgggaggagagggattcaatccctatccattcacttagggtacaagggtaaattaatattttataaaacctttttttaatttttttatttctttaacacaaaacgtgggacccactaaacggctgttagaagtgggggtaaacgacttgttcagatttaaaaagtgtgaataaaactgtaaaccctaaaatttacgggtaaaacagtagttaggtttaaaagtaagggcatagatgtaattgttcaaaaagaaaaatgaaaacgaaaatgaatcaacttgtgatgggccagacacaggtgctacttctacccatgaggccatgacgaaatgacgattgacatgatgaacaacctttggttactccaaggggctactactagatcttccaggaattctaggtagcaatggggtgtgtcccccagccccactacttgagaattgatatttgcaatctggttgttattaaaatcgggattaaaaatcaaactaattggactgtaaatcaacagaattgatcgatgccacgcataattgaagaccacgatgcacggctcgatcctagccattaatgaatatagaaaatgctagaatgacttatattgtaaaacggaggaagtatattatatatatcttccatatcctatagtttcttatttccttcatttcacaatgtaagttattatagcattttttatatttatatttgatgttaatgaatctattctggaacggatggagtactattttgttatactggtacttagcatgctattgggttcaaatatcattccgctagggatctaatcagctactagaacgcatatatatccttttcctaaccattcatatccatcactgcacgccggttatataagctatcagttgctagattactccagatgatgtgcacattatctttttcataactaccactagcaagatatttatattgctagctagaataatctgccaccgataatgataagaacgtacgtgcagtacatccagctagctgaagtggaccaaggccttgaagtggactgaggccgagttttgtttcgaacttttaacttttttatcacatcaaaatttttctacacacataaacttctaacttttttcttcaaactttcaattttaacgtgaaactaaacacaccctaagttttcataaccaaatggaataagtgcgtacacatcacgaattctaggtgcagatggcacgtcgctgtagtacgtatagtatgtcgacatggccggcccgacacgtcggccccgctacgtacgtgggtccccccgagctcccccgcgcggcgccgtatctgaccgctgggcctatatggccagtgtttaggttaggcaatggcaatgttttttctttgcgacaatgttaataggggctgtttagttccaaaaacttttcccaaaaatatcacatcgaatctttgaacatagataaaaaaaaaattaattgtacagtttacagtaaatcgcgagacgaatctcttgagcctaattcgttgtcggtatgtgggtggtgttatattttttccttttttcctggttacgaccctccagggttataatcttagtaattttttcctgctttatcaatagaacttcgtgcgagtcgttaaaaaaattagtctataattagccataagtgctatagtaacccatatgtgctaataacggcttaattaggctcaaaagatttgtctcacggtttccaggcgagttatgaaattagttttttttattcgtatccgaaaacccattccgacatccggtcaaatgttcgatgtgacacccaaaaatttccagtttactaactaaacaggcctaaacagtcttaataatctgcagttaccatttacacgagactctgtcccactgagctagatgtaattttgtgggcttataaacaagttacacgaatattataatgtaattataattaaaattaaaattgatggatttttttataaaatacgatcaaatgatacatagccagtccgactaatctaactagagttcgtatcaagggaagatctaaccctgacagtggcatccactgattgggcaatttggtttgtggagccctaccaaaaagttctaaaaatctttgggtggcactccaaatttgattgggcaaattgctactccgtactacactactacctaagagatggtgttggtaaatattggcaccaatccaaatatctagaaatactattgaaaattggtaagggattagtaagacacaatttggcaccaagttatctttgcaaagatagcctaagaactctcccgagtatgcacgttagtgcgtacgtagtaatgtagcaattttatcggaggattcatgaaggcgtcgacgtttcgacggcgatggctgccgaaaacaacagacagaaatgggtaacatgggtcacttgttcatgtgcaatggccattacgtatttacgtgtgctcggacgtttacctttaatttgcaccatcaaagatgtgtggatcgatcaagacgtacacagactcgtggacgttttctgtgtaacatctgtgcgcatggatggagttttaccgaacagtggcatctggtttaggatagagtgcccaactagctagagaggatggtattcatggatttgctccgtatgcataaaaaatttggtagctctggtttccatgaaaaaaattgtcatgtgtttgattatctgttctatgaaaaaggtaaattacctaacaattaccggacccctgcagctgaagaacggattaatcagggtaacgctcgatcgtgatctagatctaaggaataaaacatggatgggtccaaatccaaacagcacagggtggacctaccagcgcaagatagtcgcgaagtccgtgagtgagatcatctgcaccttagctagccgccattgatgtttatccacaattgattttggtttctagctcccaatcatgtccgtctccttatcacgccaatccaaatggtgagtggtcatggaccactcactcttacctgatcagtattcctcatggtaatttacaaatgaatcacactgttcctcaccccaataaccactagtagctcggagagtctcggacgcaatggctacgactcgatagatagatgatgatgcatcatgtattttgtccgttcacctgactgagtagtatctgacacggacgagggagaggtttcacacattgttaaataataaagcaattaggtttaaaagatttatctcacaatttacatgtaatatatgtaattagtttttttatatttaatactctgtgcatatgtctaaatattcaatgtgattagcatgagaacgatgaggtttcagtccagtacaccaccacaagtttacagcgcggcgcgaggtggttataacggagaggcccgagaagtcgcgggttctggaagctgtcagcttccgtcgaccgaacgaccaagcagccgccgcggctggcggctgccactcgctttgtgacgtgcaagagatttcggcgtgcgtggcggcgatccaccggaccagtccaaacgccaagctagcatacgggcggatatctttgcttgcacttggacgagtacaagtatttggatccttgctagcatacgaccggctcccggtgcgccacacacgtctcaaatacggtaatgcaagagtactctatctccgttttaaaaaaaaaaactctatctcgatatgtttggttgatttccacactaataactactctactagttatacttttcatttaaatggatccacttatcattgattcagttttgtagctaagccaaattcaagcgtggctaacgttttacgagccacaacttaactactactaagtgatggtgtggcaaatttagccatcatttaaacctagtttgctgtgatagaagggaaacaccggtgatgtgccgggaggcacgtgtgctccctcgttgatgggggcaatcggacacgtaatataccactgccggtgtgcactgtggagccgcatcaaccaacgacgggacacaccccagcctagctggaagcaacggattcggtcatattttttcgcaaaccgccactaccccacggttggtaagcccatcaccaccccccgccgcacacagaattagcctcccgtcccgccccccgtcccccggtggtggcccgcgccgtgggcacacccagcgcgcgcgggacgccacacccgcacggtgaatattcaaatatggagcaccgcacaataacgttatccagcctagtacagtcccgcgtgtagctctccccgccctctcgccgcgcgcaggcgcagctaggccgctctctcagcgtgtgcgcgtcgcacgcagcagtggccggttgggactgggcgcgaaagggaatcccgggcaggggggaggggaatgggcagcctgccctgcccgcggggcagcttagcgctcctccactataaaacgggcgccaaggtcaggattacgcagttttgccgccccgtttcttctcttcttccatcttcgtcatcttcctcctcgactcctcgttatattaggtatataaaatagcctttcttttcttatcctttttagttttacggagtaattgatttgcaactcttcacctgaaactctcttgataaatgggattttgatactggcagtactagtaaatggaattgaattctttgttagtactactactggtagtactttgtactgctcgctttgggtaaccgccaattcaatccaccatggattggctggcttgaacgggaagctgaagaattaattcatggcggaatcatgttttgattgctctgcgtttagagaagagatctctgacgttactgaccccaagattaaactcattgattttatgtttatgtacgcatttattgtattcgtaccactaccagcttgcgcctatagaagctctgcgaattcttgatcgaggcctcatcttcttctctttgtcgcagctctcgcagatcagatcggagacgaagaagatggcgtccaactacgtcgacaccaccggcgacgagggcaggttccacggccaccacagcaccaacaccacgccgacgggcgccgcggcgtcgtcgccgaggacgatgcgccggagcttctccaacgcctcctccggcagccacggcggcggcggcggcgccaagtgcgtgtgcgcgccggcgacgcacgccgggtcgttcaagtgccgcctccaccgcaccaactcccagggccacggccacggccacccgcacccctcccctcccacctccccggccgccggcggcgcctccgccgcgccccggccgtcctccgcctcctcccgcaccgtcgaggcccagtgacccctgacctccccggccgcaccaagaaaccaaccaaccaagaagaggaggagaatcagagtgggggagaagagagtaaaaaagagcatcgcgtatcatatcatcggaagggagtttatttttgatttccctcgttgtgatctccatgttcttggaagatttttcttccatttttccttttctttttcttcttcttcttcttccttcttttggctttatgggatctctcctactacatggccaaaccttcctcttcaccatgatgagaaactccaaatcatcccctgctcgaatcagctccactggctagtagctgctacttctcctccctctattattataatctattggatgatgataagctgataaatggaaagataagggttacccttctgctctactatgtaattactagtaccattttaccatcctattgataatccaatccccacctggttgattgagttcttgtctgaattttagtgatgttcttgaaagtactcctaatttgttggttaacagaataccagtgtgggtagattcaagagcggtatctgcaattgtcatcactgcattttttatgttttgggtgaagaggtcgtcagctgtgatttgcaaggaattgtcgcaatctagatagtactagatactatcttcgtttttgtgggtggcgagtagccattggtgatggagaaggacgatcgtgaccgttttggtgcgtttgttgctgggtcatttctagccgaattcccggttcttgcctgggcagatatatatgggtttggggactagggagtgtgtgttgttgtgttcgtcaaccgttatagttttgtgttttttgttgatatttctttctcatccaggtttctcctgggtaaggtaattcaggatgctgacaacagtggccaaaatgagatcagaatcatcagatagatagatagatattcctcagtgggtgaaaaaacttgaaaggtgaagccaaaggcagatctttaccactactacgcggtaaaaacacatgggcacacatgaccggcaacatcctcaattcttgcatcgcaccaccgtgctgtgatgatgatgatgatgatcacgacaaggaccgagggagacggacgtagtggttggcctggctgctggttgccatgccactgccatacataagcataggcatatgacctattctgttgcagtctacttccgttccacacaaaataacctagaagagcacataccctatttagattcgttgtgttaggcgatgtcttatccatttatagataagtttttcttctaggtaagtttttcctagaacggaggaagacagtagtttcgagactacaagaatcagattctctaccttgctactctttgattttaagtgaccgatatatatagacttcacaacttatggataggcatatcaatgacccacgttacacaatagtatgtcaaaggagttttctttgcaaaagatgggtctctatcatcatcaacaacatcggctcatcgtcatgtggcggtggttacgatggggattgatcattggcccgtcttcttttctttgcatcgactcgacaagctgtttgctgctgatcgaatgttgtgtacgcgcggtggcgtttattgagcagatattttgcacctaaccggagatttggacgttgcggtagggccgggtgggtgaactgctcggagcaggatgataattgataagaggaggtacaatagcaggctataaaccagctataaacatattttaaagagataaaaagaagaaagaagagcagtgggcaacagatttgtagccagctacagcacggactccaagacataatgtgtgtatgataggtgggaccagatatctattatattattaaggaaaaagtacgaattacgccctcccccgaactttcgcggtcgtccgaattaccccctcgaaccacaaaaccggatattcttcatccccaactatgcataccggacgaaatacccctctcgactcaatccgcggtggttttggtatacgtggcgtacacgtggcagtccagtcaacattctatttaaaaaaatttgtgggaccctgcatgtcatacactactctctctcacttctcactctcactcttcctctctctctctatcaccgtctcatggcgagagaggcagggggcgagcgagatggaggcggcgcgcgggggcgggcggtgggcggcggcgcgcggaggcgggcggtgagcggcggcgcgagacgaggcgggcggtgggcgacgcgcgagcgaggcggaggcagcgcgcggggcgggcaatggggcgggcggcgcgcgggggatgggtgggcggcgcgcggggagggcgggcgatgggtgggcggcgcaagaggaggcggcggcgcgagcgaggcggcgatgcgagacgaggcggatgcagcgcgcggaggcaggcggtgggcggcggcgcgagacgaggcggatgcggaccggtggaccagcacgacagcgtcggcgactagcgcgacgcgtacactgccgccgacactccgtgtcccccctgcctctccgccgccctgccccgccggagagggaggccgacgccgacgagctccgcgcgcgcgccgagcggctccggcgctgcaaccgccggagagagaggccgacgccgacgccgaagagctccgcgcgcgcgtcgggcggctccggcgctgcaaccgccggagagggaggccgacgccgacgcagacgagctccgcgcgcgcgccgggtggctccggcgctgcaaccgttggagagggaggccgacgtgctgcgcgcgcgccaacgcacacctccgcgccgatgccgccgcccccgcgtcaccgtccgccgctgtcgtcgtcgtcctcctgctgtagcgcgcaggcatgggcatcgtcgttggcggcgatgttggcgcgcacgaggcagccgagctccatcttggcgcggggccggagcgccggggcgtgggtgaccagcacggcggcgccgcagctccgcgccgaggccgccgccctcagccgtcgcccccgcgtcaccgtcccccgcctgccgctgaccagagtgagagagagagaagagagaggaagagtgagagagagagaggaagagtggaggatgagtatgacatgtgggtcccacaaacttttttaaatagaatgctgattggactgccacgtgtacgccacgtacgccaaaaccaccgcggattggattgaggggggtatttcgtccggtatgcacagttgggggtgaaaaatatccggttttgtggttcggggggggggggtaattcggacgaccgcaaaagttcgggggtggggtaattcgtattttttcctattattaaaggaatagaaaaaagagcctctacgttcgctttcatggcctagaaattccgataatgctcttcgtcggtcgaccgacgggggagcaaaaagatcgggcgctcccccgcggccccgcccccgcgcgcagtgatattgttaggccccaccacattacctgcccccacctgcaacaaatcaaacacatattttgtaaaccctctattaagggaatttggtttattttttgttgcaccaaaaatgtttcacctaatgtactcacaatgtttcactatgtatagatctaatgttgcagtgaacgaaacattccattgcaacaaaataacccacatattttggaaccccctattaaggaaatttggtttattttttgttccaccgaaaaatgtttcacctagtgtactcacaatgtttcactatgtatatatctaatgttgtagtgaactgaaatattatttcgctatttgctgaaatattgtttttatataaggtgaaacaacacctgatttaaccgagtgaaacattttcgatctacttagtgaaacaattccggtatacctggtgtaacatcgtgaaacatttaaaaataattcaataataagttaaaaaaaattccgtcagaatatatccatgtgtggtcttgttttgaagatttaattgcaacgaatttaatggtacaatcggatcatgatttggataagtaatttaagagaaaaatcagtttaaaatagttttgcacgtaaatcgggcgctgatgtcatgctgacgtcagcgcctgatttcccctgctctccatcgggcgaccgacgtgtagtcgcgtcctagaaattctcacattaatcggagaaaaagaaaaagcagagtccatatagaaatacaatttagaaatagttgaaattcggaattaaaaataaggaatattagaagaagagactagagtccatatagaaatacaatttagaaataattgaaattgggaattaaaaaataagaaatattagaagagcatactagagtccatatagaaatacaattaggaaataattgaaattcggaattaaaaataaggaataaggaatattagaagtagagtatagagtccatatagaaatacaattaggaaataatagaaattacaattaggaaataatagaaattcggaattaaaaataaggaatattagaagtagattatagagcccatatagaaatacaattatgaaaaaaaatagaaattcggaattaaaaaataatgaatattagaagtatagtatagagtccatataggaatttaaaactaactaaaattcggaataaacataataaaattaaaagtagagtttcgagtccgtataaaaatacaatt

SEQ ID NO: 21116 - DNA, 8300 bp, Oryza sativa
tatagtatttgaagtacaatttatatcttatacattcgtataaaatttttgaataaaacaaatgattatatatgtgtttaaaagtcaatgacatcatatattaataaaacggatctattaataaaacggagggagtattactacagtcaatagagtgagcagtagaatggactggcagcgtgcacaaattgatgacctaaaatcggttcccgccaatctttgctcatctatcggttcccgccaacttttgctcaggtagtcaggtggtggattatttacaggtcgattaacagtttaacaccaacataactcaggtgagttcacgtggaatttggacgctttttcaaggtggttgaacaatctaaggagacaacagaaaaaacacgcacaaattggagtcgttttacgtgacgtgttgatgtgcccaagccataaatacttttttagtttcaataattagtaagtgactttaaaaatctcatttgcacaagtaatatctatgatctacataaattttgaacggatggaagtgtaatggaccttaaaagtactacttttagaacttaaataacattcttgatacaccatttttgtggatatattatactccatttcgctcattatggaatttattactagttcaaaatatttgataaaaaagttcagccttaagccatattgctccgtcaattaacatgtcatcccaaaccactctattagggtggtcaaggatgaaaagttaacggttctatattttacatactcatgacaagccagtaaaaatctcgtgtcagatttaaaaattgagcatgtaatctcaaatgtgactaccactatatccatttcactagtacacggggaaatcagggtctacatcttgtgcccaggactgcaagccaccgattatgtcctttgcagaaagaaaccccttctcccgtagaagctgaacggctatttgcgagtcattgcctcttcggcaaacaacataaagggaaggcggtttgtctgatgaggaggcgtccgtcgtgtccttcaacgaggtctcgagcatctgaagcttctcctccaactcggagagcgggatgttcagagattgagaaacagaagcaatttggaagtgatgtgcaggtcgtacatccaacagaagatggcgttcaccattatcaacaagccttttgtattctttacaagtgacacgggcacttcctggaagtatgtccaaacttggagctgactgcatagaacgcaacagcaagtgaaatggcataaaactttaatgtttttctttctttcagataacttaaaatttatgcactccattccagaacatgaattttagatgttatattgaaattcattcactttttaccccattccaatctcctaattgcataatccgaatcaggctgtagagaggtgttagtggtatccactaaaatggcctcgctccatatttctgtattagactaacgattagctaaattttcctagtagggaaactcactttatttacattacaacatacaatatccaaaggacttgctaaccagacaggtagtatttaagttcagctgttgatcagattagacagacagcattcctttttcaattcagtgatacatacagaatgctaatgataaataatataaattgtgaagtcaatgatctggagacataccttatcagacattggagactgcgtgaagttctcataatcaaacttctgaaaatcatcttgagtaaaagctgaattttctccacaaaccgtgcaaacagtcgagcttcctcgaatcttgacctgcagaaatatgtaagtttcagtaatgaacttcatgaagagagtgaaggaaacagaattaactttgtattttgtgcagaagaaaaacagaaacagagaatataaaaaaagcatagataagttattcccagtaaattggtcctaaagcaaaggtttcaacatcattagtacttaaaatgctgacaaaaatacaaggagttagcaaaattagtaaaactatcttaatgttcataatccatttccgtaacaaaccatctgcactaaccaaaaatccagtttttctatgttataaattgggtacagataacaaaatctgaactgcatgaacacaaccaagacagactattccctgaactgagtgatgctgagaatgatcttgttacaacatataccacagatattacatattattttgaaggccattttcaagattggagtcagagaacacaggttgccatatgaggttaacccacttggtatattgtaattacagctagtagactgctgctaagataaaagatacgagagagactacgtgcgcccattgactgtgatgcactcatgcacagttgctaaaatagctaatacatgcattgacatgtcatgtttaaactatggtatgatgtagcatgatgaatgagcaggcaggtcacagtgcgaggtacattgtcgaatttcatcaagataacatgaagatatgcaatttctcgttaaactgcctaatgtgtgaatatctgttcaagtagcaaccaaatgatgcatggtataatagtgtagtacaggaaatagaaagcaacacaagacatatctggagtcaagtggcatacaattctgatacgagcagatagagcgtcaaagagtagcattcttccacttaggggttcaccaacatcagtagcaacctttatagcctctagagcttgcaggcagccaatcactccgggaactgtaggtcaacaaagagtagttagtttactagtgcaaaattatctacagaaaagatggaatcaagggatgaagtttatgccatcttattcagtacaatgtcttcatactcacagtatgatatgcatattctacctataacagaaacaatatttgtagccagccaacctaggctgtacggagaagtaggttcaggtgcataggtgggaatgaccaaaatttcaatttgtatactatgagcaagtaattcatgtttttacaatttaccaaaggataagaaaatgtatgcacttaagtaaagtttacaaatattctaactgatgtttcacttcctataaagtgattgttcatttgtatggtcagaagcatcagtaactatgaaaacaaagaagcttgtgtatgtggttcaagccttgaacaaaatttaaaataaatattctaacttatgtttccccttctgggaagttattgttatgaccaagaagcactcgttaatattttactcagtacttaccaaccccaagaactccactgtctgagcatctctggcaggctgccactggtggtggatttgggaaaaggcatcgatagcatggacttccattatgatgataaacagtcaactgttagagaagtcagtgcatgaataaaaaaagaataaagtgaactacaagaatgaagattatcaggagtaatgagatttacctgtccttccaaacctaaggctgcaccagatataagaggctgcacataatttattaaaaagatcagtatttcatcaatgaaaccatggtaagtgaaataaacataagttattttagttgttagtacacaacagctcagtatcttgactgaaactcactaaattacatgctaagatgaaaattggtattcccctgatgaacatttgaagtattgactgcattatttacctcggaagcaagaatttaccttattcagcaacacacaacagtcactgatcatgtatcgagtaggaagattgtccgtggcatctacaactatatcatatctgtgattgatccatcagtggaaaaaaaaattcagtaaactctaaaaggcacaatatattgtctcaagacacttaatgtttcgatagcatactttctcacgatttccaaagcattggaaggtttcaaagtatgatggtactccatcacgttgatagacgaattaatcctgaacagaaatagcatattgacattacagaagcagtagcctcaatatgaaagatcttctttgaaccataaatatttcaatggatggactatataacgacaatctgttaaaaatacagatgcttactcacggcaggcgtcagccgctgacttcacctttgatttcccaacaaatgcttctttgtggattatctgagaggacattcaaggggaaaaaaaaaacagagaacgacatgccacgtgaattttcgagaacaaaatgacccactgttgagtgattatgaagttgctagctagaaagtgaatacaaattatgttcctacggttatcaatcagtaatcaaacatcattcaaataattcagaagggaaaataatgaaagtattagagaacagaagatacatggacaaaatacacgccaaattatctgtacctgtcggtgaaggttattaagctcaacatcatctccatcaacaatgcccaagcaacctaggaagacagaaggttgcaagaaagcaatgaattacctactccaagaaagtcaaggaccatcacaagtaatccatctaatcccaccgtcagctagctatacaaacatgattagttcttctcaacaaggagaataattggagcacattgaaattcagaacaatctaactgcttccttataaaactaaaaccaattagccaagaacagcttcagtaacaaccaacaagaagtaacattaccaacaccacaagctgctaggtacagtgccacgggcgagcccaatcctccagcgcccaccaccaaaatcgatgactgcgagagcttacgctggcctgcgacatagctaacaaaaagtcactagagtctccactacgctgaggctacgataacgcgccatgtgtgagcagctgagcttaaccttcgaccccgaagtccgggaggaggaggtggcggctgtaccggtagatcatatcggccgggaggccatcggcggcggcgaacccattcccacggcggcgtatggggcacgcggtggcgccgccaccgccgcctccgcctcctgcccctgtccccgccgcgtcgccctctcccgcgggcgtagggctagccccgagctgcgactctagcaggcgtatgcggctatcgagctcttccctctccgcccgcagcctctccagctcaccggccatcgcctccatcctctccctccgccgccgccgccgccgtcgaggttagtgttggagggatgaatagagtggaagaaatttgcaaatagcaccctgaaatatattcgtatcttggtttgggctgtgggcctatccttgggccttggagagtgcttacttggactctttgggcctgcttagcaactctagtactccaaatcttttacttgtacttgctaatagaattgcacctgtaatttcttgaggtactgcacacaatatcgagcgaaaataaaatgctgctagctccttttttccttcgaaagacagtacaagtgcactcacaacacatatgagcacttctaaaagactgaggaggtatattttgataaagtcgacacatcattgtcgagagatacgccatctaccgctaaaaaataattagccgtaaatagagtatcgatgtcaaatctaaaatttgtaacttggtgggcttgttccatcataaaaaacctaatcagttgacttacattcacttcgtgctgctagctcttttttttcctacaaggaacaaaatcatgttgttttcattgtcaaattgttggttcccgacgtgtatttgatactatatgtttgttccattgtatctaaaaaaaggcacgtaccagagcatgaataatagttcggacaaccttagaaagcgccagtagtgtagtgatgaagtccttggtgctcataaatatcacgtatatgtggatgtttttaataggattgtcagagatgttgctagtcattgtttctttctttaagagtttattaggaggcaatttcgcgactatttaaagttatgtggcatgtacagtgcgcacacatatttttttttgaaaatagtaagaaaagatgtcacataatcttttcatgttatatttagacaatatataatcaactcacacagcaacaatcttctatctccgttgtctctttctctagttaaaagtatcgtgtgatatcttctttcagatgctgacatctgccctaaggtactatacagtagtagtagatttgttgtcacttgggtaagtaattccgtcatgatatagaactaaatattactttcatggtgtgtttcagcatatagcgtaaatggtactttcttgaagtaactttagtgtaaaatatatataccgtactggcaaatgcggactcgttgataatgactttcgatttgaaatcatctttggtcccttatctgagggtcaagtttggatcacattcctcaagtataaaatcaggtataacacattcctctatttccaaaactaggacaaataatctcaaggcaattttggatagcgatttcggcggacgtggcacccaagtggtgcactgacttggtattcatctgatgtggtatctacgtggcataacaattagaaaaaaatatataaaaaatagcaaaacccacaatcagtcccaagaaaagaaataaaaaccagggcccacgtgtcgatctccttctgcagcctcggcttctcctcctcctgccagtctagctagcctcagccttgacctcggttggttggtccagatggtagtgcagtgacgaagagaagtaggcacgctagcggcgagcagctccttacttgtcagggagggtccaaatgcgacccgtcctcctcgccattggcaacctcgatgcagcttcctcctcctccgattcagccgcccctactccgaggcctccactaccaccttccttatcctccacaagcttcgcctggcttcctccttctcaactgcttcctcgtcaacgtgtgcactatcaacagcttgaaacccattatgtggaataagggagcaatcctcgtcaacgcgtcaatgcctcaaggagatggtccacgtcaacagcttgaaaaccatcatgtggaatagcggcaaggagaacattgtcaccacggccgaccgtggcggcttgccatttcaactttgatggcactagccgctagaggagcagcgccatcgagccttcacgatttgaaggaaaggggagaaggatttggggggagacattggagcgtcaacattgatgaggacgcttgctcgcttgagtctagtgcaagcttgacctcggtgacaaggtggcgcaacccgagcttgacgatgaggcggcccaacccgtccctctccctcgcctccaacctatcctcctcaatcgacacggacagccgtggccccctcctcgctggttccctcgccttgaagagctcactggctccctcatctcgcctccaaccgaccaacggagcctcctcctcgccaaccgctcaccgtagccaccgccggccaccaccactgccatgccgccatgcgcgccaaagggagagggaggagttgtgtcgaaggtagtcgatagtgatgacgcttgagctcgacatctgccgctggccacatctgggaagggagagggaagaaaggaaaggtagtgtcaccagctggagcctggaggagagagggggaggtggaggaggtgtggcccactacttttgttctatctttttgtttgactagggcccacatattttgttttatttttttaatgttgcttctagtgccacgtcaatggcacgtgtggcgaggaccaaatcaaatgagccacgtagatgtcatatctaatgaaactgccatccaaattgccttaggatattggttgtactggttttgagagttgagcttcttacctaaaatgaacttgttcgtttcgcatttcggcatgtcctccacccctttattctttatacttcttgtttaattataagacgtttaacgtttccttactgaacaaaagtaaacatgaaatggagaaaagcttatactccatccctttttaatagataataccgttaacttttagaaacacgtttgatcattcgttttatttaaaaattgtatgtatgagatataaattatgtttaaagtacttttgtgataaaacaactcgcaacaaaaaaatgataattaaataattttttagatatgacgagtgatcaaacgtgtattcaaaagttaatgctgctatctattaaaaaaggaaaaggatgtagtaaatgtctacagtgaattttggatttaagttgggttagaacacacagacacagtgccgtaaaataatgaacctttgccatattcaagtccagatactgctacaat

SEQ ID NO: 21117 - DNA, 9174 bp, Oryza sativa
ggcccgacgatgccttatgttttccgtatcaaatcctattccaaatcgcacaaatacctgtttgcggtttggttcagatgctgtgctgctttcatttcgcagcgaagattcctttccggtgtcaatccaagcgtcaactgctgcagacagaaggccatggttctccactcgccatgattcagattttgagcctaacgaaaacggaggacacgcctgattgatccacccgaataataataataattctgcgaggctgccacatcatccatgaccgcatcttaagcattaatcaaagccctaacagcggatggggacaagaaacagcaaacccttgatgctggcaaccggataagatcgagttggatggagagagagagagagagagagagagagagagagagagagagagagagagagaagcagcagtggtagtacttgcttcctgtatcccacaagaaacaaagcatcagattcctgaaagaaaaacatactactactactattacccagtcaatttcatatttttgtggaaaaatttcttcatgacactatggttatgtttagttctacactaaaattgaaagtttgaagaaattggaataatatgacggaaaagttggaagtttgtgtgtgtaaaaaagttcgatttgacggaaaagttaaaaatttaaagaaaaatgttggaatttaaacatggaagttgctataagattcggattttatcttcatttctgttagcatatttttcaaattactagacggtgtgttctgtaaaaaaacattctatatataagttgctttgaaatatcaaatatatctatttatcaaattattataattaaaacttaattaatcatgcgtcaacacctttctcattttacgtgcgcgaacctaacctttctcattctacatgagccaacttaatcatcaacttcatcggtttcaaacaccacggtgtacaaattgcaaattagacacctgatatttgtgagtatgacacgtgggacccaggtccattaaccagtggcacgtgtactgcccattttctccgcatcgctaggtgggtccggtggttcagcatcaatggttaattaactgtcaccgctttcttaccgtcactagctataggacaagtggctaagctaacctaagcacgacaataattaactagatttttcacaatttggagcttttaaaatactttttttttgcaaataaacccctgaaaaaacttgtcctaaaaattgtctatttggacgccagagtcgctggtgccgtcctcttgtcccccacccctcctagaaaaattttaattagtgtagaggagagagatgtacaacttttttttatctttttgatatatttttacacttaggagcacataacaaccaaccatagaaaatagacgaaatatgtaacttgtagaattttttaaagctctgtcgaaaagtttctcgcctcgaaaacacaatcttacaagcggaatttggagattataatttcatcgaacacggatgtaactttttctgtagatgtccgtggttatattattttcctgattctgagtatgaaaaaattgcgcctgttttaagaaatgacacccaaatataactaataaaatacaaaccctaacttttttataggatgtaaaagatgtaaaaaaaaggctcaagagtgttcgaaatctaatctaccttttttttactatatgaaaaaccaaaacgaagagcagggagagagcgcggggagtgggggggggacttttcagcagagctttgtaaaattctacaagtcacatattttatccatttaagtttaatttttctatggttggttcttgtgtgctcctaagtgtgaaaaaaaaatatcaaaagaaaatgagagaaagaaaattggggtgggggaggggggcggcgccaaccacattggcgcgctccccctgccacctcagcgccgccccgccacagtggaaggaggctggcgccagtgactctggcgtcaaaaaatgattattttttggataagtttttttagtgactatttgcgaaataagttttttaaaaggactaaattgtgaaaaatccagcaataattaatggagaaggggtcctatatatttcggtgcagctttgttcaaccctgccctctctgctgtgcttgcctccaaataattttttcccctccgcttttgctgcctcgtcttctctagatcttaattaccacgaaattgcaatgagctagctcgtgtttgcgagtataggtagctaggtagctaggcgtaggggaggttgccggagaggcagggatcgatggaggtgttcatccacgaggagtacgtgcacaagcggagggagcagcggcggcggcggggacggcggccggcggcggtagcgctgcagctgctgcaggtacagtcgtcgtcgacgacgacgaagccggagaagaaggcggcggcggcggcggcggcaggaggaaggcggccgctggctccacttgcaacggagcttcaggatagcccgtgggacctaccggccggcagcggcggcggcgcgtcaccgtccgacgccgctgggtctccggcggcggcggcggcggctaccgtctccttcgcggaccatctcctcggctacctctaggtgaagtacagagatcggttgattaattagctagctatatatgcgtgtttccatcgtctgcctgtaattaagttggatcaggtaataataaatccgttggcatgattttattcttgtccgagctagctagtgtgctagtgtgttcgatttttctgctttttgtaagcatgaaattctctcgtgctgctcaacgtgagagtcccttgtaggaggcaccaatatttttggagttgatcaagtggaattaatagtggattatgctgcgtgattaattaagctaagtagattaagatgggctcgtgacttggttaatcctaaatgcacataggaaatggtaaaatactcaccgcccaaaacaggaatgcacataggaaattgctgaaaatcctaaatgggagaatcagcagatcagaacgacaagatccactttcccgtgatttctgtgtcacagtaatgtcatgatctcacactacaggtttcccagatgcgcctaggaattaacagatgggcaaaatttgaagcaagagagaagagagacatgagaagttgagagctgacgtgcatctcaccaaacaggtccaatttcaaccggaaataaaaatcctctattcaaccagaaataaaaattctaagtgcggtatccaatgcaaataattaaactttaaaagtgtttattccttacagattaaatttttatcgtgttcatgagctaaaactacatgtccgtagtgttgtacatcaaaagctaccatattattattattttttaaacatagtttttgcctgttggactctgaaacagatacatgaaattgacaaaacaagcgatttaaacagccttccatggtcacaaaactgatcttgaaaaaaaaaaggtctattcattcactaggaatgtgtccatttcaatgtttgtcccgacctctttctttgtgacagccttccccacgaggacatgcccccccccccacccccacggggatgcacgcacggaccagaaaattggtgtttcactcaggtaagcgcctgtttacttcgtgaaaagaaaatttttgggtgtcacgtcgaatatttgaccggatatcagaagggtttttcggacatgaatgaaaaaactaatttcataactcgcttggaaaccgcgagacgaatcttttgagcctaattaacccgtcattaacacatgtgggttactgtaacacttatggctaatcatggactaattagactcaaaagattcgtgtcacgatttcctctctaactgtgcaattagttttttcatttacctatatttaatgcttcatgcatgtgtccaaagattcgatgtgatgtttttgggaaaaaaatttggggaactaaacagggcctaaagattactcttatacgttaggccgtgtttagttctaaagtttttttccaaacttccaacttttttatcacatcaaaactttcctacacacataatttttcaacttttccatcacatcgtcccaattttaaccaaatttccaatttcagtgtgaactaaacacagccgttggtttataatttttttctgtaactttttatttttattcttcgaacagcacctttaaaatgtagattaattaaaaaacatactactttctatccaaatggaaaaattactccagatcaccttttactgaaacagtggaaagtatttgaaacatctcaagttcacttcattacaaggatgaaagtatttttttctcgtattttctcttttttttacgattacacggcatatgcacgcgcaacgccacattacactcacatcctcatgactacatcccctagcacacattcaagaaacaaaaatccaacacatcactaatctcattaaaattttgttgaaagctcaccttattttgtccgtgaccttggtaacaataggtggtgtgacaaaagagtgcatcaactttataacattttttaagatgtcagtaaatcatggacaaatagtaacactctcaactatactccatccataaccataaaaaaaaactaataccggatgtgacacatcctagtactgcaaatctaaagcgtctcacccagatttgtagtactaagatgtatcatatcttgtactgggtttgtttttattgaacggagggaaaatgtggcataagtccataataaaatcaaatttcccatgcaatatgggacacaccaaagcaccactacctaatctgcattttcttttccttttatttaagagaaaattccttgtgtgcccttcaaaactcacccaattccttctgtaccctgaaatttactcaatcctttctatgtcctccaattttttttatcccttatgtacccctaccattaggtttccttcaatggactggttagtttgtttgcaaatgttcattgtgccgttgagaatggaggagttgctggaagctgagtgcctggttggcagagaatttgataaagtttgaaatattcatgagtgaatcataggtgtgttttatgagactaaaataatcagtgcgttgaaaatttaaaataattttcttcaaacaaatttaatgcattgaacttttgctatatcatgtactagggcaatggatcctaaaagggtactatgaaaattttaaaaatgactggacattatgatcccatccatagaaaacactgttaatgcataattaacgaattacttcataccatgcgtacaacacattaccatttccatacacaaaagcgcaattaacaaactaaataaacaagataggaactgtttatatcatgagcatcattgccacaacagtagtcaccccaatagcaagcaatcctgggcattacggtgctatggtagcaaaaatcctgagcgggcttttctacgctgaattgttttcttgaagttcccaaattatctcctttattttctacatgcacattttttcaactaccaaacagtgcgtattgtgtaaaaaaaatatacaaaagttactttgattatttttcagaaaaaaaataatacttaattaataatatactaataaatcgttctagctgcgcgtagttcccaacagcaagtatcgaactcagcctctgtggtggtctccattgctctgcctgcacgtgccaattgcagcataccaagttaaagcgaaagccgaaacaagcttggatatgaaacaaatttaggcaccatgcttttaatctggaagctgaaacaaaactttttttatgttgttgacctctttgctctcaggacacataaatttcagtgcttgtcaacttttgtttatatttggaataagttcatctaaggtcccttaacttgtcaacgaatccgattttcgtccctcaaccggaaaaccagatacaacgggtccctcaactatcaaaaccggtgcaaattaggtctctcggcggttttgatggcggttttggctgacgtgacgcctacgtggctaatttgacttggtcttcatctgatgtggcattgatgtggcgcttacgtggcaatttgatccggaaaaataataaacttcgcgggacccacatattagtttcacacataaattaataaagaaatggtggggcccacgtgggcccccctccttcgtcctctttccccacctcccctctcttcatctctcccctctcctcggacatgcgggaggcagcggcggagaccggcaatgccgacggggcgacggcggcacgaagccgacggggcggagtggggcagcggcgggcggacgcgcgcgccaagaggtggtgggcttctcttttgactttattagtgttaggaataagttcatctgcaggtagtaatcctgaccctgcatagatcgatcgtgtgctgatcaattacttctgcttctgatactgtaatcctgcggcggatcaattatttcttctcctgatctgagcaatttgcgccacggatcgtcgtcgtgagcctgtatcgatcgatccattgtgtgcttgtgtagtttttcactgggttatattcgttttagggttggagcgtgcggtgcaagagctgcctgcgccggcttctgtagtcgctgccaaatccgaagctgctcctgaccaagctgacgacgacgatgatgcccaaactgacgacgaggagtagacgtgcggcaggaggacgccggcgcacagcggcgcgaagccagcggagcggggcggtggcggcgcgcgaagccagcggggagagggcaagagatgataaaattcacgaaatttcattaaattcaacgaagcgtgcgtggagggtggtggcgcgctggaagacgacgacgacgaggctggcgctcaccgcttggctccgccgccccgccggcttcgggcgccgccactccgtccgcgcgtccgcccgccgctgcaccactctgccccctcggctgcgccgccgccgcgggcgtagcgccggctgccggacctccccggcgcctggagagaggagaacggagagagatgaagagaggggaggtggagaaagaggcggaaggaggaggccgagaatgacatgtggggcccacgtgggcaccaccatttctttattattttatgtgtgaaactgatatgtgggtcccgcgaagtttattatttttccggatcatattgtcacgtaagcgccacgtcaatgccacatcagatgaagaccaagtcaaattagccacgtagacgccacgtcagccaaaaccgccatcaaaaccgttgagggacctaatctacaccggttttgatagttgagggacccgttatatctggttttccggttgagggacaaaaatcggattcgttgacaagttaagggaccttagatgaacttattcttttatatttacagaaaaagaaaatttcagttcccttccccaaacccaacctgccgagcccacataaggaaaaagtacaccgatggtccctcaacttgtcatcgagttactaaatcgtcatctaactacaaaaccagatatccaacgtcccttaactaatcgaaaccggttacgataggtcattaggtggttttgactctggttttatcctacgtggcagctgagttagcgtgggacccacgtgggccccacctgtcagcgtggccacatcagcctcctctctcttttcccctcttctctctctttctcatctctctcccttctctgccaccgtcgactgtcccaccagcatgaaggacggctggagggcgcaccagcgcgtcgcgtacgacggcgaggccaagaaccttaccgtcgcgctctcctacggcgacgcggcggcggcccgacggatcccgtgctctggtacgccgtcgatctgatggagtacctccccgatgccgtcgccgtcggcttcttcgccgctacgggcgaggccgccgagctgcagcaagtgtagtactgggagttcaccaccagcatcgaccccaaggacgtgtgggtggtgttgggactctacagcttgcttcttgtgctcgtcgccataggggtgctctggttcgtgtcacaatggaggaaagccggagagctcgccgatggtgacatctttgacgagatggtgtacgacgagcttgccgacgaggagttcttcgtggagagcgggccgaggcggttccggtacagcgacgcgcgtccgcatccaacgcgcgcgccggccgccgccaggtcaccgccacaccttcctcctcccccgcgcgccggtcaccgccacaccttcctcctcccctccgtctcgccgccgcccgaaacggcgtcggctggggcacccggcgcccatggtggaggcggctagatccggattcgccgtagcctctcagccatcgacggtggccggcggcggcgcagtgctcgcgctcgtcctcctcctcgtcctcctcgccgcggctgagtggtggcggcggcggagcccgagccctagtggtggtggtggtggcagcggccgcagacctcgccgatggcgaagaggctacggcaaatccgaggcggcggcgccatgctcgcgctcgtcctcctcctcgttctcctcgccgtcgcggcacggcgcgggcgagggccatcggctgccgcctcgggcgcagcaggagtacgacgtcacctccgccaccgccacggggccttgcgacgcctacctcgtgttccgctgctccccaccgctctacgcctccgccatctccatctccaacgtcctcaacatcaccgccaccgccgtcaccgaatccaacgccgtcgacccggtcacccctgtcgccgccgaccccctcgtcctcgcgcccgttgtcggcgacctcatccccacccgccggctagcttgcccgagaggagagggagagagagaggaggaagggagaggaggggaaagagacggagggggatgaagtggcattctgacacgtgggtctcacactgactcagctgtctcatgttgcgtttaggggacgattttgtaactcgatgacaagtagaggacctcggtatactttttcccccacataatgctgggcccttccttagatagcccagggcaagcccggcccataagcccaggccag

SEQ ID NO: 21118 - DNA, 2272 bp, Oryza sativa
cgtgggcggatcaggagcagaggaacggcgggggccgcggcggcggcggcggggaggcgaagcggtcggagatctacacgtacgaggccgggtggcacatctacggcatgaactggagcgtgcggcgcgacaagaagtaccggctcgccatcgccagcctgctcgagcagcacaacaaccacgtccaggtggtccagctcgacgagtcctccggcgacatcgcccccgtcctcaccttcgaccacccctaccctcccaccaagaccatgttcgtcccggacccgcactccgtccgccccgacctcctcgccacctccgccgaccacctccgcatctggcgcatcccctccccggacgaggccgccgccgccgccgccgccagctccaactccggctccgtccgctgcaacggcaccgcctcgcccgacgtcgagctgcgctgcgagctcaacggcaaccgcaacagcgactactgcggcccgctcacctccttcgactggaacgacgccgacccccgccgcatcgggacctcctccatcgacaccacctgcaccatctgggacgtcgagcgggaggccgtcgacacccagctcattgcccatgacaaggaggtctacgacatcgcctggggcggtgccggcgtctttgcatccgtctccgccgacggctccgttcgcgtgtttgatctccgggacaaggagcattccacaattatctacgagtccggttctggcggcagctccaattcggcaggtgcagatggcggcgctgcctcgccaacaccgctggttaggttagggtggaacaagcaggaccctaggtacatggcaaccatcatcatggatagccccaaggtggtcgtgcttgatatccgctacccaacactaccggtggtcgagctccaccgccaccattcgcccgtcaacgccatagcatgggcgccacactcctcttgtcacatttgcacagctggggatgactcgcaggcccttatatgggacctgtcatccatgggcactgggagcaacaatggtggcaatggaaatggcaatgctgcagctgctgcggcagctgagggcggtcttgatcccatattggcgtacactgctggggcagagattgagcagctccaatggtcagcgacccagcctgactgggtcgctattgcattctccactaaactgcagatcctcagggtctgatttctttgttccaaccctgttagtaaggggacatcgacaagaacaaagaaggccagcatggataatgaggttaggtgatcagaggacattgttacttcagtcttatttattttaagttgtgcacagatgatatgcgcgctgagttggttctagtgatataataaattgtttcctacctagaagctggaattggcaatgaactgagctgttagagtaattagctgctctaggtttagtattgatgttaatgtggattgtagttatgtttgttgcttgttctcgaatgtccagctccagtagggcgtaggttcacctcttgacttccatgttgtattttgcactcgccgtatatgcacttataagttataagcttgtgcgtgttattttgtttcagatctacggtgtttctcatgttgtgctgttgaagtagaactaaatgcatgaaacttgacatgctatcaaagccaagtgttctcgctatcaccctggatggcacacttttaagaagatccttgtcatgtggtgaacatattggtactttcaatttagtatgtgcaatcttcagagaccagtagttgcattgttatgtcttccattggttcacttcaattcatatcctatggcctcattgtttgtcgttttattaggtagagttttagccttttagggtccggtactatggtttgctggtgtgggtggtttgataatctactgtagcttgtaacagttattgatgccatgtggtcaaatagaatcggcctttttctggctttctgtaacagttgtagctgcagcaaatgaatagatgccctgagttatccttcaaaacataaaataaaatgaaaccttgtgtcttctgtgaatagtgccacaacaataaggccttggtgcttatgggtgcatctttattaagtatcatctttggctttgttttagttctcttctagtggtgtgtttctacttagttgtattctttcttttgtgaatatgatagttgcacatcttccattggacaagttggaaaacaactgagatgtgtgtgaagtcacttagagacaaaatgtttcccc

SEQ ID NO: 21119 - DNA, 9516 bp, Oryza sativa
agctgtagtctttgttctgactgacttaacaatgacttcttaaaagggcttatttggaagggacctataaaaattgagcctttctttccaatttccaaaaaataaaaacatagttcagaactttcagatactaaatcacttccatttactggtgagacagcaataataattgctttgaaactgttattttgatgaaattacaacagcaataagtagcattttaaatgaaaaagaagaacgataaaaaaaagttttggctttcaaattagaagtcaagattaatacgaaaacccccaaaatacagatcataacccgtgcatcagatggcatattatcaagtctacttggacagcatgggaaaatgacagcttgtctgcatatgagatgttactgtttgagcaaactctgaatacaaagtaaacgcatgactttctcaatccaatcagcttcaagcttacatatgtgcaccaagactattggcgcaatcatccactgcttagttagcaatttgtcattaagtaaattcagaagaaataaggttactgattcaaatgtcaactgcttacagcatttgcaagaaaaaccaaaagatgatttggtcacacctgcgtttcaccctggatttgtattctgtagtgtgtgaacacttgcatcggcaacttgggctatgacatcaaacatcagttaagtacaaaagttaacaggacttctcttatccctaatgactgtttatgtttgacattgtaactgaatagaataaagaggaaactgtcatgagtccaggtcgtattcataccgaagcatcttttaaacttggcatgttttcatggaaaaaagaacagacgaatcaatccaaaatgagtactatttctgatgaatttggataaaagcaaccagctcatgtttcataggccaggattttgtatgtactgtagcatgcgaagaccagcccattctctgaagattctaggcccatgtttcataggccaggattttgtgcagattttatgtccactgtattaaaatctcaacagctgatgctaacaagaatgtaaattaagttcaaccctgaccatgtagccgtcaaccatggactgaaataactgaggccgtcaaaattttgcaagttgtgacaggtgtgtgatgataaacattcattacattaattaatgagtagtaacttctaatccatctaccaagagagtgataactgataaggaactgattcacatctgatgcattgcattcttggtggatagggctggtatgaattgcaccatatcttgatctgcaatttgcatgatgcataagtgtacaccaatttgcagattaggactggtgcttatgctgtgagaagagcttacagtggcaatacaattatggggtgggcaattatcacggcaattatcaccaaaagcagagaaagaaacagcagcagcactgtacatgctactgaaagtctgcacatgttcagtgcctgtgatagctgcttcagtagttctgacacttctctgagtcatgcaagagaaatccactgtatgtttaattttaaatggtgaatacaacagtatgttgcatgagcatactatgtagtagctgagaagagaagtttgaaagcacaataattcaatgaaagatttctcttttttttctatggctacagaaaatgagagtgcatttacaaactggaaaaggatatagtcaggaaaaggaaaagatttctgatttttttagcaagtccaaacattacttgggaacatgatgaatcaggcaatccaatgctacactgctaactggtacagactagagacacaagaaaacacagaaatgaacaagaaaaaaaaatacagcaaaggcctacacaacctcaattaccgagcatgtttttattactaagcaatttaggtcctccagtttaagtgatgatgaacgtggtctagttatgaccaaaggaggacctattttctccagcgatgtatttacaccaaatgaaagttacatcatgcgctgcaagaaaccaaggaatcctcgtaagttcaattgtccacaattcttggacccatataagttgacccgacaagatgaaaattgtctggtggttcacactcctccagccatgcgtatccatcgtctccaggaaggggctttgaatctcctgttaaaaatgcaatttttataaggttaatcaccaatatttaccttcctgtcaagatgcataaaatgtatcatacagagaacaggacagaggagatgaatttataacaagtgtgagataggagtaaatatataacagctaactaattcagagtacagataatgcggaatattcctgccatataactataaccatttcagtaaataggacacaacaagcttgaatccattcgaatccagagtacagataatgcagaaaattcccgccatagagttatagccatttcagtacaaaggactattaggattatttattaatctataggctgtttatctcctagacctttactctcctagacctttggtcttatgtaactcactagtattgattgtatctcagcactagcattcattgtaattcagctatatatatgagagatcagctccccacattggtgaggcatctattctactttctctacaaggacaatacaaacttgaatggtttggaaaataacaaagattgaacactagctaattcagagtacagataatgtatgagactcctatcatatgatttcaaaggatggataattggatatgcacgaatctatgggtgagcagtttctatgcaagtcaaacagatgaaacttatcctgtgcatgagggcaccaagtgcctgagtgaatgcaatatcaagaaaaggcagaactacaagtacatcaataactgaacctactgcataactatcttagatcaacgaggagaaaattctttctacttaattcaagcaaacacatcctcgtatccgacaagaatagatttgtgaaatagcaattatatataaatgtaaaacctaaaagatacaatgtggaccctatatacaagcagatataactcggttagcaaatagtaccagcagaaggtgcagaggaagagacgttgtagtgctggcagtgcctcccactgccatcgtcatatggtgggccaaggacatcaagaacagcacaagcagtatgtgcggtgaagcagtgcaggttgccaccatcttccggatatagtaccgatgttgcacaaggtgcattcaaggtgccatcaaccttcacctttgctaagcgggctccttgcaactgagcatctatactcaaaacaaaaatgaaaagagaaaccccttggtaaaaattatgtaaggaagtttatatttgccaggaaaatgaacaaagcataccagttgaatcttgtgaggcatcagcccaatcataggacttcacacgcagctcaccaaaaagaagcttactgaacacagtcatgttggggtgattatggagaggaatgacaccccttggaggcaaacaaaagatgccgatctgtaggaacaagtatagacttatgtaccttagcacacaaaaacgacaaattttctagttggtaataatcaagaacaattttagttgctattgcgaataaacataccgagaaagcctcacactcataaaggtgtaagtaagtgattttaggaatgccattggaattaacacgccggaaatatgacatgtttcgagttaggctgacatctgccgctgaaatgctatctgcacggtacaaatgaagggacaaacatcattagaatagaaatatgaatgctgtagtaagtacaatccatagacatttgcaatctctctaggatatgaatacccattggacagagtgcacctgtaatatacgaaggtctaacacatgcagcaagcttggccaacaagataagcacacgatcctacaatatttcagattttcaatcgagagacttatcatgatgactactacagaatatagatagtgctaaataccaacatcgaagaaaagagatgatatcaatcttaattagagcttcgttagttgggtagaaacaacaattgccatatataagcaaaacatgctggactcagcattatacactaaattatcatatagcaggacttgaagggaaggaacacataagaataaggtcttatgcaaaaacacatgattgctgtatgtttgattggtacatctaaagtttcagagcagagtgtagcatttaccccagcttggtagttcaaaggaccatgtagttcaaaggaccatcagatcaaaaggtaagtactgagtcaatattgaaatgcgatcccaatatcccatctccatgaattttcagggtcaatctcattatcaacagctatttccatgagcttgaagttggacacaaatgtcaggcaagtaggcaactataacccataaatcaagaattttgcacatatactacaatctccagggtccagggtgatcaccgtcgaagcacgttacgttaaaagtaatccatatgcatgcatgtaggtggtacaggctcacagtggagttggcacttggcacaacaatcaatcagggtacgtccgacacaaggaaagaaagaaatactatcttagggacaaaacatggtacgacaacagattccaccattaaccttcctcaagaagagttcagcagacctgatcaagttgacctaaactaactatttatggcaactggtggcttttggaacgaattggattaaaaaaaagaaccctaacaccggtccaaaatgagcataatcttggccgtaccccctgcacccccaccctactccacaaaaccagcaaccacgtcatatatataccatgggcagtacatggttttgcttatcttttgctccattgtttatctttcaccaggaacagccagcacaagtcaggacctatgcatttttctgacaatctagcatcactacttgcaagaaaaaacatgctgcagatgatatttgtatcacagattcacaggcacacagcatggtatacattatttaaaaaaaattcacaacatggtaataacatcaaaaaccattttttccaacagcttatcagtttgttattccatcctctaacttatgatttgattacaaaaaccatcttttagggggaaaagaagaaataaattaacttacgcaagaaaaccattgttaatttgagtgtatcaaatgcacctaaagcaattgtacgtactagtcagactcttatttggtagacaccaactaaagaaaatcttgccgttttttctacgaggaactcaccaatatcgaacacttgtttccaccaaactgaaaatcttgatgggacctaaaactaagaagggatgaactgcgccacctaaatctaatgcaattatcacaagatcgaaacacgatgccaccaccccaagtacccaaccaatgatttcgattctctaccaagcgtccgccgtggagaagacaggcaggaatagcatcgaacacaaggcaggcgcgcacatgctgcttcgctctacaccgaacatcgattctttcgagaccccccatcgggtgcaagagacttaacggggggagggattacggattaccaagaacggacttgatcctctcgaccccggcgggcgagggcaccgcgccggcggaggcaccgaagacctcgcggcacgcctcgaagagcccctgcaccgcgggcgacggggctggctgcgccgccgcccccgccgacggcatcgccggcctccgctgctgacgccgccgccgctgccgccgcgcgccggcggggtccctcgcccccgacccaagctccgggaggcccccggcctccacccgcatcaacggcgggggaatgcggcggcttggaaggcgagctggggatcggagaatggccgcgccccgagcttcgcgtcttcttcttcttcgttcttgggttcttcctcgtcggaataatgaggaggatgcgggtgattttttatactcgagatggctagtattttattggcacgaggcttggaacggaggtggtgttttttttttctttttaacaaaaacgtttctcaaactattcaattcaagaattcgtttgtaatttgagatcgccatcatctcaatactaccaccatttagtacccccattgttctgtattacacgacattttaagtttgattaagtctatataaaatacacccttccttttaaaatatactaaaacatactcccttcagaaaaaaaaatgtgagtacgaggttgttttttactaagagagtaactgtttgtgttatttttaaaatctttcaccctaaaaatctctaattttattggacacatgcactatatttattaggatgatctaaataataattatttttttagtctttgggttaaaaatgattgtctttgctttgaaatggagggattatataacatctatagtatgcgtgctcgggtcctattgttgtagttctgcagctacaacactgccaacagctatagcactgaaacaagcgtaccaaagcactagttactgttgatacagctatagccatagcaaaactgtacaaacaaggttaatatcaaattagttacattattaaacttatcactaaatatatttttgtgggtattttatagtgtatttgttttttattaggaagattgatattttttttctataacatgagtaaatttgaaaatgtttgactcaagaaaaacatatataaaacgacttttgatatggaagtacccgatggagtattggctgtattgctcatcgatatctcaaactattattaaaggtaaggtttattagtctaactctccgcctaaataataattatgtatggattgcaaattttacgtgttttgacctcgatgtgacacctcatatgtatccctgctaaattctaattatcctttaggcgtatttattaaagttgctccctataagcacctttgaagtaaatacaaattcagatggatgtctccatttcgtccccaatatcacttaaaaacataaatattaagaaatgacctaatatcaaagaaatagaaagggtgatactttgaacccaaaaacggctaacccaccaccggtggagctagccggaagacccattcgtgttttttcgtccccattatcacttaaaaaaacatgtttatgatttttcatgtacatgttgaacattgtttggacatttaaaatcaccacaatattttggataatctaagtaattcagtatgttcctactaaatccatgtaagcatacatagtgatgacgatacacgctggtataatctataatatatgtcgctttttctctgcttttttatatgtgagaaaatggcattccatcatatcgaaattagcagcagaaaaaagtgagccttccaacaaaaagtttgctttagccgtccacattttgttatcgttgtttaccagtctgcacacaagccaggagaggctggtgcttttgaaaaaggaaaaaaaaatctctatgtttatacttatactaatactactagttagcttaagtgcaagtcagattaaaagaccaaaaaccagggaccatcacatcagcattcctgtgggctgaagcaaacagcctatgaagctttttgcaggaggacccctcctgccctttctactccttggtggcatgcctgatttgtcatttgcaatgtgcacctatgcaagaaccagtctgaatgtttgctgcaaacagagacagatgatgtacaccataggtctaccacctgttgttttgtttctgcagagattccttctggttctgaatatggccatcctgttcatctgatgatgatccgagggatggtgatatttgaagaattttgtgtacatccactcacacatttgaatcgtttatacatttatacacgcctaaggtatgtatgccacaacttgtcaagctttttccgctgaagtgtgacatgcatgtcacaatttttcgtaaagaaatcatgcgccagacaaaccttagaaataaattgtacccatgacagatagagaattaaggtagaattatatggcatgtcaaaggtattgacaacaaaccaagacacttatctaagttcttttttttacaaaacaaggttgattatattaaagtattacaacctcattgttgcacaaaaaaaaataagacatgacctatcaacaaagaacaaagatacctcacatattgaaaaaccgcaagagatacaagcatacaaatgcatccacgatgctgacaaacttcaccacacacaaaggtatttgaacaggtatcaaccataatcttcgctccttttcacaaatcttataagctggcatcaccaaataaattagtgacacccaccctaagctagcgttgctgataggatcatcggcaacccgacaaacaaaaacacttatctaagttgatcaatcctaagttgtcaaacaacagaaccacaagccagacatccttaactacaactcacaacatttcgaatctgtgggcaccttggctgttaacatatcgaagcagatcaaataggagttgaacgcataaataaaggggacccatatgtaccattatctccctccagcctccaggattgcgaagtccaaagcactgacacagcacacagcggtatgatgggttaacacctgcggcgcccacggtaatgcgacgcccagtcttcctccccttgtgcacaccaacgtcttacacaatgtgtttttcctgtcctgcgtgatgccagcatgagcggctccacttggcaaaagatgctactatttgatacagagcttgctcgaaaatatcttccagatgggatgctacctcttttcttctctgcaaatcatagcctctgttagccaaactggagagagcttgttggatggcacatcacagtatcaatggccatcatgccatgggacgctttggccaaaaatagcgtgactttgtcccagttgtagtgatcaaccaaatatttgtctaacaaaccgtgccacgggaaaacttagtccacgagccaagcatgatcatggtcttcttcgtcgctgtcatcctcgtcgttgctgtcatcctcgtcctcgtcctcatcgtcactgtattcttggggcccccagaacctggaaacctccttgctgttgccaggtaaagatacagggacagatgacatgagaaagtctcggtagtgaaccatgtcgacttcggcggagctccccgccatggcgatcctacacccgtccacagccatggctgatagtgtgcttctgtctgccgatttagcaggctcaccgcagctcagtgtgttcgcaaagtggcccgtctgtgtttcccagacatggacctgaccatctgatggtgctccagttatcaccttgtatggatccaagtgaagaaatgtcacgggttcgtctgattctgattgcaattctgccactatatttgggagttcttgagacttgcgtatgtcccacagaagagccctgttcgatacataaaaaaaaagatgatat

SEQ ID NO: 21120 - DNA, 6739 bp, Oryza sativa
gaaccagaggaaggtggtgccattgtgtcccaaagtttaacctgtgacacaaaacaccaaaatacattcatttttttacttggatgcaatgaaggaaaataggaaattgtgtagtaccagttgtgcctaatgggccaagaatgggagcaaatggaaaagaaaaggccaagataaaaatcaaacattaccaaccataaggcccccatgtccccccccctatggttgacatataacagcactaactagagactatagtgtctatggctgaacaggagtgatggtcattacaaatttaggtgtagcatacaattctctaagtattcagacaaataaagaaaaatgtttctaaacattccacatacctttgaatctttggagcagctgaccagcagggagggtttgtgcctgacatgcaaggaagaaatattatgtttaaacgagggattgtgctgctgcattgtaacctagataccttatcatggcttgaataacttgtttcattaggttcatgaggaaaatatgcaaaaagtaactgccatgagaatcacttcataagagatttattgctaatttccacatcaactagtagaaattccaaaatttacgaattgttctatagaagaaaatggggctctagaaaggttttcatttataaaggttttctggcaccaaagcatagaggttcaaggcaacaacattgaaaagccacaatgagtttaaaaggatgctcttgtaatttgtaaaaggggaaaatggttaatgaatggcagtgagttttgtttagatggtttgacactatgtacctggcaacagatagaagtgacagtgctttttcatggccatgaaatgttgatattagagggtgatttttgcctcttgtactcatagaccagaggcgaacagtgcagtcttcccctccacttgcaagtagtttaaattcaccatcaccaagcaatttgtcagacagagcagtcacgggccctgaatggcccctaaaacaccgtgagtggccctaaatcacaacattagaaaaccatccataagtttttgcatccaataaagattaggaaaaaaaaacacatgtaagcaatttaaacaggttatacgctaacaaagttctattgttcaatgctatcaagcataccttccaacaaagacggactgtcctatctgcacttgaagtgactaatgccttttcatttgtttgagaatcacctcgaaacaatgggatatcaatcagtgggaataatctgcagacgaacaaaaatcagtgggaataatctgcatagctaacaaaagaacacttcaagattgtgctagtacaaaattgatgttatcacggcgaagcactagaagtttgcctcacaaaattcaaatatgcaatctagcactgaaactgattatagaacaacagtagtttccctaccaaaagaaagcaaagttaaagcaaaagtcagatttagtcagatgtagatctttttgtaacaaaataacaagagaaaagttgtaggcacgaattataccaacacaatacaggcactgcagtatccatggaatttgcagcagatggactcgagtgatatcaaccaataaagtggcaatcatgggaagaaattaactgtagaaagtattgtgttttggggtaatgaactcttttctagctttgcaaatttaccatacattaaaaatctaacatgatcatacattattgctagctaaagtgctaaacaaggagcactggaatagttcacctgagcacaagtgcataacttgtacatcaatacatggcatgtcttacataataatggaaatatcagcgttcatttgagacatcaatacatgacgtgtcttacataataatggaaatatcagtgttcatttgagttttgatattacattggctgtaaagattcatgaagctcaactacagcagcaaatggggataggtcctactgtacggacacacttgtaaagcaagattatggagcatttattgctttttacgacccttgacactgattctcctcacagggcaaaaattaatatatgctgaacattacatatgatgctcaataagaaaatctacaggtgcctgaataaagaacagtggctatgtgtttttgagttacctcatacaagtgatccttgcaccatgagacttgtaggtttccactaattcgatttctggacaatcaaccctcaatcttctgaccattagaccctgtgcagaacaaattgcatgatgataggttgctttgcatagaaatggacttcttatatagaatcaatactgcaacagtgctcaaccaaaaatgcacaactacagacatgctcaaaaaaataaggggcaaatagatcttggtgaatttctacttacttgagataaccatatgtagttcctatccagcattagatggcttggtgtcacttccgtgggatttggataataaaaagccgaaatgggatcaacaaatttcatctgatgtacttcagtgtgcctgcgaatatatagctctcgaagtcccaaagctccacgaggtacttgttgagatggccattggttcctgaatattcaaaatatcatgacagaataaatgtccaattaaaatgtgtgtctctattcaaagactcaaaaggatttggtggtctgcaactagattatgagttactatgataatttctaagttcggacccaggattagatcccttcaatcaactcactagaagatgtggaattgacgggtgaacatcagcgaagacaaataagcatcataaagcgtcatcaggagggataaacatatttcacatttgctgcctgcctttattgtgtcacatgtatcttcacataaaaatttggatgtgcacatacaggaaagcaatttagtgactccaaggacagaacaacttcatacatactaagttacacagctttaatacaccttaacaaaaccaacaatactatcgttgttactctaatctgtctaacttgggagcatggaagatagcaatgctacctctattccctgtcctcaaatcaattttcaaattagttgggggaaaacaataactaaaacacgttaatccaataggggctaaaatcatcattgatacaaaataagatgcagatgtatgaatcacaatcttgtttttttgtttccaacaatcgaaacaagagatgaagttacaaggtatgccttgctgcaatccatggaaaggcagaaccgctcatgtgcaagttttttttcgggaatacgctagaggcgtatttttgtattaagaggagaaaaacagttctttacaaccaaaacaaaaggcagcaggggacaagagagccggaacaaaggagctaaggcctaatctcataacagaatttgcgacctaagggggcctaacactacagacgcagcgccggcaccgcagcgttggccaaacgccaaagcctcgcctcctcagccggtccctctagctacctccgtccagcccctgaacttctggttgaacactctgttgttgcgttctttccaaatcgaccatgccgccaaagcaacaatggtgtcatagcctcgccgaagtggccgtgcaatccgttctctgctctcacacagccaagagtgggcccatgtgcaagttcacacaacttaatcgatgcatcgactgatcttcctgattattgctgtaatgctccatgcttgtctcttcctaaatcctaagaccaactgtcatcacaatggattacagatgttcttccaagcgttaattttgaagtgctcaccattgtcagcatgcaccgatttcactccaatccaatattccaatggttctatcacttcaccaccacaaaagcatcgaattccctaccattaccgaaaaatccctcatccaaaattttgtcaaaatttttaccccggaggctccgcaaattctggtccgtggtcaccaaatcacacctctaaccactcaaacatcactacgccgatcaaacgcattaaaacaaacacacatagctccatactgacaccctcgtatttgcccccctcggaagctagcgcaagaagcgaggatgaaaatcccaacgcataaacccccaatcccccccggaaccacagagacaaggacgagcggtgggatcggttgcaccctacctgaagaggcggtaccagacggcgtcgcagtaggcggaggcgcggagcgggcggcaggccacggcgaggctggcgacgtcgcgggcgacgagggagcgggcgcagtgggccagcacgtctccgtcgaggtcggcgagcgaccgcgctggcggcggcggcgccccggccatccccccgccgccgtacagggaaaccctaggccgttccgcggcggcggcggcggcgcgggaaggggagagccggagagaagaggtggttattagttagttaacgagattactcctcctgttatttttctcctttccttcgaaggtttgtactgtgtatatatatagagatttcaaattgaccaaaaaacaagaagaagaagaatcgccgtgtcatcggccactcagctccacgtcgttgcaacttttggtgtcaaaaaggctaaggcgatattggggtcagtagatttataagggtaaaagaactctatgccatgtaggaaggcaatgcaagtatgcaaccatttaattgaacaagttgtacatgcgatgcgatgagatgacaaaccgtaataaacttccgtcttctggctagtgcaactcaatgtgatgtcttccattcggttgtgatcttgaggagatacaaggtgtcctcatattttagataatacttacttttttaaaaatattgtaacccatgaccagagattcccatacagatccagatccatagtaatagaacatatttcatctatttttatattgttacatattccaggactgaggaagtagcacttgttacattgtatttatgataaaaaatacactagggtggaatctagtgaggacaacggcgctcgcgggaggagctggcaacaacgatggtgctcgcaaacacgaggggcgatggtagcaatggcactctagcaatggatcagtagcggcggctaggggtgcaaacggtatggaaatttcccgaccgtaccgataccgtttccgcaaaactaatataataataatatttttaccgatgttaccgttttcaaaaattaatttttaaaatttttatcagcgtggcattgaagttgacactaaatagatgaattcataaatatgaaaatttcctgaccgtttccgttcgttttcgaaaaaataataaaataatgtaccgtttccgactattttcatccctagcggcggcactcacggacggatccggtggtgacagcaacgacgcttgagtgttcttcaaccttctttcccttttcccatctggcaagatttttcttattccttataggtggtccttacatataaatataatttatccaaagagcatttataaggacttctataacgtataatgtaactccagaggcttaagatatcgtttttggctacattgccatatatttttggtgagatagatggactaaaagttacagcatatggacatcaaataatcaaatggagagtatatcttttcttttattcccatatcaaatggtacaaatattaaactgtctaagaacataactcgaatccgtattaaccaagagtaaagaaacaaataaatacaaacaaaatacgcctcttacaacaacatcatttttcaccagcatgtgttcccctccctattagaagaagcccttcacttcagctcacaagcagcagcttcaagtaacaaaagaaaaaaagctcatcacctcatttgctcagttcatggcaggtcctccttcatgccgcggacgaactcctccgagtgttccttggtgacgcagctggcgagcatccgcgtgccgtcgagcggcagcggcgccttgaggatgacgacggaggcgatgaagtcgttgttgacgagcgggccggcgaacttgggcgggccgaagccgtagtccacctcggcgaacccgagcttgctccagtcggagacgtagatggactcgtagttgaacgtcatctggaacgggtcctgctccgtctcctccttggcgaactggaagaactccaccgccatcctctccttcgcctgccggatcatgtccaccacctccatcaccgacgacgacagcaccgtctcgctcggcgctgacatcttcaccgggaagatggagttgccgtagtaccccctgtccagcttcagcaggtggcgcacgctggcgaagaagcagagcttcacggtggcgccgggctcgaggttgagtgccctggtgcggcattgccacagcttcgccgtcagcacgtcgaagccggagcagaacttgccgctgtgcgccttgtactgcgccttcaggccgtcgatgtagccggtggggaagtcgaggacgatgtagtcgagcgccagcaccggcagccccggcagggggccgggcttgatgctcgggttcgggaacttctccctgtcccacaccggcttcaccctcggctccgggagcccccgcgccatgtcgcccaccgcgttgatgaactgagccgcgcccatgccgtccgccgacgcgtggttgaaccggagccccatcacgaacccgccgcaggtgaatttggtgatctgaagtcatatgcaacttgaggttagctcagctctgaagaattcgatcagtatgatacatt

SEQ ID NO: 21121 - DNA, 7807 bp, Oryza sativa
aagacggaccaggcgtacacagtaaaacccaccgtgcggccgtgccccactagtactggcttgtgttgttgcggagcggcgtggaattcgtgggccgttgctttggtgggctgtgggagccagggacagctgcggcgagagctaccgaagggacctcgccggacgaaggcagcgacgagaggtcaggcactggcaggctgcgcgcgcagccgcaggtgcccaagcaacgggactaatcgatcggttaaggacaagtatttccttagaataaactacttgtatatgcagttaggaaacagcaggatattgcagtacacggtcaaaactagtttttcaggtgttgggctagcgagccgctacagaccaaagatgtgagaaaatctacaatcctttacaggagctctgttaattgtttgcgaaaataaatcttttagacgactagataaagttgaccacatgccataattgattttggggccaaaaacggtgaaaagaaaaaaaatacaaattcgaggaccccaatcccataatctaggctagctagatgaagcataatctagggcttacgggtcgtcagaccccaattaatcccatcgttccatgtcgttcatggcggcggcagcgcgggcgaagagcggaccatgatcccgcagcaagtcggcgaagttagggttctcccagtagttgcacctgtaacgcttcaccatctccagggagtcgtcccactccgccgaccacccctccgggatctcggacaccgccctcttctgccccggcctcgcgaacacggcggcggcggccctctcgtcgacgcccatggcgcgctcggcttccttcagccgccgtagcccgtcccgcagttccggaggatccggcgacatcgggcgccgccgatcccagtactcctcctcctccatctcggccgccacgtccggctgctgctgctgcggcggcggcggcgcctcggccttcgtctgtgttgctgatctgattgatttggcttgcgctactcctgaaagatcagcagcgtcctccatgtttgtgataccgtgtgtacgggtgctcgatcgatcgcgtacgccggtggtaggttacacagtttgatcgatcgatcacgtcgtcggccgcgcgcgctcgtatattcgatcgatgtggtgatatagcctggcttggattagtggcgtcctccggccggccgctgtctcgttatatgcaccgggatatgtccgactcgtcgtacaaccgacgtactggccgggacaaaatgtccgactcgaacttgagcacatagcttgcagccctgctcggttccggcctagcccatggtctcagcctctcagcctttctgttcggcccatgaaattgcaggctgcccatgttgaaaaacttaagataagtgcactgtgataccctcaaatacaggtccactctaattcgtatcccaaccgtaatacagtatatgatatctttaccctctaactattaaaactggtataatttaactcccttaagccttgttcagttaatccccatgagaaagggattggaggggatttattccacacctattatggtgtggaattattccctcttaatcccctccaaaccgaaccaggccttagcagtttcaatggtggtttccactggcgtggcacgttgacttagtccacttgtactaatatggtagtctaatcacaaatttgaagtgcacccacatgtaagagaatagggggaaaaaaattaaaaactatgggctcacttgtcctcctaacttcgcaccaaccgaatcccctcctccctccctcctcccctacaaagctagaaccattggctgtgaatgcggatgacggacctagggaggatgacagttccattccgcacggcgatggcctgaggcggagcggcaacggcgcacccttgagcggtgcagcagtggggtgaccttaaggtggaggggcatctgggtggcctcgacgcgttgtgaccttgaggcaaagcgacggcggcacaggcttgttccgacattcgagctcccctcctcggaacatagtggccgaggtgtgcacgcattagggatcaatctattgcaattgctattttttttcgtcgacggatttttggggagaaaacgtagaattttgaatcgttggttttgttctaagattcgtgtaggaggagatagaaaaaaatagcaacacatcatgggcaacctaggcttcacgcgcacacacctccctaaatggctaataaacgattgctcgcgtccctcctgctcccctcctgctccggtgtctacccccacaatcccctctatgtcaccatcctccttctcgggtggtcatggcaccccacgctgcagcaaagtgagatttgtagaggaagaaggaggtagccacttacatgtgggccccactttttttaaaaaaaatattttgctcactaggataccacattagtgaaaccatccctccatattatcgtgggacttgacttaaacggtcttgtcaagatgagatgtgaagatttctagtattacggtttagggatatctattaaactcaacgtaaagaggaggaacaacaggtgaacttcttccgagccttgttggatcaatgcagagcaagcccagaccacaaaaaaaaggatttattcgaagtcttctagtactaagatattttataaaaagacacgaatattagggaagtgcctaatatcaaataattagaaggggtgatgcttcgaacccaagtccgcccaccgccttgtggagctagccggaagacccctgagcgtttctccctaagacattttattgtaattataatttcgtaatatttttttgaattgttatttaagaaaaacaattgtaggcggtcgtattattgcagccgcctgcaaaaaataagagcaattttactatacaatatattgatggtatatactgacagtataaatgatccaacggtgtagattgattacctacccacttaattagatttgtagtataattccaacaaggatatgttggtctttttgttttatttcatggtggcaatttcgtaaattccagcatacaagccagctccgattccccattcccatcctcccgttcacaccaggcggcggagttgtgccagcagccacacagccgacgctcgccgtgccagccaccacaaacacatcgcaacactaacgctcaaaatcgattaggcatggtgatttagttctctctcagtcccataatataagtgattttaatttttttttcactgtttaaccactcgtcttattcaaaaaaaatttgtgtataaatataaaaaaaagttatgcttaaagtattttggataataaaataagtaaaaaaataaataataattctaattttttttgaataagacaaatggttaaacagtaccaacaaaatatcaaaatcccttatattaggggacagatggaatactaattaattctagggcacagaaccctagctctactggtgacgctccctgtaccattgccatcttaaggtcagattctacagattaaaattgcagagaatatttgcaagaacataacacgagaacataagagtacatatgttaatgcatgcattttcgtgtgcacagatcgcatgagacggtggtgggaggcggcgattggccgcttgaacaggaagcaggcgccggtgaatccagtcaccaaagaggactaatcgcaccgcctggctcgtctctccctcacctgaatcatgcacggcgacgccaaaagatagagattgaacctaagaatagattattaaaatatcatttacaatttttttagcaaatttgtattgtatccttgtaaatactgacagtatatactgccaatacattgtaccgtaaaagtcaagcggtgagcttaatctcgttatctacagaaatcaatagattttcgcatgcatacagtaaaaaaagagctcgatagtgattttctctgatctttggtccgtagcggctagcccagcacctgaaaaactaattttgaccgtgtgcaatatcctgcagtttcgtaaacattgcaactatacggctctaattaaacttggatttaccggaacaagcatatataagtagtttattctaataattacttatccttaacccatcgattagttgctttgcttggtcgcctgcggctgcgcgcgcagcctgcctgacctcccgtcgctgccttcgtccggcgaggtcccttcggtagctctcgctgcagctgctggagcagacggcgatcaagtagccggtgtccgggtcgccgcactgcttgcagctgcccggtctcctcgtcatcaccgggagaagctgctcgtcgccgtcgtcctccaccgggtcgtccaggatctgttccacgtaggggaaccaccactcggaccccgtgcagcgcacgcagtggcgcccgccgcgccgctcgacgcggaggacggcgtcgggcaagctcgggtcgtggtggtggcggtggtggtccgggcacgcggcggcggcgaaggcggtgccgcacaggaggcagaaggcgtcccaggggaggcgcgtggcgtagtcctgcgcggcgaggacgtcctcgacgaagtccgggtgaacccggcagccgtccgggccgtgcgtggcgtagactccccggccggcggcgtcggcggcgacggggaagaccatgtggatggtgggctcgtggtggaaccagcagcagtgggtgcagaaggcgtggaagcagctggcgcagaagcactcccgctggcacgtccccgagaagtcctccacccacagcgcctgcttcccgagcaccaaccattgctcgatctcctccggcaccgccgtcgacgacgacgacgacggcatcggaatttaatttagagagttcgcacgcacgatcagctagcgcgcggatagtatcacataaatgtcgatggactgttatgctgagtacgttcctcccccgtcttgtgtatatagagagagagatggccacatcgacccaacatgcatgtacaaagaatcgagttcggtttgggacccgaacccctgcatggccgagacgaaaaacgtcactagctagtatccaagtataggctgagagtcttctgcctgagaccatgggctaggccggaaccaagcagggctgcaagctatgtgctcgagttcgagtcggacattttgtcccggccagtacgtcggttgtacgacgagtcggacatatcccggtgcatataacgagacagcggccggccggaggacgccactaatccaagcaaggctatcaccacatcgatccaatatatacgagcgcgcgcggccgacgacgtgatcgatcgatcaaaccgtgtaacctatcaccggcatacgtgcatgcatgtacaacgaatcgagttcggtttgggacccgaacctgcacggccgagtcggaaaacgtcactagcagtatacaaaataggattgggagttcgagagtcgagaccggaggaatattacgagttactccctccgtttctaaatatttaatatttaacgccgttgattttttttaaacatgttttactattcgtcttattaaaaaattaagtaattattaattcttttcatatcatttaattcattgttaaatatacttttatgtatacatatagttttacatatttcataaattttttgactaagacgaacggtcaagcgtgtgctaaaaagttaacggtgtcaaacatttagaaacggattgagtattaattagatgcaatacaaggaaaaaaaattctcatgcataagcatgcgcgtatgtatcggggcatccctccttaaattttgacacctatagctgcacgaaacttggagcaactataccttctaaacatcccccgtgtttccacataaacttgattggtcggtcaagcaaccgctactcatacgcgctcgagacgggctcacaagcagctagggtacgcggccggccagcacggcaagctggccggccgccgggtaacatgcacgcagtggtcgtgccccacacgggcgtgcatgcagcgccgcagggagaggaggaggctttgctcgcgcgatcggtcggactgggacgatcgatggagtattaagcaaacaaccggcacggacggacgtgagcgacaagtggttggctggagctggaagtctggaaccagttacatattcgaacgtcatgcatgcgtcttatttgaaaccctgggttttcgtgtccagtttgtccatctgttttatttaaaaaaaatatgaaaaaaattaaaaagatgagtcacgcataaagtattaatcatgttttatcatttaacaacaatgaaaatactaattataaaaaaaatttcatataagacggacagtcaaacgttggacacggaaatccagggtttgtttctttttgggatggagggagtagtctttaaaagagggccattatttcttattattactctatctaacaacaaggtgtcgtcttttgcatgaaccgataaggagaacgaaagctttaatttgacatgctgggccggctcctgtcattctgtcaatgccaaagcggatggcaattcaaactggccactaattttctggtcggtttgcttaattttaatttcaaactgaacgcttgaatactcaactctatatatatgctgatttgctgaattttctgctcggtttcagtacgatcgcaatcgattcttccatcattatagatactcatgtcacgtggacatcacgttagccaaaacagctcataacgctatcgagaaaattcgtttgcatcgattttagaagttgtgggacgacacctgatttcgcggttgagggatgtggcacaaactcaatttgtatagttaagggacataaaatggactttgctattgagcggattgagtacagtgagatcgagagcaccagaagcgaagcagcacgtatcactcaatgatgggccttgaccgaaaacgacgctgtcagactgcgactgggccgagcgctacagtttcctttcagcacgcgcgcaaatcccacccccctggtccccttgcctccctcggcccatcccgccgcgcacgcgagacgtgtcgtcccaatccgccacgtcctcgcccaaagctccacgacagcagccagcagcaggtgaagcagcttggcaatttggcagtggtcgtgggctcgtggctggaaagtggaggaaaccaacctgcaaaacccaaggcggcgtgcgtccgtcggtggaagccgcggacgaatcgccacgcccaccgttcggattggccccgtcgcactcacacaacttgtgtgcagccctgacacacaaccgcatcagatgagagctcccccggaaaaagcaaagccaaaaaaacccccgagattttacagccataccccgcacaccacgccacgcagatcttttctcctcttcctcctcctcccttgactttcccccacggcgaggcgagggcgcgaggcggcgatcaccgcgtccaagccggcgatggagggcgcggaggcggaggagcggaggctggcggcgtcgctgacggcgcggtactcggactgggtggtggaggcgctggacgagctcccggggagcttcatcctcaccgacccggccatgccgggccaccccatcgtctacgcctccagggggctcgcctcgctcacggggtacccgccgcgggaggtgctcggccgcaacgcgaggctcttccagggcgccgacaccgaccgcgccgcggtggccggggtgcgggaggccgtgcgcgggcagcggccgcaccaggtctccatcc

SEQ ID NO: 21122 - DNA, 2470 bp, Oryza sativa
ggggaggtgttcgtggatgtggataagagaggtcagtgcgggctactggccgtgccaaatttaccagttacggagtgattaattttgttaagaccaaccgttctccaattgagcagtaaatttttcgaccattagtaatgaccattaattgcaaagtgagctgcattaatttcaccattgtaatctcctgcaatttatgtctatgaaatgagcgttgcaaacttgatatagcaatatggcattatcttgcatttggattccttttatgggtgattaaggttgcactgatctgatcttactattatctgttgattgacaaataagtagatgatagtttaagattgctcagtagtgtggtaaactttggttctgggtttagtaatcatgattacactggccctgccttttgcaagattgggcacttaaacaagtatgctgcatttcttattttattttttatagcatattcactatgttaaatactgttcatcagaaactgaattgattctgaactaatcagattgtcataattccccccatacaggcttaggtagtgaaacgaggaacccttaattagtctgcatttgccattcttactgcaagcaagattatgaaaactagaattgttttatacttgacctggcaatgtcgcatttatttatttattttttctactgcacgttaaacattcaatacaataagcaggagttgtgaatatattgttgctagcttgctgttgcagggcaggatgctgaggaaccgcgggtagctagcgaacatgagaaagaaaaagcactgagtacagctaacagcatcttctctgcgttgaaccgctacagcaaactcactggtctagtggtctgcgggaagagatgtgattctgttggcatcccagcactcagttcttcattaaatctttctcttggtagaatcaaacaaagctttgtattgtgagttatttgcataatctgtttgtattgttgttgttttgacgtatatctcgtgttcaaaataaatatatgcatttcattccctctttattaattgagagcagttttattttgaaatgattcacaggactgacccccatttgcctgacatgccgatcatctatgctagtgatgcttttctatcactaacaggtacttgaattttgttttctagtatataatatgcattatacagatatttgtgatgtaatacatttcagtgccatgttctatgactaatactagtattgtactcccttctgttattgtgaactgtgatgcccttggctcagtgagtctgtgaagctgattgtgatatatttatatttttgtttttgctactacaaactcaaattcttcccatgtatgttgggatgtttgatcttacaagacaaaaaaaatttagttcctatgtaccagacttaatcatggcgtacccttgagttgagacgggcatgagtgaattagtgatgttatgcattggttaggaatcattgaatcctggtatgctcttcagttaagaggggcatgattgctaatatgcggatatgccaccacacctctctctctctctctgaatcttcatcttgaaaatattatttgtatttcgattgcatctccttttttatgctaatatcatttacattcaaggcttctgttctgaaaatttttatcatccaggttactcaagagaagaaatcttgggctgtaactgcagattcttgaatggtcctggcactagtgtggaggttttagaacaggtgcgcaccaggattatatagcttgtcagactgcatgtactttatgaaatattctcaatttctttacattccttattgatttgggtgtgtagataaatcaacatatttgttctgagcaagcttgcacggttcatctactaaactacaggttcgcatctacacaaaatagtgtatagcaatttgcaggtacaatttatgccttgaacataacagaacattgtgttattgatactttctaacaggaaaggtggaagctcgttccgtgatcttctacatatatctcctatacgaaatgcatcgggcaaggttcgttttcaagtctctctggtctttccttaaaggcactgggcttctgatgcatcttgttttcatttagtaatgatgaactagatatctgcaacataactatgtttgtagtaagcctgtgctatgctattctggttcttttgaacttcgaagttgaatggattcaaaaccattctcgtgatacagttaagttagcatgtgcatctttcttacatcttgcctgtgcaggtagcatttcacgtgtgggttcaccttgatgagggtgcaaagtatgattttaatgggctgacccccgaggtatggcagcttggtgctgttggtgcggtgagagtggcagtcagaagcttgtctgcgtcaggaagcctgttgagaccgtcccaatagcattatctagtttcttgccattttatgact

SEQ ID NO: 21123 - DNA, 12241 bp, Oryza sativa
attctgtttttctttgaaattactccgtacaccctaggggcgtgggtggtcaccctgaagacgacgttgtgtgaggtaaaacaaactttgttagtacgatctcgaatcagtaattttggagtactcgagttcaggccaaagatcgaacaaggccaaagttcaatataataaagtggtccttttgtattatttaatccaagttctactccttaggctgtgtttagatccaaagtttggatccaaacttcagtcattttccatcacatcaacctgtcatacacacacaacttttcttttcagtcacatcatcttcaattttaatcaaaatctaaactttatgctgaactaaacatagccttagccacaatgtgctgcatcatgaatgtactggagtactctacttgacaaattggactatgaattcgaaagaaaacctgaatatgaaatctggaggcggtttgacagcgatggatatggatatttagctttagccaatagacggtctggtgggagtggataggcgaagaccttagtacagaaccataccagccggcctacttctattttggacgatatcttcttatctaaatttgatgacaggtcaggcgaacggtggcgtcaagaatgtcttgtcaagacggacacacgacgcggcggtatgcaccacaaaccaaccgatcgagctagcgtcgaatcgatctggcagctcatactgccgattgctactctcactcgttgtttgttgtgctctagcttcaactacgttcccacctaacgttagtatcctgatgtgagcgttctgcgtgcactgcacggacagggagatgatcttgtcgattgttaccgacagtgcacggggcaagagatcatacggccacaggtgttaatcagggttcagctatgcgtcgtttgttaatcagactcgctcaaatcctaatgtctttctttcttgtgatacatctgtaagcgatatgtctggctatacattttgtcttcggtctttcacaatttcagatgctttacatgctgctaaccgtgggggtatggttttaaccccgaaatctcatatttaatttccaacgcgctcatattttttaaaaaaaatgtttggaggaacatcctctccaaatatctttttgctttgaatgaacgtgctgctaagatgccgcagttcttggaaggaaacgataaattcatccctcttttcttctcgttttcttttcccttttcagatcaatcaacatatcgattgcgccgttgggagagcagagaacagatatgacggatgagcaaaagctgccgaggcgagcgaacctcccctcaactcacgttcacgtcgtcgtcgcgccacccctgacgccgagggaggtaacagtcgcgccgttgtcctgcgtccccgccagctgctgcggctgcgcccagcgcgatcgatcgatcgatcgatcgactgccgggtaggccacggcagcagacggcgacgtgcgcgtacgctcacccacgtaccacgcgcgcggcgcgccgcccgccgccaggtcggtcgatcgatcgatctagttcaggttggtaagggcggatctacggttgaagggccggtatcaggcgacaccaacaactttcaagcaaacctataaaaaattatttattcatatattataacaccatgatctaagggcctgtttggcacagctccagctccagctccacccctcctggagctggagctcagttaaacagtttcagctccaccaaaactgggagtggagctgggtggagctctctcacaaaatgaactagagttgtgaagctgggtttagacagctccacaactccactccagacccaactcctggagctaaatttaggagttggagctgtaccaaacaggccctaagtataattagtatgctatgataccgatatacacacgttatgaccctaacgaatttattttttgatcctccaccgggttggttgacacgtcgttccggtgggcgggcggctcgtacgtcggcgcctgtgcgcgcatgcgcgcgtgcggtgcggtggccggggacgtacaggacgggggatggatgcagaatgcgatgggcatcgagtttggcgcgcgggctcggttctagcggcgtctgcatatgcattttggcagtttggcacggctcgactgtgtcgtgtggctgggtgttggttgcggcaggcagtgtggtggccactgggcactggctggatcaggatttgatattggattggtctgattggagacacctggccacctgggcggctccagtttgtattttttctatttttcttacgggttaccaggggaagatgatggggaagtaagtcaatatcaaaatattccctttgttttgttggaactagtatgtactacctccatctaagaaccatcctagaaagacatttgttttgcgttgtttatattcaacatttgactgtctgtctaacttaaaaaaattgttatgattagtatttttatttattactagatgataaaacattaataatactttatggtgagactatcttttttttattattttttcatataatttttaaataagacgtacagtcaaacgttggacacggaaaatcataactgcacttaaaatgagacggaggtagtatccatgttgcgtgccgagagatccatgcttgattccccgtacacattcgatcgaattcgagtaggttcggtactttctatgttgatattgtctactactacctccgttttcttaatagataacgtcattgatttttgtcacacatttgatcattcgtcttgttaaaaaaaaatacataattataatttattttgttgtgggttgttttatcactcaaaatactttaagcatgatttatatcttacacatttatataaaacttttgaatagggcgaatggtcaaacatgtgtttaaaagttaatggtttcatctattatacagagcgagcatatatttacggtacgtagttggacttaagggaggagctcctgtataaactggaaatatctttctattgaatgaattaaacccattcacattacgttggaagaccctactgatctctcgaggacatacttgagactatacttccgtttgttcaaacactattcaaatgataataaaatgatctaaaaattagataatttttatactacatacatatataccacttcataaaatcacactaactccaaatccaactaacacatcaagagatatattattaaaaaaacaaataaacttgacacgaactcctttttttcaatatgtagattaaatttgagcttgactttctagcgaaactaatgatacataccactctactctacaacgttgatactaattctatatatcagtcgtctagttactaattaatgttcttgcacgagtcgtgaaccgggtgtaattttgctcattagtcattacgatgcatggtttgtgtatgaaacatgcttaattgcaaatattttcttcatttttattttgagttccggccactgtttgtatatgtactagcgtgcattatgaatcattgacgtgcttattacctccgttgcaggttgtaagatgttttgattttagtcaaagttaaactgttttaattttgagcaagtttatagaaaaaagtagtaacattttcaacccaagacaaatttattatgaaaatatattcaattattgatttgatgaaactaatttagtattataaatattgctatatttatctataaatttagttaaacttaaaacagtttaattttgataaaagtcaaaacagagggagtacttggtaagagttatcgatcgttcaatacactcgctggatcatccggaatccgccagcagcaaagagatcggtgcctaacgatgtatagtactgtagaccgatgtgtacttaaaaattagtccatcattctcaagcaaacaaaatgcacgttttcttgatggaagacggcttacaagtgcacgcatgtaaaggtggctacggcactggcttctccaacatttaatatatgactagttggccaagagcacaggtcgaaaacattgtatctgaacttgatcccagtttttggatgacgatcgatggcgaaatgcatattattattatctcattcctgtcattggtacgtacgtacttaaccggccgggaagtggaaaaagaggagagtttcttttgcgtcctccttatgatgatccactaggctagctaattaataaatttaacggtaatatacaatctacccaatcaattgagcacatgcatgcccaaaaattttaagctaaactcaaaattggctgatataataatatacgatcaaaagataacgtataaatattagaggagtctggttctcagtaaaaaaaaatatcaacgaatttcagtcacttttgaatggctcagatcattcgccgattcttacaaacacagtaactttatccttcccctcgtcctcccgccaatgcatacaaggcaagtcgtttatctacattaaaataacagaaattgctaaacttctgtcgacagaaaatacaatcttaaatcttgtaaattttggatcactggatgtgcttcacgattcgtgctcttcttctctaactccggcgaccacctcttcttctctggtgccggcgaacccaaactccgacagagggccgatgaattagggccccagggtagggtggggttgggaggggggaggggaatgggaagaggagggagttcgccggctttagagggatggccgttgtcgacgtttgatgtctcgactacggtatttggacagtatggggatcgtcggtgctagggtatacgcgagactgaggtaaaagagatggagacgaggatttttatacaggttcgggcccctaaattgtcaggtaataaccctacatcctgttggccggagccggagttgcttttattcaccataataacaccagtacaatatgtgggtagcttatcaaactgttgtcgacatggcggtctgaaggtctgactcgtagtcgacaacagggtagccttgctccttgaatccgtgtccggcgagatcagagatagcgcttttgtatctcctgacagtatccggagacaccgtaggggaatagccatgcctatcactgaagtcgatatccggcggcgtgtcttggcgtatgtaggcttgtatgttgtcgcgtagattgtggtggttgttgatcctctcatggtgggtgtgtgtgttgttcgtctcgtgtcccgtctcctcctagggggccttgtatttatacccataggtgtccccttgtccaagtagaactagggaaaccaatatggatacaatccgagtagtccttgtcgtttccatgtagaactctggttgtctttccttatctggaactccctcgaggtcagtttccgtataagacatggtatgtggtggatccttccgagatttagtcaactactattagatatgtggtatccataaccctgacaaccgtgggaggcagcaacccagcggtgggcggcgaatcgggcgggcggtgaggcggcggtggcgcagccgaagccgcgggatcgggagcgggtgacgggggcaaagcggaaagagtggtaggaggaggcggccggtggtggtgctcaccgccggcgacggggaagacgacgacacgggacagctcgccgccgctagcttgaggcaaaggagaggagagggagggggagggggccggccggggaggctcgccggtgccgttgacacctttcggccagccaacggtggcagcagcacaggaggcgcacggtgtcaagggaggaggagtgctcgaccgatttttgtggcggcggggaggaggggaaggataagtggtttgggttttgtgcggtttgcacgaatctcaaatcaatccaatgataaaaaaaattacaagatattaggaggggttttctgttaaacgaggagtacacaatcccttaaaataatgtcaatgattttcaggcacttctgaatggtttagatcattcgaagactcatataaacacaataactttatttttctttactctttttcccgccaacacatacgaggcaagttctcgcctacatacaccagtgcaccgtctaccggtgagtttcaccatcctccttctctctcaaaatctagcgctaggtttaagttaattgaaatttctagaatttcagtcgcctgacacactaagtatggttcacctatattacactgagtatgcttcacgattagagatgtaagtaggtagttccgctatctacataaaaacccgtttgctaatattaattttctggtcgttcgtatgtgcttcgcgagttcgcgtccccgtcaaacttggcctaccccacgcaaagtaaaatcgagaagaaaccagtgcgtggcaatgatcgagcgagcgatcagcatgcgcgcgcggcgcgtgcgctcgatcgctcgcgtcgtaggccggccggtaaatttctcgcacccgtagtcgcggccgaattgcccgcccggccgccgctgcagtgccccgcctgatacgtacttagattggacgcgcgcgcccctttttacaggtgtcgcttgcatttgggccaggtgcatcgtacgcacgcacgttacgttagtgctatccgtcgacacgaccgcttggactcccacgttaacttggactaccgtatatatatacacctcttccgatgatccgttcctataaggatctgtttggactttggaaagtattagattttgaaaagcgaatggtgtgaatccagctgataagaatcggaataattaagttaccaatttcttgcttctactttattttctgaattatgctgatatagctggttataatatggacaaaatgctgaattgtttggcagaaattttaattctgagagaaaattgagctgtccgaaacctcccaaacaaactctgagattgtttagcaaaaattaagattgaggtaaaagattctcccttggtcacctccttaattaaattttaaattgctcgattggattagcttgaaaatgtttggatttaatttccgtgtgtaatagtgaatactacgggaatctttatattgtgcataaatgcttatatttaagaacggagaaaatactgagggatcgatcatccaataaatcaagtcatggtcatcataatgcaatgtctcaacattgaccacaatttcagtatatatacttctctcttggttgatattacttatcgttctgaacaaacctattgtcaaacctgaaaaaactttaactataaaatataaaatagttatattagaaatataatgaccatatgtatagattggtcctaaaaactacttcaacaaaatcatatagttattgatatttctattatactataatgaaaaatagttatcaaagttactttttaagatcatgtcattgattgttcaaagcgataattattatcaaaccggtggggagcagtagattgttaattcatccctgaccaggggctaagtttgtgcggtcataaatgccaaaagtgcagggttagttagcgggggtgtcactgtcacggtaagaagtaatcacaatcgacatgtgacacaattaatccatctattgagaaccttctgatcatcaggatcgttcgtgtgaaccatccacatagccagctagtttggaccaatcgattcggcagtataaattgcagtgcttgacacgagaaattctgtcaaacactcaatcagcagcagcagcagctagcttagctaacgcacagtgacgcgagcatggcggcttcgctgggactctgccacgagacgtcgtacgcctactcgtacccggcgtcgaacacctcctcctccttgtgcttccctcctctcatggcggaccacatcgtcgacggcggcggcggcggcggctgttcctttggtgaattcctggagctcggccattccgtgtactcgctgccgcttccgccgccgccgtcgcagccggtggtggtcgccggcgggaacaatgatcagtatggcgtgtcgtcgtcgtcgtcggcggcggcgacgacgagcaggatcgggttcaggacgaggtcggaggtggaggtgctggacgacgggttcaagtggcgaaagtacgggaagaaggcggtgaagagcagcccgaacccgcggaactactaccggtgctcggcggcggggtgcggcgtcaagaagcgggtggagcgcgacggcgacgacccgcgctacgtcgtcaccacctacgacggcgtccacaaccacgcgacccccggctgcgtcggcggcggcggccacctcccgtaccctacttccgctgcgccgccgtggagcgttccggcggcggcggcctcgccgcctcccgcgcacgcgcaggcgtggggggcgccgctgcacgccgccgcggcggcgcactcgtcggaatcgtcgttctgaacgctgaatttacttctgtttttgtttttcttggttgcttgttagttgtaccgccgttcgtgatcgatcgatcggttcttgtatgcactagacttactacttaaaaaaaaaagagttaaatcttaactataaatctagacaatcatatgtttagaacttcagattcgtcgttagaattaatttttttctaaacggagtacgccgtattgttttagctataaaatcgtgatgatttgtgcataattccaatagcctcttccatctccgctaattaattagctttatcgtatattctaatgtaaaatcaagctacttaagatataaaaatttacattaaaaattttggtattacctcttgatatcactgaagtaaagtaaattttttcgcattgaattttggtggacaaacgctcatgctattctcaagttgcagagaactttttttttgacacagtaaacctctgctttcattaaccagtatctccaggcaaatcgccggagaccaaaggagatacaaacgtcggggcttggctccagaaacacttggagctagtggccacgatacccacaccaaaagaggccaaacaatcagccactttgttacaagatctagggaaaactgaaatagaaaagacatcaaagtttgatcttaagaaagcccttaattttctgaaaatgacaccatcagggcgacggttcagatcttgggaaataagtgctttgcccagcatctgtgcatccgttttaacctcaatttttgtcatcccctgttgagacactttttctagacttttcatcattgctaacgcctccacatgcagggcgttgcccatccacgataagcttccagcagaaagaaccctttgaatccattgccacaaaaccccagcctccagtgccagtctcagcgaagaaggaagcatcgatattaattttataaacatcttcccgcggcggcttctatttttccatcacttttcttacattttattccccattcttccttatcttctcttacaagttgcagataactggttgtatatctgcagagttaatcagatgtgccattcctcataagggcccaagaacagggtaagccggtaaggccttgcttggatgaggctcattgcaggcccatctttgtgtgtgggacccaacattcaggcccataaaaggaggcccatctaaacttgcaaatcgttcagtccaatgcaggagcacttcgactagctcagttttttttttctctttttgaataatggacctttttaagtccagtatcatccgtgaaatatggatgattttaccatctttaagaatataatagaatttggtacctcgaaatactttctctcaataaccgtaaaatttctcatgaaatattatttcaaattaagagggtgtcggacagtcggaaagaataaatctatttcaaggattagagtgagattttaccaaactaacaatgttttcagtgtgttccatctggtcttagtattcccaactcgtataatcactatcttctttttgtccaagtaatatacatatactgcaccatgtttttttcctttctaaaatccaagtatttatctacctacttttctattttatactttcgctggtaattcaaaaagggtaaaaaagtataaacgttatagcatatatatatatatatatatatatatatatatatatatatatatataagaaatttatttgtatcttgtgatcactgcagttgcagaaattaaagatcggctttgtgaaagcaagatttctgaaaataccaaactactctctccgttttttaatagataacgccgttgactttttctcacatgtttgaccattcgtcttattcaaaaaatttacgtaattataatttaatttgttatgggttgttttatcattcatagttctttaagtgtgatttatatcttatacatttgcataaaatttttgagtaagacgaatggtcaaacatatgagaaaaagtcaacggcgtcatctattaaaaaatggaggcagtatatattatcgcagcctagaatgatcattatttgaggacatcatttaatcagatactcacatataacttcattaggtccaatattaacaagagcacatgcacatcaacttaaaataaaccgctaaataatgtttgtcgtgtgattatactttagtaatcttcggttatatcaccaaggagacatatgtactcaaaatcatcacggagatcacgaagtgagcataattcaattggtttggttccttgttgtggaaccaacctacccgggttcgaattctagatttaatacgggtgctcacatttatggctatttattctttaagtagaaaatcaacacgggccaagtccagttaagccttctgggaccgtattggtttgaaacggacctagctgtttattctttcagtggaaaaccaacacgggtcaagtccagtccagccttctaggaccgtattggtttgaaatggacctagcatgttcacggcacctctggtttagattttgttagacttcacgaaaacctttgaatattggtgaaggagaggtgaagagagaggggagggtgaagaaagaacatggaactgacgggcaggttctgtgtttagcggcctcatcatttcgcttatacttatgcttatcaggcaaaatttgaattttcaactttaaatttggagttgattttgatgtcttttcatcgaagtttattttcgagcgtttgcttttagatcgctaataacacgtatataaaagttttacgtataaattattgttcttttgtaaatatgccgtttcgcttattcctccaataagcgaaccgatgaggccgtagatttggtattttggttcatgtaaaattaaagtaaaaaaaattccaaacatgtttgatgcgtacaaaatgacatgattttcttaatacaacaaatttacagtggcatgggccaaatttatctaagccactgttgttgctgaaggcaaactaaatttaggtttggggttttccaatagatttcccatcgttagtggtgttccaaattttaatatttagatgttgcctatattaactacattattagttgaaatcagaatattatatatactatgatatatatataggataccggtaattgttttttaaaggttcatcactgcccatctctggtgagcctctctccaccttaattaatgaacttgagcacaccaaactctagtttcctttataactagctatgtattgcaagaaaaaaatattttatttagttgatttttatccaagtgtgtttaatcttattcttagttcacgatcgtttagtcggtgactataaaagtctaaaatagttggtatattgatttactcgatcgattggattgaccacttcaataacaatcattcctatcgtgcttaattaagcacctattcataaataatatttagattgtatctaccttatttttgcagtgttttcttgtctacattagagattatcaaaccacacgttatgtttgatatgacattgcatcatagacttattgctggtagctgttttgtcaacatttcattcgatcaaatcaagagtttacgctcctaaccaaaatcaggccactagagatcgtcagtggttatcaccaaaatacactatcaattaatctctcatatatatggggagaattttaactttggtcaagttattttcatggatttttgtttccttcttgctttcctgcgcagtatatactccctccgtattttaatgtatgac

SEQ ID NO: 21124 - DNA, 15616 bp, Oryza sativa
ttctttaagcatgacataagtatttttatatttgcataaaaattttaaataagacgaatggtcaaacgttggttaaaaagtcaatggcgtcatacattaaaatacggagggagtatatattatcactccatgatcagtactgtttgtacaaaaattatgcttacctgacactatcacgcatgcatgtctagctccttgaagcctggaaatcaaaagcctcattttgaattaatttgtttccccccacatagtgcatatacaattgagtgatctcacgcttgtgcatgcttatatatactgtactctatgtacatcaatttgccaattaggagactaatacgtacgtatagcagaacaaatcaagcaattattaccatctaattgattatctaaacaaaatttagatcaattttatgaacttgcttcacttgttcggcgccgccgcgccgccgccgcgccccatgtaggacgtgatcgccgccgccaaaaccgactggaagctcgggtccgacgtgatcgccttcgcgatcgtgtccgtcacggccgccggcgcgacgccgccgccgccgatggctctctgcaggtacggcgacgtcgtctggccgccgaacagctgctccggcgccggcctcgccgccgccgccgccatgcccatcatgccgaaatgatggccgaacggcgacggcgcaacgcccttggcgtagtatggctgcgccgccgccgcgccgccgtacgccaggtacccgctgctccacgccgccggcagcgccctgctggactcgtaccccgcggcggcggcggcgtagggcgacgccgacgacgggtgcaggagcgagtgcggcgcggtgaggtcgagcgtgacggtggggcaggacgtggcggtggagatggtggtcgggccgagcagcccgacgccgccgccgccgccgacggccgaggcgaacggcaggtggtggtgaacgccgccgctgccgtgcatcgtggagttggtcgagccagacgtcagcatcgccgccgcggccgacgttgtggacgccatcgccgccgccgccggcggcagcgggtggctgtgcgtgccctcgtacgtcgtgatcaggatcgacatgtcgtccgcgcatctctgcacctgatccatcgattaacacaaaaccaacacaaatttaaattttcgcttcaatttaagtacgcatcattcgaatcatatacgtatttgtaaacgtaaatacgtatttatacgcgtatatacgtacctgcttgcgtacagggcagttgggtgcaacggtgcaacggtaataggcgcgcgggcaagggttcccctttgagattttctgcccgtatttccgccactgacacccatcgttcatctaatcataattaacagcgtgattagcacgggtaaattacgtaattattatggtttagagattgggattaagaagagtaatcgttcttctgtaattaattagtaccgtgggggtgtcgcacttgactctgacggaaaccctagccttcttggcctgctgctgctgcagcacctcgtcgtcggcgccatcgccgccgccgctcgagctcctggacgctttgttcggctgggtaggctcgccggcgccggcgccggcggcgtccccgctgctgtcggagctgaggttcagcacgggcatcggcggcaacgcgcggcggctcgcctgcttgtcgtcgtcgtcgtcggaggcaacgccgccgcgagcgcagctcagcccgagggacagccgcccgtcgtcgccgccgccgccggacgacggcgtcctctcgtggcccttccggcgcgtcgcggcggcgttgggcctcgtgcagaggctcagggagacgaggtcgtcgggctcgtcgtcgtcgtcgtctccggagagctccgccgccgtttgctccttgaccttgacgacgtcgaggaagtgcgtgtgcagcgacttgtagtcgctgacgatgcgtgtgagcatcgtcttgagccgctcgttctcctccctcacctcgcccatctccgccttcgctgcctccatcttctcctcctgtcacaataattaccacataattaatcaccaatttctgaattatcagaacaaattacgatcgattgatcgatcgatggatggataccttcttgatgatggttgaatctctctgcgtcgatggtgcaaaactctcaaagactattggaggcgcgcctccaatctgcacccaaatacaattaatcgaattcagtttgatcttgttcaagaactctgcaattagcatcatcacgtctcaaaaaaaagatcgtaattaaatccaatttatgttatcataccgcggcgacgtcgactttcttctcgtccctcaccggcgggctctcgacgacgacgtccattgcggcgttcgatcgatcgtcgttaccgatctcgaaatattaaaccaggcttagcttaatcacgtaggctctgaacaagaagggtatcaagcaaagcgatggctgaacaaagttaattgtccttgcaatggtagcttgccctccttataaagaaggaagctaaggggctaaggctaggaggtcgtcgtcggggcctgcagtttctgactgaaaacggattaaaatattagctttccccaccaaatcccggttaaatcccagtgattaagtgggtaattaaccttgagcgagagagagctcgaggacccaaaaaaatgtcaactcgagcatgggcaaatcgaatgagaaccaattagctggacggacgcgtcgacctcgattcagatataatatactccctttatactccattcgtttctaaatatttaacacagttgacttttttaattatatttgaccgttcatcttactaaaaaaataagtaattattattctttcctatcatttaattcattgttaaatatagttatatgtatacatatagttttatatatttcacaaaagtttttaataagacaaatagtcaaatatgtgttaagaagtgaacggtataagtatttaaaaatagagaaagtattcttcatcatcctcttcgccgtcgccgtcgtcgtagccgttctacattgataaattgcggctgcagccgcgttctctgtccggtttggtccacgcgtatgtgcaaactggactggataatctctcatctcatctccggcgacttggccggcggtggccaccgcaaacagagacaacgatcgatcttagcttgatcgatcggaattaaggtcgttaatcgatcgatgtggccggaggatttgactccgatctcgatgtgacctggcaaaatatactctatcttgaatacttctttcacaaacgcgcaaaaaaaattatacgccaatatattaaaagaaagaaaaaatttatttatacaacacaaacaaacggctagaagaatctattaacttattaaaggaatagaaaaaggagcctccacgttcgctctcacgacctagaaaatctcatattaatcggagaaaaaggaaaacagagtccatatagaaatacaattagaaatggttgaaatttggaattaataaaataaggaatattagaagaggagaatagagtccatatagaaatacaattaagaaataatagaaattcaggattaaaaaccaggaatattagaagtagagcatagagtccatatagaaatataattaaaaaataatagaaattcagaattaaaaataaggaatattagaagtagagcatagagtccatataagaaattaaaactaactaaaattcgaaataaacataataaaattaaaagtagagtttagagttcatgtaaaaatactatttacaaataactaaaattcaaaattttaaaaaaaggggaagaagagtctaaagttaatataggaatacaatttataagtaactgaattcgaaattaaaaattaaagaatattgaaagatgtgtttagagtccacatagagatacaattggaaacaataaaaattcaaaattaaaaataaataatattagtagaagagcctagagtttatatagaaatataatttacagataacgaaaatttcggaattttaaaaaagaaatattgaaagacgagtctagagtccatataggaatataatttacaaataactaaaatttgatattaaaaataattaataactaacacgtatataaaatacaatatgaatattacacattagtagttttgtaaagttagtacaaaatttaaaattatgttatcattttaatatatttgaataatacattgagaaaatatatatgctattatatgagagaatataattatgctagccgtgcaatttgcgtgggttattatactagttttatttatacaacacaaatggctagaaggcccttgtccgggggcggggaagaaaaaaccgggaaaagaaaagaaaatgaaaggatcttgtttacttctcgcagtcgtgattaattagcgttcaggccgtcaggcgtacgcatgcagcgagctaaatcgttggttttttaaaaaaattatttacgccgtcttcttgttgacttttgtactggaggttcgtacgtgtgtaagcaaagtcggagaagcaactaagtttgtgtttagatccaaagtttggatccaaacttcaatagttttccatcacattaacctgtcatacacacataatttttcagtcacgtcatctccaattttaaccaaaatctaaactttggatccaactaaacacagccctaactgagaattgttcagaaatatgtgcatgcgtttcaaaaaaaagaaagaaagaaaagagagagagagatgtgcatgcatggtgatcttccgatctctgaattctgaagcacattggtttaattacatctgtgttctgagaatgaatttatttttctgggcattttgcaagagaattttattaacctgtcaggagctacggttcgattggtcgtgaaaagtagcggcttggaaatgcaccgtaccattaattcttcatatgcatttacctgtttcatccttggctgaaataacggcatccagtgtacttgtttcagttttttctcccatccttattaaaggccggagtatcttatcatttactactaattaagaggtatcgcaagttgaattgattaaaaataaaagtgtacgatcgataatgacatgtgtcaagactatctttaaaagagaggggtatatacctcgtattcgggttaagatatacaatatggttagtacctctatcaaaagaaatatttacttttgctttttttttcgtaaacatgtaaaaaaattgcacgtcaatatgttggaagaaagcaaagttttttattacacaacgaaacggtcataaggctactgctaggggataggaaaaaaagaaaaaaaaacagagtaaaggaaggaaaaacctccttaaacaaaaacaactcctattgcgagggagggtgtaggtggagcccgactaaacatccaacaaatccacaaaagaaacagcactagcttccacggttggccttccagacggatggagtcccgcaccatcaaaatcgaagagagtgagtagtcgaaaaccctggtgttccgctccttccacatctaccaggaaaccaagaggaccagagaatcgaaacggtcatgaagatgctctggcatgcgtgctctagtagacgatcttctcgtcttggatcaaaaccttaggagaaattaatccaggcgagtagaaaattgaaattcttaacaaatcttcattgaatttgaactccctcttatcgcggttgcagtggtcttggagtccatcctccggaaagacccgcctatggtcttctgcagatgttgtggcttttgggagtctagtgggcccaactgccaccctccccatctttataggagcagttttttttttcagtttttttttgtccttcaatggtcgcctggccggttgcgtcgtgtaactaaaactctagttttttctaatatattgacgtacaatttttttgcgtgttcatggaaattcattgaatttgaagcggtttgaatggaattcaaccaactctgaacacaaatggacgccgaattttcgaccagcaaaatctcaggaggatctgagatagcgagatctcgccgagaaactaaaccatatatactggccgtgacagggccggaggtgttgaaaattctgaaattccatcgaaaaatttcaaacccctaacccgcaccggccggtatccatcagttcgtacttctaccaattttcctcaaacgcgtctgaacttgaacagtacatggtactgcgtgaacagtatcatcaatcatgtgcttaaattagagagagctggaagaccaaataattttaattatctttttttcctaaataaaaaatcatgcatgtgatgtgagtgacaatgtccaagtcgatggatccgaccgtgcaccggcttccggtgagatcgatcgagtgcgacacttccaagctgccatccaatcagctttaagtatcgcctaattaagcttgaattatttagtgatagtaatattaataatattattagcttgaattcattattcggtttcggttggcctacttgctgaagattccagccaggccccgttgaaactgttcctgcactgcacatcgcattgacacaaaggacagatctgatccctttttaatcagcatcatggaaagtgtgacctcacactggcctttgctgattcgtatagctttgtaatcgagcacgataattaattagcagagaaagatatccgatttgcttgtgttcccacaccccacccggcaccggtgtagggcccactggtgcgcgggtaaggtaaggattcacattctcgatgtttgacatcatcttataataagtggatgtgtgccagttcgtatataaactacttttgttgaaagataaacattgccgtaaattcaattcttattttattattgatctggttgaagactcgaagttttccgattaatctcaattttaaggggggatcgaaatccttaaattgtgcaagtgtatccatttttcagcgtagtttagagacttttcatcgatttggcgaacggaggaagaatccaccgcagggataggtgggtacggcgtgtaagggtacaaatttaaacaagttggagtttgaaaatggctggagtagaggaaaacggtggcgaataagataagcacatggcggttgggttcgatggacttagttcaagtaaactgcgtgattagtcaacggatgcatcaaggaggcgtctttcctacctaattcctaaatatttgttaattgttttccaaatggatacagctaagaaacaaagaaaataaaataaaattcagacagagaagagaagaccttctttgtatgatgcatcatgtgaggccaagcttttcaacgatttggtcaagactttggacctaaagtgggatcacactaataatatttccatcacatttttcttaaggaaagacctgtcactccttgggcccaaggaaattaagagaaaaagaaatatattttgttttttgttctctttaggtatttgatgcttggaaggcattgctacaccatcttggagagattttaaaaaataaatcgtttaatttccatgacgtcgctattgaaaattctgagtcgcgttatcgatagttcttgcgagttactccagaagtcagatgctgatggtagttttttttttcatggattactgagtcctgaaatgaaaaaattgcaaagtcagaaggaggatcatcttgggtcatcttgcacatggaccagatcaagaacttagccaatgggaacagtttctggtgtaatttagccacaaaggaatattgtatttggaacttcttgcagtttgagcatcaaaatactcgaggtcaacaatttgtcagaaacccatggaaatgtcagttcatggatctgccacgccaagacttaaattagaagtgatggattattgatggataaatacagtaaagtactcaactgacacagctcatacacaccctagttaattttcacagaagacctcctttttcagatttacaggttctgtaattttcacagaagactttgcagttaactgaccaatatcatcaagacttgtacggcaattcttggaacacatgaaaaaagaggaaactttcaaaggaaaacactagtgggaaaagtgcatgggcattttagtagttagtacgtgaactgctagttaatatttcactttctgcatggaaacttgacacaggtttggccttttcttggtgactgctaaaagagatgaccatgaatgctaatggttgtcaatgtgtaatctgttagaataattgggctaggcccaacttataatattaaatctcaaaggcccataataaatgttgaggataataataccacctctggatttaagcgagaaatatctcaacctaaatagggagttattagaggctccctgttgaccagttgaggtgggggtcggaatgccacacgcgcgcgcgccgggcgtggcgtggctggctggcggcgtgcgtgcgtcacgtcactatccttttgcagccactaacccacgttcccacgattccctccgcaacagcgcgtccacgttctttctcctgatagataaggaggccgcgagtccgatccgagttcctcgcttctttcccggtgttagtttctccttctccgcgtctgagttgctctcgcttccctgcttctgatctcttgcgcgcacgagagattggaagaagcagtgcctccgaaaccacaccttcgcctgagatctgcaccgggtaggcgggtgagcgggtgatcaggtttttggggagtgcctcctgcacgactgctcatcgccatgtcgtgcctcctgcacgactgctcatcgccatgtctggagttgctgccgccgctattggcggaggtggagctgcgccgccgccgacgccgacaggagctggatccggagctggtgcgccaggaggaggtgccgtgaacgactacaacaacggaggcaattctgcctcaccatccagcggagggccattctcggggtataatcttctccttctactgctgtaagcgctactcctgttcccattgttagcgctatactgtgtgcgctatgttcttgttcctgttctacatgatgcctctagcatgttatcgcattactggtatgttcctgtttctgacattcatgatgcgcatagtatgctactggttatgttaagatcaccctacactgcttatgccatgatcatagtttcaatttcttggattaaaatatgccgaataatgactatatttccaacaatccaaaaacctgataggtcattttcggtagttggctttgctgctgcactgaaaccacatgcttttgatggttcaaactataagagatggaaagcacgtgcactattgtggttgacagcgatgcagtgcttctatgtttcacggggtaaacgaagtgaaccacctctttctcctgaggaagaggctaagttcgaggcttcggattgcctgttccgtggagcattgatcagtgtactcgctgacaacatagtggacgtgtacatgcacatgccttctgggaaggacatgtgggatgcacttgaggccaagttcggagtttttgacgccggcagtgagctgtatgtcatggagcagttctatgactacaagatggtcgatgaccgttctgtagtagaacaagctcatgagattcagatgctggctaaggaacttgagaacaacaactgtgagttgctggacaagtttgtggcgggtggcattattgccaaactaccaccttcttggtcggactttgtgtaacgctccgcttttcgtgaggcgttaaaaactaactcggcaaaatcctaattgcgaaaatttttgttctttgtgtgcgagtctaagttgtgccaagatctcaattcaaatcccgttgttccctctcatcgaaatcaaaatcctccgcctcaaatctcctctcccaattcaagtctccgaaatctaaatccgaaagtcaatcccttcctttgaatcctcgccaaatacatttccaaatcccaaaatgtccaaacccccgtttgtttcctttccttgactccaccccatgttcccgagaacaaatacccaagttttccttttgaatctttcccatgacttctccttgaatttcccttgatacatccctaaaccctcgagtttgaatatcaaatttgaattcgaatccaaaccctaaatctctccatttctctccaaatcaatctcctccgaaaaagtctattttgcctccctcggatttttgtgggccgttttctcctcggcccatctcctctcagccgctcctcccccttcccttcgcacgtgctgagcacgcgcgtcgtgcccgagccaagagagagcgccgccctctctctctcgccctctctgctttctctctccccggcgccgattcccgccaccgcctttggttcccgcgcacgcgccggtcgtggcagaccgcccggtcgccgccgccgtcagcgcctgcgtcgtgcgctgccgcccagccgctccgtgcgcgcgcgccatgccgctcggtcgccgcccgtgccctgttgccgcgtcatccttcccccccctgtgcgctcgcgtccaaaacacggagccagagctcgccctcctcctctccctccccaaagcagcatggtcgaacccctcctttccaccctccccttttcctttttccctcgggctcgacccctctctcgctctccacccttgtccctctgcgcgctgaggcagagcaccgctgacgccgcacgccagctcgccgcccccaccttgaccgcgccagcctgcgctcccgtggttcggattcggccgtccgatccaccgccttcgccgcccaaagcatccacgccgtcgccgctttcgcatcgcccacgaaaccgccgctgccgccagccgagcgcttgaccgccaaggtcggttctccccccccaaaccgacatcgcctcaccccgcgcctataaaacccgaagccgagctccccatcccatctcaatccctcccactacacactcctactccaccgcgccattgtcgcccttcctctgctctcgccgtcgccgtccgccgccgagcaccgggagaccggtgcgtgcgaggacgcgtgacgcgggactccgggcaccctccttcctccccttcctcggcccgaggccggagagctcgctcccgagccgtcggccgctcgtctctgcgcccgtctcggcttggtaatgccaccctccgttctcccttcttgctcgtcctctccctccctagctcgcgtggtagctcggctagcccccgaacacgcatggacactgccccaggtctcgccgccgaatcgccgctcgtcgcccttgcaccgcgcgctagctcgccggccgccatgctctgtcccggaggccgtctctcgtcgccagccaacctcggtgccgccccgtccaatccgacgccgggaacggattccttgaaccccggagatgctcccatccctttgaatcgaaccctcgtcgtctcgtcgtgttttcccctttttgctctccggtgattgccgccgccggccgtcgtcgcgcgtcctcttcctgatccgagccgtggaatgagttccccttctcctcctcctgccgccagtgctagccgccccttccggctcgccgccgttcgccggatcccgccgcacaccgtgagccgtcggatcagcctgcccggcctcctctgcctccccatccgacgtggctgccacgtcggcgccacctcgacgcgaccgggtcaaaagctgacctcggtcagccgcctccctccgtcccccaccctcgcgcgcggtccacggagagccgacacgctgcgcgtgggcccaccgcacaccgcgtccacccgcgcgccgcgcatggaccgccttccccccccccccccgaaccctagcgccgcacccgcgtgcgctctccccaccgtgaacccaaccaccgccatgtgggtcccgcgtggtggaccgcgcccaccccgacgggcctccctctctccctgcgcgccctcataggccgcctcctcgcgcccgcgccggcccatttggttcggccgagccgcgttagcctttgggccgcaccaatgccaccgaacaagtctaatatacatccctccatccttttctttttccagggatttaataaatcctttttcctttgtcccataaatcaattccttattccaaaattccataaaccatttcctttggccccacgcgtcagtgactgtcaataatattcttgagaatattatttctataaaattccataaaccatttctcctattccagaaactccaattaaacttccaaaattcatatcttctcaaccgctcatccgattgactccgttccacttccagtaattccgtaaaattgagatctatttaatggcactaataattagtctaaataggatctttcttttggtcttttgtttaggttttcgattgtttgcgtatagttgcggttatcggattttcgtcgatcgcgggttttctcgaagattcgtgaagcttcgtgaagaccttgagcaaggcaagtcaccctttgatcaattgctcctataattgaaaagtcattattattttgtttgcaacttgcattattagaatcacacacttaacttgcttggcctcggtttgcgtgccaaaccgacggacctacccagtagtcgcactaatttccgtaggtcgtactaccctgattccttgtcactccacccttgtggtacctcggtattcgtgctctctgagcgcgtataccaaatatcccacctgcaccgttgtttgtcgaaaacttgggaaatgggtttgtgaagccttcaaaacccgacatgtggtgtcggtgtgtttgaaaataaaatgaattgtgaaaactcgcgatgcgggggttgtgcctatgtggcactgtcccgtattcgcatataaggaccgattcctgtgggaaactcatcgaacataatcaaagtgcaaccacaaggtggaatgggacaccctggctaagtaactagtcggttcagggaaacctcgcgtgccaatagttgggaacgccggggcgaggtcggacaaaccgggttcctggtaaggcaaggacgagaagcttgctcacttaccgatcaaggtgattggagtttgatttgtgcacgcctaaaaaggcctatgtttatatgaggatttgatccttctatgtggcatgaggtaaccctgggtcggctggggaaaggctttgttgcgaacctccgataccgacgggtgttcggaataagttcgtatcttgtgggtaaagtgtacccctctgcagaggttaactaactgttcgaacagccgtgcccacggtcatgggcggatgtgaggtggttcccgttgcgtagatttgtttgcctgtgctttgtgaaaagttgttgtggtgtgggaatcgtaaccagaatcagcctatgtggcagatggacgacctgagtggtcagaaacgaatctgtgtgattcgggatgtctgcgggcatcatagactaggcttcccgagtggaagcggattgttgtgctgctgggcagctggactctgggagtccgagaaaatgaaaaaggctctgggagccgattaatcaagtggaatggctctgggagccgagaagtaatgatctgacccgggaggtcggtacattactaaatgagctgttgaaaaacatctcttaaagtcgaatcgagacgcaagtctcttttcggcccaaacttagaaagaaataaatcacttagtgatttcaaaatgtcttcaaataaaagatttgcaaaacaaccttgcctctcttccaagcttgcattaaacacctaagttcccgtgacttgctgagtacgaaagtactcaccctcgctctatataaatatatatatagttcctccgccctgaagagaagataaagtgaagtgaagattagggtttcgtcctggttcccagccgtcgcctgtggagttgggtgttagttcgttggttccgctgctgctgctgttgttggtgtttcctcgtccgtgtcgtcagttgcattctcgggttgttctgagctgcaacctaagttaaggtaaataagtcctctatttattttaaggatttgcaaagattcatatttgtcaccgtgggtaccagcactatgtcctgggactggtaccgagatcgcggtttcgtaggaagcggttcgcgccgtttttcctacgacacgctcctatcaggtgccgttgtacggcggtatcagattggggtgtgacactttgccacttctctaaagcacaagagacaagagttcagtgttcctgatctcattggctctttgggtgttgaggagaaggcgagggcaaaggacgttcggggcaaaaaggttgagggagggttctagtgccaatatggtacagaagaagaaccctcatgcatcccacaacaacaagaaagtcaagcgtgatgtcaaacccaaggctgcaaccaattttaagaagaaaggcaagggaaaggcaaagggagactgctttgtgtgtggcaagtctgggcattgggccaaggactgtcctgagcgcaaagacaggaagtctgccaacatgatcattagcgagggcggaggaacatcggggtacggtaaaatattacatacagttctctctgtttttcattcacctgattggtgggtggatactggtgctaatattcatgtatgtgctgacatttctctgttttcttcttatcaggtcgggagaggttcctccttgttgatgggaaacgggtcgcttgcggctgttcatggtgttggtacggtcgatctgaagtttacttcgggaaagaccgtgcagctgaagaacgtgcagcatgtcccttcaataaagaagaatctagttagcggctctctattgtgtagagaaggttttagacttgtgtttgagtccaataaatgtgttgtatctaaatatgggacttttgttggaaaaggttatgacagcggaggcttgttccgcttttctttgaatgacatgtgtaataatcataatgctgtgaaccatattagcgagaatgatgagtctaatgtgtggcattcgcgactctgtcatgtgaatttcggttgtatgatgcgcttagctaacatgagtttaattccaaaattcactttggtcaaaggttccaagtgccatacttgtgttcaatcgaaacaacctcgcaagcctcacaaggcatctgaggcgaggaatttggcacctctagaacttgttcattccgatttgtgcgaaatgaacggcgtgttgactaaagggggaaagaaatatttcatgacactgatagatgattgcactagattttgctatgtgtatctattgaaaacaaaggatgaggcattgcattactttaaaatctataaagctgaggtagaaaaccaacttgaaaggaaaatcaaacggttgaggtctgatagaggtggggagtatttttccaatgagtttgcatccttttgcgaagagtttggaattattcatgagatgacgcctccctattcaccctaatcaggtggccgaaagaaagaaccgtactcta

SEQ ID NO: 21125 - DNA, 1693 bp, Oryza sativa
agtaaagaaactgtcatgccccatgagcactttgcaccgatagaacacaatgatcaaacgcctgaggaaaatcctgaggaggacaacattgtagatactcgcaagagtaagagacaaagggttgcaaaatcctttggagatgactacattgtatacctcatgaatgacaccccaagaaccatagaagaggcatattcatctcctgacgctgactactggaaggaagcagtacgcagtgaaatggactcgattatgtctaatggtacttgggaagtcgttgagcgtccatatggatgtaagcccgtaggatgcaaatgggttttcaagaaaaagcttacgcctgatggtacaatcgaaaagtataaggcaaggcttgtggccaagggttatacccaaaaggaaggcgaggatttcttcgacacatattcaccagttgctcgcttgactacgattcgagtactacttgctctggcagcctctcatggtcttctcgtccatcagatggacgttaagacagctttcctaaacggagagctggaggaggagatctatatggatcaaccagacgggtatgtactagaaggtcaggagggaatggtgtgtaaactattgaaatccttgtatggcctcaagcaagcacctaagcaatggcatgagaagtttgacaccacgcgtacatctgcaggctttgtagtgaacgaagctgacaaatgtgtatactatcgctatggtgggggagaaggggtgatcttatgcttgtatgtcgatgacatactgatctttgggaccagccttaatgtgattgaggaggtcaaagactatctgtccaagagttttgaaatgaaggatttgggagaggctgatgttattcttaacatcaaactacaaagaggagatgagggtgggattacacttgtgcaatcccactatgtggacaaggttttgagtcgctttggatatagtgactgtaagccagctcctactccttatgatcccagcgtgctattaaggaaaaaccgaagaatagcaagggatcaactgagatactctcaaatcattggttcattgatgtacttggctagcgcaacgaggcctaacatctcatttgctgtaagcaagctgagccggtttgtctcaaatccgggagatgatcattggcaggctctggaaagagtaatgcgctatctaaagggcactatgagctatggaattcactataccgggtatccaaaagtactagaagggtatagtgactcaaactggatatctgatgctgatgagataaaagccacaagtggatatgcgttcacacttggaggtggcgctgtttcctggaagtcttgcaagcagaccatcttaacgaggtcaacaatggaagcagaacttacagcactagatactgcgacagttgaggctgagtggcttcgtgaactcctgatggatttgccggtggttgaaaaaccagtgccagctatcctaatgaactgcgataatcaaacagtgattattaaagtgaacagttcaaaggacaacatgaagtcatctagacacatcaagagaagactgaaatctgtcagaaagcagaaaaactccggagtgatagcattggactatgtccaaacggctagaaatctggcagatcagtttaccaaggggctaccacgtaatgtgatagacagtgcatcgaaggaaa

SEQ ID NO: 21126 - DNA, 22773 bp, Oryza sativa
cgcagtacagcgcgttcctttatccggtctgtgaccagtcacagaccggtcagatcacgggttaggtggcgacaggcggtcagacgcatgcttcgccccatcctgtctagacgagagcttctaggcactcgtccccggctggagctagcgtgttatatcccagagatgacacgttagccccggtcgatttataccaggcttcatcctaaccattacaggcaagatgttgtgtgaagaagggcaaacatgcaagttgctaggctgacgcgtggtgggcaagaatgaccgatttgtgaccggtctgacattggtcatgtcatcggcagacagccacgttcccacgacgcgcctgcctccggcagaaatggaggtaggtgtgtgctgtcccgtcgggaagatgttcggaggacgaccgtgcaaatctcggtccattgatgaagagaaaaaaagtccagtttggaaagagaggggcgcatgtggtatccccttgaagtataaaaggaggaccttgcccatagagcagggggttggttgattgattctttccagattcagagcctagaacaagggataggccggctcacactttgtagctcctccatacacaaatccacaaaaacacaggagtagggtattacgcttcgcagcggcccgaacctgtatagatcgccgtgtctcgtgtgtcttgcgggcgggtaatctttccacactcggagagagagagagagcttgggattgcaccctaagcccctggtcgaaccggcaaaggggggcttgcgcagtctcccggtgaggggccacgagctccgtcaggagtaattatcatcaagaaatatatatctataacatgccacataaatgacaatcgaactagtactaaaaacatacaaagaagtaggcacaatacgtgctggaacagttaaaacgatacttatagactttttcccacccctatggagtggaaaaatataaaaccaacaacttttgctgattataaaaaaaagagtaaattgcgttgacggtacaggaacttggcaggtgggtgcgattaggtgtaaaaacttgaaaaccgagcgtagcggtacaataacttggctaggtgggtgcgctcatggtgcaaaagttgccacgccattgttccacctaagcgaaagtgccacattagcattgaccatctcattttacagaaaagtccatagtaacttttatattacgatcccattgttcggtagaaagattggaaagataggccctgccgccgcccgccgcggcgtcgacggagcaaggtcatcgagcaggcgacctcgacgtcctacaggttcggcaacactggcggcgccatgaccagtgccgcgtcctgtgctggctccttccttccacattcgctgggcgcagatcgagtctccgacaacatcaaatctctgttcccctcctcgtccacagccagcggcgccgcctccgccagacacgacgagtacaggggatccccgccgcgccgctggacacgacgagtacaggggatccccgccggacctcctgtcgcaacgacaagcaaccagcagacgcagtcacagtcacgcaggagctatgcctcaatctggtgagcaattttgggactgacgaagtgacatttctctgtgttggctgcctatacaggggtttggatgttctgcaatatatgtacctagaagtatatatgcaagtgatgtatagttcctgtaggttcttttgtaagtactttgggagtgatttcattatgtacggaattatgatgaaagtgatataaagttcctctgtgcttttattaagtactctgtaagtgatttccaaatgcatcaaaagctgcctcacataatttgtttccaaattggtacgaaaaattcagaattgtatgcttctgtctgaatgagacatttggtacactttatgcccaacagcccaagcgataatctgtcataattttgccagcttgttttgaccaccacttgcaatgtagggaatttctatacacatatataatgtgggacattttcttgtccataaataaatcaaggtagaaattttcatactgaaattcaggaagaaatcaacatgcccataacaaaataaaaggtgcaaaataaacactgttcaagaacagggaaatcagactaatgtagcttatgaaacatgtctatctggttggtatgaaactaaataaaactctctgactgaaacatatgctaatgttttccacataaaattgattactagctgttttcattttttctttgtctccttccttttcttcggttctgcttcattatttggtatcgatttcttattaggtggtgcatttttcttccttggctctgccatcctcttcctaattgttgccctgccctctttggttgcggtcgtcattggtggctccactccagcccttctgtttgtggcaataaaatttgattccggcaatggaccaggggcaactctagacgagctgttgattgtgttctgcacaaagtacttgaaattgtggaaaaatgtttcacaaagttacaaaatggagaattgagaaagcattgcctaacctctctaatcaaggaagacaatatggtattgtctaactggttgtagtttggctgactagttagaatactagtctgactattcagaatatcaggcatgacctgcaaaggcataacatcttcttgaacaggctgtagagaaggagcactggcctgctgctttccactttttatatcttccttcctcttcttgcatcccttcttattgtgattaactccttggcaatagctacagtgtagttgcacaccatgtttgaatatttttgttcctccttcaagctcttgaggctgctttcttctacatctactaggccttccgactttcttttcataaaccggtgggttgaccttcactccattcatcttcgcccaagcagttttgtctctaacaggcattatattaaatccatatgcttccataaatttctctgttgagtaacaaaaggacaccacgtctttaggcttgatcctctcactcctcaagcaagaaattgcatggttgcatggtatccctgttagttgccatctcctacattcacaatgttttgctatgatgtcaacaatatattggtgttctttctcagtaacttggaacacccctttaccagcaggcaagacatagcatgtatttgctatttctgcatttttctcaacctttttctttatttttgggcatatatttcccgaccacttctttacgcactcctcctgcttattatgtatcctattcatgatctggctcctaatcttctcaagcatggacaacattggaagctctctaggttcaagaatatacttgttgaatacctcagaattgttgttcagcaaaatatcacacttgggaaaatcactaaagaattctctgcaccactgatttggtggtatttcctccaagtatccataagcatcagtactaagatacttcatcttttccatgttggattcccattccggtattgaactggaccttgcaattgcccacaattggttctttagagtctcccctttatgcaaaacatggaagttttggtatagatgcctaacacaaaatctttgttctgaatctggaaatttatccctcacagctggcaccaatccctacaatttaattaaaaataaggtgaattctagtccatcatcaagtttaaaaataaaataaaatatgatgaaatagagatgtaaggaataccttttgtctatctgtcataatagtatacggtgccgtgttgtcaataaggagatcttctttcaaagtattcaagaaccaaccccaactagctctactctccacttccacaattgccatggctataggatagatgtagtcattggggtcaatgcctactgcagtcaataaatgtcccccaaatttggttttgatgtggcatccattaagaaaaatgataggtctacaaccacttaagaagcctcttttgcaagcatcaaatgacaaatagcatgtatggaagcacatattctgtaaattcaagaaaaatttgctacctggattagatgtcctaagctcttgtccataatcccataacatatcatactgagctatttcatcaccgtgtatagcctccaaagctaaccttctcgctcgtcctagtttgtatcttgatggtgttacatttaggtctttttgaactactttacaaaactcttgagtgtcatcttatcattatctctaaagctttcaatgtacctatttgcaagatatctagcagtacataattcaactcccactctttttgacatttgtgaccatccacatattgttttatcataaaacattttgtcctgctgtcctcagaggcatttaacatccatgggcattcttcagaacatttggcctctattcgtttcttggtgtttcttgcaaatctgattgcaactctatttttcacactatattgttttattgcctgcctaacttcaatagcatcattaaacaacatcccaaccttaaagataggtgactccatgtccacatcagccacaaagttcttaaatttcaacttgatgcccccataatcttcatcagatgactctggtagcagcaaaccttcatcatctggatcacatgcaggaagctcaactactagcttgctagcctcagcattttcagtttggtcaacacaattgtcaaaaacatcatcatcccccttgtcagcctcataatcactatcaataaagtctggatctaattcactgtcatcctcatcatcaattttatcaccttttgcaacttgatcatcacaaaccttctgactcattgcgactctcctgggactagccacaataggtaaagtagttggggctgaaagagctacatcatcccaattaatcgattccacaatatcctgatgatccgtgtacaaaagcaatgatctgaaccttggtactaatgcaaccatgctgttagtgcttgcatccgaatttattctccttagcccatcactaaatgttttcccaggcaataaccaataaaccttaaccttcctcttagaattatcatatcctagttgctcaataaaatcatcaagccataaggaagaccatgtgtcagtgtcgcaatgatcaaaccagtccaccttctcatccaaataaattctgctactgccaactccacaaaaaaacccaccatgatgcagttcaattgtgaattcttcctcctcatggcctgcaatatgaaataattggtgatgtgttatacccgcataaggaaaataatacactaagattatttgcagattattgaactaattatatgctgctgataggggtacaaaatacatatagcaagaatttatcattgccaatgttactcttatatcgtatacagctacaggaaacaccaataattacagtacaaccaatctcgtggctagtaccattatatcacttcattgcattgtaataacaaataacaggatattcaagtgaaagaccaaaataatgcagccatcgtacagatcaatgagaccttaactttgcaatcatccatcaattgaacaaaaaatagaaatctactaccatcagcaagtgatttaccataacaaggagcagaagctccaagaactcaccgagtcggagccatcccaaagcttgcagcaatcacgtcgacagcagcagtttgtggacttgaattggcttggttatggtttagggcttgaattagtgtggcacacggagccctcgtcgccgccgcgatgtagttgcacggtttccctcgtcgtcgtcgtcgccgtcgccaagtcgccgccgccgccaccgccgccgttgcgtctccaccagtgcaaccacctctcgatcaggatcacgtaagaaagatgaagggagatatttgtacgttaagaaatcatattagggggttttctataaaatgagataggtctttcgcgtcaatgctaatgtgccactttcgctgaggtggaacaatggcgtggcaacttttgcaccatgggcgcacccacctagccaagttattgtaccgctacgctcggttttcaactttttgcacctaatcgcaccctcctgccaagttattgtaccgtcaacgcaatttactctaaaaaaaaaactgataccaataatataaatttcattttttaacaaaatgatacccaagtaggggttaaaagtgcgggtactttaatacaaccgaaccgagacgagcggaggggagtgaggaatctttttcggcttattttgctatatttatgtcgccagattttttttaatggatctcagtcgatttgtgggcaatatgattagcgctacttgcaccattgctctttgctggccttgtcggtggctgcacctctccgtcccatccccttcccaccggtgctcgggatggccggatccaacactgcccctccccaccggcagtcgggaggggctggatcctgtactgccccacctcacagtggcatggcgggaggcctcccatggcgagggagtggtgggtggcctcctcacggtgtgggcttggcgggaggcctccatggagagggagtgatagatggcttccaacggtgagggcgtggcaggaggactccacgaaggcgcagagggccacctccccatgtggcacaacgggcggcttccccatggctggcgcggtgggtggcctctcttcttcacgaccgacggctttaacggcagtgcagtgggcagccttcctccggcggcgcgacgggcggcctcaccatggaggggcgcagtgggtggcgggcggccaaatccggctagggtgctccacaaaaattgcgtggtgggcgacctctcctccgcggtgagcggccttgattggtgacgcaatgggtagccttgatggtggcgcaatgggcggcctcaccatggcggggcgcggggggtagagggcggctagatccggctaggttgctcgacgatggttggcgcactcgcgggaggattcaccacggcaagcaacgatgtatttctcttccttgttgattcttgattttctaattttggcctctctgcgttgttgttggatggatggtgagattgtgagaaatgtattcttggattcttggtacatggatgttaatgaatgtgttcttggatttggatgatggtgagctgctcgattcatcggctcgaatcaagccaattcatcgagctggattttcgctggcggggttatgaggggtgaggggttacggactgccagcgaaaatcgattttcactggcggccacgctaagaggcccgccataaaaaatagctctattttcgctggcggcggctccaagaggccctccataaaaaaacgggttttcgttggtgtctgattttcactggcggcaggaaacagcaccgaaataaaatttgacgctataaaagcaccacccccacaccagcgaaaaccctgttctctccgcctcgtccttatcctatctcctcctagggcagctgcatgggtttgatttttgctggcggttgatttaacacagccgccagcgaaaatgaattattgcaagcggtcggtgtaaggcaaccgccagcaaaatggatttttgctggcggctggcttaagatgatcggcagcgaaaatgaattatccctggcggtcgataccgccagatcttcgctggcctttgctttgtggcggctacaaattccgctagcgaaaacctaaaatgtccgccacaaagatggttttcgtagtagtggtacttgttgtggggttctcaaccggcaacaatatgtgttatcggtgtcggttctacaactggcaccgatgaccgaggtcattagtgacgcctgcggagatgctggttgggaaatctgacatctatggcgggttctcaaccggcacaaatccgattttctgtagtcgtgcaagtaattggtttcgttgatcatcaacttgtacttactatgttggatacgtaccgcaccattttttctttttgcagcagataaaaaagtattaaacaaacacgtaaataaactttcaaatagaaaccaatacaaatatctgcgattttaatttccagccttccaaacgggttgtaccaagatttaaatcgtggacattttaaattaggataattaaaggtaattcaagctgtgaatacagggaacactagaacaggttcggtcatctgtaaggggtctaaagcctaattgttggcggctgttaaatgctaattctataccgccaacatctgcataaagtttagataataaaacatccaacatggtgataagtgcttaatctcacatattccacaagtgttggtgtatatttgtatgcaggtgataaaccccgaggttgggaagaaatctagactaaagtgaggagaattatgtatccatacaaggatgggttgtgaacttcatcaaaatatcagaaaatctgcccaaaattccgggaaatggatagaggagagtccagggagtccacaggccgaaggccaggccgggagggcccagcccaggttcggccgaacccccctgatcaccgttgatcctggggtttggcgtggacgctccagatgatgtcctgatggtggttgcggggcagttcggacatttccccttctcacaacctttataactgccctataaaaggagtttcactccttcactctcacacacacttccaatcttgagctgaattataagaggctctattgaactatattgtataatagaatagtaagtgagtagagtagaagaagtcagaagaattccagagttgtcggtaatcttctctcatttcttttattctgtttattactctgaattcaatataatattcttcctgagtaatttagatttatcttgtggagaattatctcttggttagttcctaaatagcatacgggattattgttcactataatcaacaaaaatatagtgattgctttgatgagttataaacactaaagtagatattaattgcttagacgtggtgtttaggtaattgttatctagtaattgctgcgtatcccacagtacgtttgaggtaggtgtagaggtggtgacagccctcgagatcacttaagtcctccttgtccgggtacgtagtagagcgacatctgggaacagcgggttgccagtgcccgaagtattgcgttaggattaaagttaagcttcccttagacactgtttctcactaataaatcctctctatcctggcctatcatgtgcttggtgtccttggatgaaccggaggaagatctgaccacacacgtttccttggattcgattgcctttggaatactccgtaggggaagcgctacagtggtatattcgtgcgcttgcggattctatctgtgatcgtaagaaataccaacactcatctctatcgggtagtgcccccgtcactaagcaaaggtcactaatgtgagaaaatatctcaatcgggcatccggccatcacggatgacacacatctcaatcgggcctaaattatagtccgtcaatataatccaaaaaaaaaaaaggattcgatagcctttggaatactccgtaggggaagtgctacagcggtatatccgcgcgcttgcggattctatctgtgatcgtaagaaataccaacacttatctctatcaggtagcacccccgtcactaagcaaaggtcactaatgtgagaaaatatctcaatcgggcatccggccatcacgaatgacacacatctcaattgggcctaaattatagtccgtcaatataatccaaaaaaataaattttattttttggctagtctcagacctttgctagccacgcccgtggtcacccatcccgaaattgctccatccttagcacgcttaaccttagagttttttgggatcgacttccggagaagaagttgtacattcattcacatacacaaccatcaatatatttcacacaaccacattcacataatatccattttgatcatatatttcatacccattcacatatttcacatatttagctagcaaaatcgagttaattggatcaaatatatatttagcaagtattaaaatgatgaggaggcaaatcagacttctaggcaaaaaaatttcaaattgaattttatgatactaaatgaggtcatatgaaaaaactatcaaaaacaaagttgaagaactcattgagatctaccgattttatttctgtcatttctccatccgggtttgattgaactatataaaatttgaattttaaaatataggaaattcaaataattttttggatagtagatgatttcaaatggaaaaattgtcaacgacaaagttgtataacttatcaagatctataacttttattttggtcatttttctatataacatttttttgaacagtttgaatttgaatttgaaaatatgacaactccaaataatattttcaaatactaaatgacttcaaatggaaaagttatcaataacaaagttgtataaattatcaagatttacaatttttattttggtcatttctctatataacatttattgaataatttgaatttgaatttgaaaatatgacaacttcaaagaacaatttcaaatactaaatgatttcaactgaaaaagtcatcaacaacaaagttgtataactcatcaagatttataacttttattttggtcattttttcatccgacaaagtgatagtaacattgtttataaaattcacatatctctcatctggttttataaactataacacagatatatcaattttgtgaacaatatttctaacactttgcgggatgaagaaatgaccaaaataaaagttatagatcttgatgattgttgatgacttttttagttgaaatcatttagtatttgaaaatgttgtttgaagttgtcatattttcaaattcacattcaaactgtcaaaaaaaagttatatagaaaaatgatcaaaataaaaattgtaaatattgaaaggttatacaactttgttgttgacaatttttccatttgaaatcatttactacccgaaaaattattttgactaataaaatgaattattatactacagttaattattttgcttcatgtcaactcacaaatataaacatttcatatgaaaaatggaaaaatactaagtcattgtcagggttacggattagggataccccttacccttcgatatatgttacatatcgatatggcatacccgtgcatacatggacattctctgtacgagttaaggaaatccttcgcggaattggcagatgtaaagagatctactcggacaagactaggttgtcagcgtaccgtgtgcggtttgatgtctccgagtcctgcttggagactacttgacctgcggtataaaaaggaccccctgggaggacctgcggggtcgaatctcatagccaacaccaccaccacagcctacgaagtcggagcccgcggaagccagatcgccgagaggtctagtcgaattgactcgattacgatctcgtcggttttatcgagttccattgttccctttgtaacctgtgatttccatcatacaatcccataccactggattagggctattacctatcaaggggcctgaacctgtataatcttcgtcttctgtttgcttgatgtcgtactacgtagacccttgtaccaacgtaccccaatactctctatatccggtctacgggtatcatccgtcgacagtggcgtgctaggtagggggacttggtgctcaaggatctactactatttcatccagcctcgtcgacaacagcgtcaacgccaacctcaactacgagcttcctgcctcgacgacgcttacgtgcactcaagtcggcgaaattgtctttccggtttacaccatgatgccgatctcagctgggccgtcgaggaccagaaacgagaacgcagtggctgtagcccaagatgactccacgtcgaaggatcctcccgccgaagcggagaacggaacatcgacgacatccgagctcgagaagaattctaatgcggccaaaccttgtcgttccgacaagaaacacaggccgacgagaataacttccgaggtgacagggtcctggtgccctatccacaaaaccaggaaacacactttgcaagcctgcttggtcttcctcaacgcccgcaccgagatccgcgcctgcaaagagcgtggaattcagcgtgtttctccaactcgtggtgtctattgtcctattcacaagacaaagaatcacgacctttcaagctgtaaagatttcctcatcgtcaccaagatgtcatctcccaaggtccagcagccaggcaagacccttagagatgaagacaaagaacgaggaacgacgttgaccccagattgtatcgtcggtgttatcgacatcggttcttccgaaccatcggtcctacatctactcgaagactacgactcctcgtcaacaagtacgccgcgtgaggtcttggctctcgacggcacaggcacatcggcacgcgctaacaccggggcggaaaatcaaacatctacaccggctcagcacatcaggaccctcaacgcgatactgagggaaaccccttatgaccccgtcctacacgatgacctcgcacaatggacggaacggttacgggagtcagtgaccaccctcagtaacgcgtttgaggaggccgccactgcaacccacccggaacagcaaccaactgctgatgtcaacggcgaaaaccccgaacagcgggaatcaccccatcgggccgccctccacctcacggcaccagcgatctccgcgaccacctaaacggccgccgagaagctcgtcgcacacgggaaaacgagaaccgttcccggcatcacgtctcttcacgacaacacaacaatgaagaacgaggaggccactcgagccaagactgagaccgtggtcaccgccacaatcgtcactttcgcgacgatcgtgagcgacggacgccggatgatatcagtcgaggacgccgccatcatgacgaggacgacagagaacggcgccgggacaacaacggagggcgacgacaagactctcgagaacccggccggcgttctcgtaatcctacaccggaaccaagcgacccgtcgtcgtcctcatcctcttcctcctcctcatcgttagacagacatccacaaaggacatacgatcactgacaacccactgcccccagtgctgggtgtagggctttcagtcgttcgttgcgcgatgtccgatggcctgagaggttccgaccgggagcaatagaaaagtacgatgggagcactgaccaagaagaatttcttcaagtatactccacagtactctgtgctgccagagcggacgacaacgtgttggcgaattgcttgccaactgcgttaaaaggctctgcgcgttcatggttgatgcaccttccgccctactcgatttcttcgtgggcagacctatggcagcagttcgtcgccaatttccagggaacctacaagcgccacgcgatcgaagacgacttacacacattgacacagaactcgggtgaatccttgagggaatatgttcggcgctttaatgagtgcagaaatacaatcctcgaaatcatcgatgcttctgtaattcgcgccttcaagtctggtgtcagagatcgctacactacccaggagttggcaacgagacgcatcacaactactcggagactattcgagattgttgagcgatgcgcccacgttgacgatgcacttagacgcaagaacgacaagccgaagaccgggggcgagaagaaaccaaccacggacacacctgagtcaagcagaaagaaatatcgcaagaacgcgaaaaggaaagctcaagcagaagtactcgcagcagaatatgctaaccctctcaagcgcccagaccgacaaggtagtgacgcaaggaaagcatggtgtcccatacacaggtcgaacatacgttctttggaagactgccttgttttcaaaaaatcgctcgagaagcacatgacatcggaacaaggcaaacgagtacgcgtggtcgagaaggatgcggagatgactgctcaggagtcggacccagcgtatccagattctgacctccacgtctcacacatcttcggaggctctacagcgtactcctccaagcgagagtataagaaagtggagcgagaagtctgctcgacgtggcagggggctgcacccaagatgaagtggtctgaacagaagatacaattttcggaagatgaccatcccaagaccgccgttatcccaggacgctacccgatcgtggtcgaacccactattcggaacatcaaggtcgcgcgggttcttattgacggtggcagctcaatcaacctcctcttcgccagcacattggacgccatgggaataccacgaagcgagttgacacccaccgatcaacccttccatggaatcactccccggtcttcgtccaaaccaatgggcaaaatcacgctgcctgtgactttcggccaagcaaacaacttccgaacagagaatatcacctttgatgtcgctgaattcgatacttgcgaagttcatggccacatctcactacgcgtatcaagtgctcaagatgccagggccgaagggaacaatcaccatccaagggaacgcgaagctggcggtacaatgtgacaagcggagcctcgacatggtcgagcaaacgccaagtccacctgccactaccgagccacccaagaaaatgagcaagacaaacaagacgccgaaaccggacggcgcaatcaagatcgttcctctctctagtgccaaccccgacaaaaccgtcaagatcggggcatcgctagacgagaaataggaactcgcgctcatcaccttcctccgcgacaatgctgacgtgttcgcttggcagccgtccgacatgccgggagtccccagggaggtgatcgagcacaaactcatggtgcaacccgatgccaagccagttaagcaaagactgcggagatttgcaccagaccgaagacaagccatacgagaagagctcgacaaacttctcaaagctggctttatcagagaagtacttcatccagagtggctagccaacccagtcatggtgtggaaggccaacgggaaaatggagaatgtgtgtcgacttcaccgacctcaacaaggcgtgccccaaggatcatttccctcttcctcgaatggacctactggtgtgagctgttgagcttcctcgacgcttactccggctaccaccaaatcagcatggcgagagaggacgaagagaagacagcattcatcaggccgtttggggtattttgctacgttaagatgccattcggaatcataaccgccgggaacactttccagcgcacggtctagggcgcacttagcgatcagctcggcaacaacgttgaggcatacgtcgacgacatcgttgtcaagaccaagaaaagcgactcattgtttgacgacttacgggaaatgttcgacaacctccgacggtatcggctcatgctcaatccagagaagtgcaccttcggagtaccatcgggcaagctgctcggcttcctcgtttctggcagaggaatagaagcgaatcccgagaagatcaaggcaatcgagaacatgaagtcgcccacaagactcaaggaagtacagaagctaaccggatgcatggctgcactaagcagattcgtcgctaggatgggagaacgaggacaacccttcttcgctctgctgaagaagcaagacaaatttgtatggacacaggaagccgaagaggcatttattgcactcaagcgctacctatcaaatccccatgtactcgttgctccccaacctaatgaagaattattcctttatattgccgccacgccatactccgtccgcactgtaattgtcgtagagagagagaaagttcaacgaccagtatactatgtcagcgaagctctccacaacgcaaaaaccagatatccacagatccaaaaactgctctacgcagtaatcatgacgtcaagaaagctacgacactatttccaagcccacagagtcacagttgtctcctccttccctctcggtgaagttgtgagaaacaaagacgttgtcgggcgcattgcgaaatgggtagtcgagctaagccagtttgacgtccactttgtaccacgaacagccatcaagtcccaagtactcgccgattttgtagctgactggaccatgcccgataatcaatcagataacaagatcgacgacgaaacatggacaatggcgttcgacggtgcactcaacagccaaggagcaggggcaggattcatcttgacatgtccctccggagatcatttcaagcacgcaatccacctcaacttcagggcgaccaataacacagccgagtacgaaggactactcgccgggataagagcagcagctgcacttggggccaaacgactgatcgtgaaaggggactccgagctagtcgcgaaccaggtacacaaagattataaatgctctaaccccaagttatctaagtacctcgcagaagtcaggaaactggagaaaaggttcgatgggatcaaggtccgacacgtataccgcaaggacaacgtcgagccagatgacctagcgtgacaggcgtccaggtgagaaccactcgaacccggaacttttctagacatcctaacgaagccatcggtgaaagaggcaatcggcgagatcaacacagccgcccccgacatcagctcggaggccacagagcggaacgcgccatcgccgatatcgaggtcacagacgactagcgcaccccactgatcaaattcatcagcagcgaagagttgcccgaggacgacgcagaggctgagaaaataacccgtaaaacgaaaatctactgcacaatcggcaacgatctatacaagaaagcgccaaacagagtacttctcaaatgtgcctcgtccgacgacggcaaacatctcctcctcgacatacatgaaggcatctgtgggtcacatgccgccggtcgcacattggtcgggaaagcctttcgacaagggttcttctggccaaccgccctcaaagatgcatgcgacatagtccagcggtgtgaagcctgtcaattccacagcaagcacacaaagctacctgcacaagcgctccagaccatccctcttacttggccgttctcgtgctgggggctagatatactcgggccattcccacgaggatagggcggctacaagttcctatttgtggcgatcgacaaattcactaaatggatcgaagcgatacccacgggggaaatcaaggccgccaacgccatcaagttcatcaaggggatattctgcagatacggactaccgcatcgcatcattaccgacaacggctcccagttcatcagcgccgacttccaggattactgcatcgggctgggagtcaaaatatacttcgcttcggtttcccatcctcaaagcaacgaacaaatcgagagggcaaacagcatagtactacaagggatcaagacctatgtctacgacaggctcatgtcacatgacaacaaatgggtcaaagaactcccatcagtactatgggccatacgcaccacaccgacaacatccaacaaggaaacacccttcttcctcgtatacggctccgaggccatgctccccagtgagctacgacatcagagtacacgagcacagaagtattccgacgaggaacaggaagagcagcgaaacgacgatgtgaatctactcgaggaacatcgcgaacgagttgccgtccgagcagccacctaccaacaagcccttcgccgctaccacgagaagcgcatccgagacgcatactttcgatcggcgactacgtcctccgaagggttcaaagccaagcagggcgaaacaagctctcacccaaatgggaaggaccatacacgatcacacaagtcttgcgaccaggcgcattcaaaattgcagacggcaatggccgcgagttggcaaactcatggaacattgaccaactacgtaaattctatgtatgagtcaataccctccatacctgtaagacaacttacatcatcaataaagcctatttttcaggcgcatattgcaatcacagtgtcctgcccgacaatccctcacccagatgacacctagcgttgacacctgtcctcatgtccctttacgccatgctgacaaggccttcgaggaacctaagggatcttcggctggggacgcccagagccgataaggccttgtcagattctgtagagacgaaagaccatgccagccgtggtcgtgtaagagttctccccgtgcgtattaaccaagccgcgtaatccgaaatgaattttccaacttcgcggctgggggctaggatcagcgtttgttcaaccgaggaaggtcaaaggtccaagagccttgtcctctgagaatcattctccgacgacaaggctgggggttagggagagtgtacaactcaaacgactggccaaagtcggaaactgaggaggcactcttacacactacatccagagtaagaaggactcattaagatagatttcttttctatttcataagatatttcttacaattttacacaagtccaaaagcatattacacttttccctaagatgtctatcgcaggctaccaggaaggccaacgccagtccatcgactggaagactttctccgctagcggcgccatcgacttcgccaggtgatctatctctgccggagtcctccgagaacgagcgaacccatcacagagaaactcgaggtgcagctgcggacgatgctctcggatgcaagccaacacatgccctccggcgtaccggctcgaccgacggcattcctgcttcagggcttcgtcaatgcgcttgccgacgccctcgagctgagtacatgccccattcagccacgagatgtagccggccgccgattcctcgggatctccacggggcacccggagctccctgcaaacatgggccatggacgtgcagcaactcttcagataagagtcgaaccacacctcgcgacccttgagcgcctccacggcctggtcttttttcacctccaccatcgccctctcgagttccgcgacttcacacttcgtcttccagtattggatgcgacgatcttggtcagcaagtctactctcgagatctgctcttccattccgagaacacgaaaatcaagtcactccgggaggaaggatgaaggagatgaaaacaaagatcaccaacctaagggagccatcgccacacccgtctccacgggtgagtttcgttccatgtcgtcctgcgagacacgcgtttggagggcaatcgccggggcgatcaccggtgagtcgggctgctcacgctgtgggacatcctcgacatcaacatccctacaaacgacaaccaaaagtactcaggacaagagtgctaacagagatcaaggcagcgattacacgaataaaggcggtcgaaaccgacgaatgttatacaaagtatggtctattacaacagagctgaggccctactcttcaaaaaacgggagaacagactctcccagttcgccaacctcctccatcacgcccttacgagcgtcgttggcggccccccgatccaagacctgccgaagatcgtgttcggggtgtgccagccggacacacgctaggacgtgacaggccccggtgtaaatccagttcgacgtctcctccacgatcctggccgcatgcttggagggtatcgcctccatcgccgtagccagttccgcaagcgaggacgtcagcgagaactcgtcggggttcgctgggatggttgtcgtgacaccacactccccggcgagctgatgaagaccggtgtaggtgacccgcagcgacccacggatctccgacaggttgttctcgagttccgacattcggtcctcgagcccccgccgttgccgctcgttaccggccaccagctccctcatcttctggagatcctcgcgaacctccgccaggtcgcgctccagcttgtcggcacgcgtgttcgccgacgacgctgccgctgtcttcgcctcctcgatctcgcgacttatgccgcgagccccagcctcgaggatgcattgcatctcagcctggagctccctccaggtgaggacgttggcaggcggcctgcgactaggcccgagggcactggacggaccgcttggcgtcgcttcacggctccttggcgcgacaacgacgtcggttgaggttgctgcaggagacgctccggaggccccttcggacttgtccggcgtcgccctcgcctgcgccgacctgcagaggatcctcatgtccggcccttaaatcgcgtcaccggaagaaaaacgaggagaggacttctacttccgtttacttacttctcgccgagcgtcaccagcttcctccgccgcgggggtggcgaagacgcgtccacggcctgggtaaatcaagcgcgagttgaggttgacacctttcgaatacgaagttaacgaaccaagggactcaccgatggggaggatgctctccggcgactgccgagcacggaggtaaaagtccttcccgttttcgggacgcggctgccactggtcgtggcagcagcggcgacggctgcgtcgggcaccccccgagcggcgctcaccttcaatgaggccgccgcctggtggtccgcgagcggtccgatgacgtcagccagagggagagcctgtatcacatgaagtcattttccgacccaggagacaaagacaaagattgtggtttcgcgctcggtcgcctccttatcgcaaagagggacggggacgtcgctggccgttgtcaggccgctgatcattaactgaccgacgcggcgctccacggtggcgtcactcaagcctgcagatcgagaacagaactcgataaatcaagaagaacatgaacggaaggggatcaatttaaccaaacaagaaaaataccccgaggagaaaaccgggtcacgtcctctggtccagagtagtcaaaggctggatgggcacgagcctggagccgctggatccgcctactaatgaagtcggcagcaacttcgtaccctgacaaacctcgcgctcggaggtcatcgatggcatcgataaacaattgaagagcaggggtcaaggtgggttttgcggtccaagatgggattttgtctggctgttcctcgggaacgacaaagatcagatctgaatcctctatctgaaggtagaaccacctcgcccgccacttactacgagaagaagggctctagaaagggatgtatcgcgacttcaggccatctcgaagtcggaaacccacacatccagataccctggtggattccatccaacacaactcgtagtaaaagcggaagaggtcgagaaatggctctaccccaatgtaggcctcacaaagatgggaaaagatgctgagaaaggcaatggaattggggttcaaatggagcaaagaacggccgtagaaattcaagatcaagagaagaaattcagaaggcgggggaagaaagccacagagaatataatcctcgatcgcaaccatacggcccaggacaagttcgggttcagtacctcctggttccctctccatggttccacggccgggaagggcgccatcctcctgtagcttcttcaacgatgcgctggtggaggtggacttgccgagatccattgccgccggaaatcgccggagaaggggccgagatgaacaagctctggttttgcaggagcggaggagacgaggaatgcctggaggctggagagctttcttccacaatgggcggacttcaaagtggatcctcaaaatcctcttaaatagatgcgcttccgacggtgcgaatttcaaggaaaggagagagattaccgccggaaatttctaggtccgttacgcgcggcagtttttcagacttcagtttaaattcactcatgaccgttgggtttcacatggtattgtcgattgcgtcctgtctccacggttcatacaccgagaacgacaacagcttcgacatcagaagtcgtgatcggtcacatgagttcatttaagcagaagtagggggctactgtcagggttacggattagggataccccttacccttcgatatatgttacatatcgatatggcatacccgtgcatacatggacattctctgtacgagttaaggaaatccttcgcggaattggcagatgtaaagagatctactcggacaagactaggttgtcagcgtaccgtgtgcggtttgatgtctccgagtcctgcttggagactacttgacttgcggtataaaaaggaccccctgggaggacctgcggggtcgaatctcatagccaacactaccaccacagcctacgaagtcggagcccgcggaagccagatcgccgagaggtctagtcgaattgactcgattacgatctcgtcggtttcatcgagttccattgttccctttggaacctgtgatttccatcatataatcccataccactggattagggctattacctatcaagtggcctgaaccagtataatcttcgtcttctgtttgcttgatgtcgtactacgtagacccttgtaccaacgtaccccaatactctctatatccggtctacgggtatcacccgtcgacagtcatctcaatcaggcattagtatagagcccgtcatggatgagtcatctatgacgggcctaattgttgagatatggtcgcacagacatgttagatgtgcataaaactcaggcccgtcacggatgacatatatcagtgatgggtcgtagtttaggcccgattgagataacattccatatctcaatcgggccgcaagttggcccccgtcatggat

SEQ ID NO: 21127 - DNA, 2104 bp, Oryza sativa
aacatgtgcaaagaatgcccgtggagatcatttgtttatgagtgcgatgaacacaattgttcattcaattaaaaagttggataagtggcttaaagttgacattttacattgattgattatgaaagtaatggtacatacaaatctttgtgcccgtataactatttgccaacgatcaatagaacttgatagttactttcggtgttccttttagtatgtagcaaattggctacatattttacaacttactgtatctttggtgagatgcacctgctatttttttctatatgttggctagattgtttcattgttattaatcgataccttgggtgcatgtgacactatatatatttcaaacaaaaaagccttctcgggtctaaattgatttcgcagtgtgggagacaattcatttgttccgtgcactgtggtatgattgttgtcatgatttaaatatttttgctctaaaatttatgattaaacattagaaatttacgtgatccaaacgatcactgtttgtgattttatgttagctaacgtgcattgggcatttagtgacaatatttatattgcataatcttaaatgtgaagcctaccatgcttaccctattttatcttttttgtttgaaagaattagccatttatacaatcatagtagtttgaatactaaatagtttttatcttttaagtttctaaaataattggtagataaagctcttagctcggtcatctgtgatatacacctgtactcccaagctaatttggcccctatcacacatgtagtcacaagctaatttggcccccatgctgatggtgttcccattaatgtcgatgggggcaaaactgtgaccgatcaggagtcttaagcgtttctaggatgttcacgtggtggcttgagagttcttttaggaggtttaatggacttttagtatataatagataaatataattatattattttgacttaccatagttttagaatgcggggaataattttttttaacaccactcatagttaagtttattttacttttaccgttgttgatctaatttaattattgtgaatacgttgataaaaatatatatgattattttttcatattttttatatttatctaaatgacacatataaaagtcagaaattataaccaaaatgtgacttttttgaaagttgaaatataatgaatatgatctttaaccatatatttagtcataaattatctaacgatataaacagataaaaaatatcaatttagatttgtggtttctaaccaacattgcataaaaataggaataagagagggaacagagaaagagaaaaagagggaccgcggataacatgccgtacttacgactccatgcgcactaaaatttttaattacatgaaaaaatatgtattattatgagtattgtgcatatctaatgtgatgaaaagatatgttcgagagcgatgaattctagactaccaagagtgatgaattctaccagcatgtagaaagatgcggtgtttttttttctttttcatggagataattacaaataatccacaactttgcacgacaaaggcgcatgcacattattctggtgctcataacaatcatatgcgtatactgatagaatttgcaacaacagtagagctaattaagtcgttttaccggacagggagtcagcaatgccattggcaacgcaatacgccacggactgtacggtgatcatggggttgatgcccactgcggtgggcagcacgctgtcattgcacacatacagctgctccgcctcccagctctcgccatgggcgtcgatggtgccgttgcccaccgtggtgcccatccggcagcaacccatgtggtgcatcgagcagaagaggccccacgtctcttttagagattgatctaatggttaaaaatattaggtccaccggattaaatgaaattcaatagtttttgcctttttctaagagattttaagaatttctctaatttatcagagtgccacgtggtggcttaggagcatttatagggtatacgtggcagcttagaagcgtttgtagaaagtttcatggacttttaatgtataatattatgtaccaaaacatggtcaatatggatca

SEQ ID NO: 21128 - DNA, 627 bp, Oryza sativa
tcttgtcggtgaagtagttgatgaggttgtcggcgaggatgccgacggtgatcatgagctggaagctgatgttcagcatgccccgcatcctcgccggcgccatctctgacaggtacagtggcacagcctgcacatagccatggttgtcacgtcacattcgaacgaaattaactccgaggagtgtgcagtgtactactgtaatttgcatgaagcgtgcatgcaagttatccgtaagatccggtcatgcagatcgtttaacgctcaatccggatttagtttcatgccattttcaaatgaattcttttaacaattttcgcgcacgcatgcatcgttatccaaaacttgaattgcgtgcatgatatgcctttttttttagaccaaatgcagaattggagagattgggtacgacgtggatgacctggttgctgaagccgacgccgatgccgaggaggatgcggccgatgatgagcatggcgacgtcggcggcggctccgttgaggatggcgccgacgaggaagatgacgccgccgccgagcatggtgatcctgcggccgaacttgcgggtgatgacggaagcgaagagcgaggcgatgagcgcggcgaggtagagcgacgaggtgaaggggc

SEQ ID NO: 21129 - DNA, 3253 bp, Oryza sativa
tggcacggcacgttggcacgccacatatgcaaaagtggcaaatacttaagaaattacctctctccagtggcaaattattaagcacaaacctaagaggggtatttggataattggcaaacctaaaagtggcaaatagttaaattcccaagtcccttgggcactggcagcatcaacctctgcttattcaacaatagtatctttagtctccttgaactctaccattttgtcaacagcgtagatggcgagctaagagtaaaggtgttcctttgccatgtcgtggccctgatgggaccaatataatctgcaaaaggttccgagctcagttcggacgtcattcgtattctccaatatgccatcctccgggatacgagggagcttgctggcatggccgtacctgcttgcccataggcaagaacatcgacggcagccttcaagcgcacccaccaacgatgatgccagcggccccacgtactaccatactccattcagaatacgccacggtagggacgctttcggcaggaagggctgtagggtatgcccaaggtcgctcgaggcaaagttgtagtacattacttgcctgcacagtgaattcccatgcctaaagttgtatagcttgagcacgggctacctcttccagagcacacaagcagcctccttcttcagccgtgctacttcaccctagctggtacgaagctcgccgtgatcaactttgatctacccttcatgtacatcgtaatacttgcgaaacattactttgtccgccgaagtctctttcagctattcctcatgttaccccattccttctttggaattcataagcccctccttgagaatctgttggtccttattgaaccgatcgacctagttcgtagtcttgcattggcaaagtttgatcttgtcaagttgagtgtgggccatcaggtcatagctattggctcgcataaatattgtaatacaaagaaatatgtaagaactttgaggaataaacaaaaaaagggccaaactaattgaaagggaaagacttacgcaggaagtaaggcttcaaaggaagaagttgatggcgtcatggttgagttatcttcaaataccttctggacggacggtggcgaatcaacctgagtgagcccacccacaaaagctgtaagctcactccagctctcgaattccttcaatgtgaaattgaggtggcaaagaacgccctctgaggcagaaatgtcccacgcaacctgtttgattgtttctccacccgctaggtaggtgggccaaataatggaatgatatccttcctttactaagagggatcctactcctggcactaaacctaccaccttggctcttacgtgtacctttatgagattcaaaacttctcttccttcatagccaaaaggaacaatgatgacggtgtgtggacccaaggaggccttggggttgatggcggccaaaggagttcacatgacaaggttgggcgacggcggcgaagaagattcactatcgctgaaaccagtaggacatttaacataatatactttcagttttgtcaaatccatgtaggaaggttgtacatggtgtaaagactggtaggtctctaaatgggttcattccatccgtgctaaatgcaaaccttacatttttcagatccttagcaaattctggatgtagtgaatcaaacgtcttccattggtgagcatcggtggagtgtcgaatcataccatctatcttacggttcagttgatgccatctcatcaactcagcatcattagggtttcacaacatgctcttcatgcgatctttgctggcaggtaccacatcaccatggccggaatctttttctttgtatgcaccaatgaatctaggtcgacaacctcagtatcagaggacctgttacctgttgtcggtatttattacgaccacagaattatctgcaagcgcatagataccgttgtagccttcacccaacagtattccagggtatcgtattcacagggaacatatatgtataatctaagaacatgattcatccaaggacaaaaactaaatggtaggctgggaatagagagtgttcctacggattaattttcttaattacgttatggtaaaactctatcaattgcttcaggcgccggcttacccctagtcttccaaggagactccgaatgtgaacgattacaaaggacgaatatggctgtcaccacctgccgcctacctctacgcgtcatggtgctcatggtatcagcggtgatggcagggcacacgggatgatggagggagctggctgcctaccttggcttggttgtgccatgcatgcaagtggctatctggcccagatgggagggtgtcaggagtggtagaaggaatggttcgattgggaattttagcccatgaaaaatacgatgtcttttaggaatttgaagatgataacttttcgaaggttgaatttatggactattttgagtttcgaggctgagtgtaaatgaagttttataggaatttttgccgggatgaatagcattgggtttgatggaaacaaatttcaaaggaatgaatttggaattttgatttggagcttattcgaaggtaaagcaaaagggacttaaaggagtaggctaaggatttggttgaggagtttcatgggtataagaatttgaaatttgtgtggagcaggatataaaataattagtttctaggaattaaacaggaaagagatgtgcttacagaataaggttttaatcaaagataaattgagatgtttataaagttagaaatgaatttaaatggatgaatttgaattggaaataaaactataggaaatttataaaaagagccaaaataaaactttcttcttgcctacaattttcccaaaaaccccataacaaattccctatatcccctctacagtggcaattcgccgctatcagcaccctaaccctagtagttgttgcagcagtagcagagttgcaattgtcatcgccatcccgtggactagtgaatgcaggatcaacgcattagggaccagcggccactggatccgccggcccatgttctcgtggctacctacggatacatgcacccaggactagcagccagcattgatccactgctccaaggacttgccgtcactagatccactcttcatgggcacgtcgcgtctatcgacacgtgtggttccatccctgagctacgttggaccaagctgttgtcctcgcctccaacgttgtcatcgcgtagccccatcggatctagactgagctgtcat

SEQ ID NO: 21130 - DNA, 4577 bp, Oryza sativa
catctaaaataagcgtatatgaagctttttccatcattttgactcctcatatggatatagatttaaaactaccacggtagcacctataacccattataagtgccttttcttaaaaaaaatggcaccaataatgtagccgagccgacggccacgcagggtagccgagtggagcacaagatgggaaagaaaaattctcgctcttatcccctcgcatgtcgagccaagctgtactcctctccctaatcctcttgcaccttctactcttcatccatcttctcctttgcctctcccactcccttgcacggctggccgacgctaatccctcccccctgcgtggtcccgtggtggtcaacgcctctccttctcccctgcgcgcatggcggctagcacctttccctctcgcctgggcggcaagcaggtgcctctccctctcccctagacatcgtcgccggtcggcaggaggtcaaattgttcgtggcaaggaggtccgacgacgcactacaagataattgagctattgccaccaaattatacaacaaaaaatatttcgtagcaatatattgtactattgcaatgataatttttctgtgacaaataattatattttattgcaatgattgtaacgatctacaatcgttgttttatttaaaatacatgttctatagccacaattttaattttttggcaatttacataatacatggtactttcactattttttgttgccacgatcaacaaattcgttgcaataaaaaaattgtcgtctcataatttagcttaattttttcatatggatacggattgagacaaattttatatgaaaattgtagctctcgacaagatctataattttatagttgataactttttcatttgaaatcttttagatattcaaatctatgattcaaatatcagttaggtaggctcaaatggaacgatatgcacattccaacagaattgatgcataggtgagttggtaaaggagatcatgcgtgaagggtaggtcttgggttcgaatctgagccaagacatggtataaagaaataaatataaatagataggatgatagattaatatttgaactttcaatttggtacgtagaactaatgccacatatggagtggtggcaataatttttattacaacgatgtaaagtgttgcagaatgattttttgccacatccattccgtggcaacatctaaatttattaccactaaataaaaatcgttgcaataacctattaccacgctatttattaccacggctagcaacaatttaaaattgttgcaacatgtatttattgccacaattttagtattgatgccatgattttttttgtggcaacaaatgatttttctagtagtgacgaggaggtctggcaaggtgttcatctccacccttcctttcctctcctctcctgcgaggtgtaggaggaggcacgccggggcaggggctagattcgccagtccccgagctcgggactgccacggaagcaaggaggatgatgaggacagcgtgatgggtccattggcaagggttttcttgaatttgcgttgggttttcttgatttttggggaaagggaaatatggatatgggttcctgtttgggtccaaacgttgtttgcaacatgatgaacgttcttgatttgtttaatttttgagtgaaatgtgaaattgttgatttttttttcttctatggcttctccatgtatgactttgatgtggatcttaggaggtgcattgactcaattcatcaagacaaatcctttttttttctcgtcgtaggtgtcataggagccggttcctaaactggcactaaaaatgtggcttattagcgccgcctgaggagtgcaggatgggaaatctgatagttatggccgattcctaacgggcatcaatcactttttctgtactagtggagggaggaggtaaaaaacaggaccggcactcctaagacagatccgcttcgtattttaagtctcttcacaatttacacaatcagtcctcattagacctcacacgtagaaaatcgatttttacaggcgagatctgaataagatcgcctgaaatatattaggtaggtttgcacgtgatctttaaatgaaactcctaattggcgtagacgcactagctaaataactggcacatgtttcggtttcggcccattattagtaaggcccaattacactttttgactttcagtttttctgtccgacagtgccgggcacttgcacgtgctaataggaatcaacgagaagtgaggcaaaccgtttaatttgaaactgtttctccacgattagcaattattattagttctaatttttgttttttcaattaggtgacgtgattaacgaaaactttcaacccattttttgaatcttttaactcgaatttgaaaatttcaactcaaattattgaaacttttgacctaaaatttaaaactatcagctcaaattttcgaaaactttcagctgaaaattcaaaacttttatatgaaattttaaaactttcaactccaaaattcaaaaaattccaattacaaaattcaaaactttcaagtccaaaattcaaaactttcaattgcaaaattcaaaagtttcaactcggaatttaaaatttaaatcctcatgttaagtatttattagcactaatcacattattagtgtcagcacaaggaaggcatcgtacgcgggttaattgcatgttttttccattcgctaactaaaataggaacttgcagaaaggataatacgaaaccaccgattcttatgtgcacgcatattaggaggccccctctttaaatcccatgtataaaaaaagtcgatttttacaagaaaaccgttattatatttttacgaacgggttttctagtagtgcgtcgtactttcccatcacattgatcgtaatatcaagattggtactaataaacgtggttggcttattcagtactccgatttctgaactgacgtcatgagaaaaatccaagatattttgcacggacaggtcgtcggcctcttcaagtcttcatggtttgaaacaagaaacggcgaacattttctttaatactgctctctaggacctggactttatgggcttttgatgcaaaataaataaataaataaataaataaagcccatcagtactgtggagcagtgcaggtgcaggcgtccagccatctttcacagtttggagttctaacgacaaaaataaaacacaccttgaaattgaactgatctttctgccgttctttgatggaaaagggaaggaaatcttggccgcatttttgaaacctcttaacttgaacgtttggactttaaagtcggtcacagcatgcagatttaatctcggtgtacatgtcgacgtcgaaattaaacttaactagaaaatcagcgtgcttgttagcacgctggctagttcatagcccgtacatgaagtttcatcttgaatataaaaaatatataattattaaatgagttggagtatttcaattgctataaactccaaataccccttcgaactttggaaggaagtccgtctcccgccctaaactttaaaactggacatccaacccccttaaagtttgtcatacatccatattacccctaaaatggttttgcatattttggaaggagaattattttatttctttttgtcataggttgagagaaatctatataattatatatgctggtcaataattttgttagtttgacgttggattgatatgctacttttctttaccgtgaaaaaataggggagaaaaggaaaaaaaaagtatatttgcaacctgcaatttttgcatataattatctagaatgcgtggtatttgtcaaaaatacatattttagaatatggttattctctcatttaatttttggtctttatattctagaaatatatcaattcgtttagggtagttacctcaatttcctatttggcccttatataatttataaaaaatatttcattaaaatgtttttacttctttattatttttaatattttccttattttttttccttgttcatgcggcgattgtcgatgaggtgggttagcgacatgcttgcaccgtcacgcccaagagcgggcatacgtgaacattgtgaggggcatcgagtgggctggctatggtgcgtgactgggctaggcccaactaagtgctcggagctccttatccttttctcttttttttttttcatttccgctcgtgtaacgttcgatagattggtctagaggcttccgttttttcccctcaagaaccacccccgcattcaccaattcacatgctattcattaagccacgtggaccattcaaattttggcacaacggtcagctttagcttagtagatactcacgcaggggagtatctctgaatcatgacgcgccacgtggcgtttgtctccggccgggaacgtgcatggaattcgtatatagagattagtactacgaagcagctgtgttggacatcatgcaaaatctcctggattgagttcaactgaaacagtgcagaaaaataactgtaatttctgtagtaacttagcccagctttaattagtcaaataattctatacgctcg

SEQ ID NO: 21131 - DNA, 6581 bp, Oryza sativa
catgggcaagccttgtattgacgcgtgcctgaaattttctataccgcgttgcgttgactgaatatccattgcagattcatcatgtactaatgctagttctcgagcttttgctgaggttttcccgccattttccaccgaacagacgatggtaagttaagtttgaatcgtggacagcttccacatatacgtgttatttgacataattttttttgtaataagcaaatatcctggagatttctcatttctcatggcatctagaactaaattagctcatgtaatcaatgaagaaaggactacgaacttgcatgtatttttcgcatcagtttctactgaaattagatcgagctcaaatctcatctagggggaaagagaaaaaggaacccggacacaagttcagctgtttagtgcggatggttttgacaaaatttcattcaaattaattaatggtcaaaacttgtcgcggttatgttcaagcaaacgacatcctggacatttcgcattccatccacagaatactctgaataaacaaaataactaaatctgaattctaaattattaatgcagggttaggttattgcagctaattttctctcccgtttctgttgtagttagatcaaactcaaatcttggaaattttgcatgctaacaaataccagctgtttccatgttgtcgtcttgttgctgcgtctgaataatctgaaatgtcaatatattcagctcgcaaataattaatccagtgtcgcctgatgttttccttcccttttccatgaataaacgatacaaagatttgttcaacttcaaggtgctgtcatagtctgaaactctgaacgagaattggattgggctgcatggattattggtattgatgggtcgttgacagagcaattgggcttttttgctgtcaccgaagagcccataggtccagtacctttccattctttttttttttttgcggggacctttccattcttctttattttatttctttttggcagatcagtctgacagggtctagaattttttttttttggtccatcaactttttgtgtgtttttacacccttttcctgtcgataattcaagaacaggaacagcgatcgcaattgttttagtttatgttttctttatgcttttaaaaatagaaatactacagaacattatcccttttgaaccggatgactaaataaccatccagttgaacatcttatccataccagtacactacatatgttggtcttatcgtatccctgtgattctcctttccctccactctctctctatctccctccctccctctctccctcccttctcccctcatctctctcacccctctctcaccctcatggctcaccagcggtgagcaccatacagccatccgtctgtgtagtcaacgatgatcagttatgtgctgtcgtggaagaccgactccacttgaggtggaggcattgcgggggcgattcttgaggtttctttgaggtggtggcgaatcggatcgacatgttttttgttggtttttttctgtgtgttttttaagcattttaagaggtgatttctcatgttagtttttctcattattttttgagttagctagccatattgaagaaatttgtgtgcctcctgtggggcgttgccgctgccgctgccacccctcccgccggaattggtggagggaagtgtgccgcccaccgctgccatctctcctcccaccgccgccgcccattgccgtcgacatctcccgccgcctccctcccgctgccacctcccgctgccttcctcccaccgccacctcgagagagatggtgtggtggagaaggagagagagaggagaggcacttgtgtggtggagggggagcagcagcagccgccgccacgcccgggagggagagcagccgccgaggagaaggaggcgagaggggagacggagaaccgatttttttatttataataattactcatccctaaattaaacaaatagtaattatggaccgatatttaccaatatgggaaggacgctaaggtgtgcagcgtccagctgtggacgctgttgtgaatcacgtccactttgggacgctgttgagaatagcgtccacaccatgatccctgatccaaccgtccagcgccatgtcaccgcttgggtcatctttaacccaaagttaattaggtgtcaccgcttgcactccactggcccggtcctgctctaactacggatgctctgacgaattattcactcgccgccgattaaggtttttactgcttatgtattatatattccactatatcttgtcatcgaccaatttatcgatgtgattcagtcattggctctagctagatttttactaacatggtacaaaagagcaatactcgactaatcatgtcctaatagattgtctcctgcatacttgtgtggtgttataaattagtattgagcacattttttttatagcatgtctcactcttgagcggaacaatgcatcaaccaagcaagcatctgaacatggcatgacctgatttctttttgtatgtaaaagaaacatgcatccatgagctgcaaaagttctgttaacaaaaaattgtcaacagagcagctgattctgttagcctctagtttcatgggaacttctatctgcaatttttgcagtagcgtgaatgcatttgctgaaacctcttcctggttacatccaatcatcaaataaatcattgccatagtcttttggggaattcgttgtgtaactttgtaagcaacgattgaacacaaaaagtgtactgagacttgcgtgcgggtgcgccacccacatgaatcaattttgctttgcttcaatttgctgcatatatgaatctgtacaagcctggctgcctggatcgaggccatggcggcagcagccttgtggcttgaggaggcggcctctatcggcgctctgcttgaagtaaacttccccggccaagtaacacggcgctgccggcgttcgagggcagtcgagagaagtctgggctctcgatttgggccgcagctggtgcctgatggacgctggacgtcgtttccggtagcgtccacggttggccgctatttgtgagagcgtccatacctggacgctgttagagatagcgtccttcctattttgtttaatagaagtaaacatttactaattatttaatttgatgattaatatttattataaataaaaaattggggacggagaaaagtaggcgaagagacgggacgtgagacagagagagagatgggtgggcagggggccgggatggataagaacgtgcggctcgggtcggttttacagggtatcggttttttagaaaaccggcacctataagatattataggtatctttttttttaaaataccatcacctattcctgttaccacaaaaatactagttcctaggtaggccccgcgccaactaaaaggtaccgaattttcaataaaaaccaccatctttctctgacaccagtataggtgcatgttctttttaaaaaccaacacctttttgatgataaaggtgccggttctttggattttggcgggcagatgggctcgtgggtggggaaaggcgctataggtaccgattttacctactctggcacctatagtgctgacagcgaattgatgttttgcagtagtgagatgttgtgtgtatatgggaggtaggatcaggtattattggtgtattatatatttatagataactattactccctccgttacagaatatatatagttttagagttggaaacggttattaagaaagtaggtagaattaaataagaaggggttgtgattggttgagaagtagagataggtaggaaaagtgaatggtggagggttgtgattgattgtaaagagaatgttggtggagaagctgttatattttagaacaaatcctaagtgctaaaagttattatattttaggatggagggagtatatgaattggctacaatattggttataaatgattttgagctagtaattgactatacataattaaacttgctatgatgaacccaaaacaaggttcattgttttgatacacccaatatacaactgatcactgaccaatcagtaataaaccaatgaacaaatcgaatacatcttatttaatggctaatgaaccacatgaagaaattaaacaaccctacatatctaggttcgctgctgctcccaaacatgtatttacagaaagatacacgacaacacacagagacttcctctctcaatatgactatttgtatatacggtgcttgtatgagtatatgcaatctgttgattgttcttcatcgatcatcaagcactgccaaatcagttaagatcagcccttgagtgacggatacctcttattcgtgcccttgcctgagaagaagaaacatatattaacaacaaattaattaattactggagaagtcaaaccaatatcgatttcacatgctctatctagatatagcttagctaggagagagaaaattcattttccccgaaaaaaaaaaggagagagaaaattcattagattgatagtttttgctcactttggctgcttgtcgtagtagccagcacctcccagctgctggccttggccgctgcttatgctgttatagtagtaggagtactggtctgcagtcttggacttgtaatctgaatattgctgcgcaggcactcttcctgtggtgcttttcgatgatcctgcagacgcagatggccgcacaaaattagtggtgtgcaaaaggagagcgtgaaaacacatgagaacactacgccagatcctcacacctctgacgggatacctgtgacgggcaaacgaattggtcagtagtgaccgttacctttgacgggttatacgggatgccgtcaccggtgaggcacctggccgcggcccgtcacaggtatcccctcacctgtgacgggccgaaaggaaaacccgtcagaggtataccagtgacgagtttttcttccaacccgtcactggtatcccctcacctgtgacgggccgatacattagaagccgtcagaggtgatgggccgccacctgtgacggctttcatttctggcccgtcacaggtgagaggataccagtgacgggccgttgaatagaagcccgtcaaaggtatgagcaatacctttgacgggctttttttatctaacccgtttgaggtgtgttgggtctataaatacccccaaactgccaactgctttccatcccgaccattgtactgttcacaaatcggttgggagggcaaggggggcgattttttgctaaaattcaaggtaaaaaacacattattctccattcattctcaacatatcgatcatcatttatttttcttcgtatgttgttgatttcagatggatcgtagatggatgtactatgcgcatcgttcgtctaccgagtatagggagggggtcactgaatttgtcacatttgcggataatgacagaaaaagtaggatgagcatgcacatgttgtgcccatgtagggactgtaagaatgaacagatgatcgaagacaaggatgaagtgcatgctcatttgataatgaatggatttatgaagaaatatacctgctggaccaagcatggagagcaagaggcgcctgatgtcgcagctgaagaagtgttggatcaggatgtagagaacaccgccgcagctcgagaaggcatgttcgtaccttctcctttaggtggagagaccatagatttggacactcaatgtctatctacaatgttgcatgacattgaagacgcagaggacaacgacagagattatgagaagtttagtaagttggtggaagattgccagatgtcgttgtatgatggatgcaagtcgaagcacagcaagttgtcatgcgtgttggaactcatgaagcttaaggctagtaatggctggtcggacaagagttttacagaactccttgagctgttaaaggatctgttgccagaggggaacaatttacctcagacgacatatgaagcgaagcaagtattatgtccgttgggcctggaggtcagaagaattcatgcatgtccgaacgactgcattttgtattacaaggaatacgctgacttggatgtctgccctatctgtggggcatcaagatacaaacgagcaaagagtgaaggtgaaggaagtaagtcaaagaggggaggcccagcaaaggtggtgtggtatctcccaattgcggagcgcatgaagagaatgtttgcgaacaaggaacaagctaagcttgtgcgctggcatgccgaagaacggaaagtcgatactatgctgaggcacccagcagattcagtacagtggaggacaatcgataggatttaccaggaattctcaaatgacccaagaaacatgcgttttgcaatgtgtacggacggcattaatccttttggtgatttgagcagtcgtcacagtacatggccagttctgcttgttaactataaccttcctccctggttgtgtttcaaaagaaagtacattatgcttgccatgctcattcaaggaccgagacaacctggtaacgatatcgatgtgttccttgaaccgataatcgatgacttcgaaaggctatggaatgagggcacacgaa

SEQ ID NO: 21132 - DNA, 4600 bp, Oryza sativa
attcctgcagccctacatgggtcacaggagatttctcccaaggtatcacccgtataggaatatgagaaagaatttcaatggacacagagatacagccggacccccgacagagctaacagggacagaggtgcacaacttagtgatgggaataaccaacgaacatataaccatttggacatataaccattcatggagtgtgtactgctatatatgttgctagacctattgaattttgtggacttgcatttatactcctcctgctgctgttttatgtcaatcatgcaaattctgtacccttgctgctgctgttttttaaattttcatgattgattcagtggttatatacctctacacttgttctttttttatgcataagaacagattttgtgcactctctctttttttatgcataagaacagattttctgcacttgttcatttttttatctacaataatatatgcatgatttatataccactgctgttgttgcccctgtacttcttgttaaatggccaaggatgaattgcttaataacattctatctatacctgttcttttctttatggataagaacagattatctacacttgttgatttatatacccttgctgtctatgtgaatttccctctgctgttgctgtttatgtgaatttccaccctgctgttgctgtttatgtgaatttccaccctgctgttgctgtttatgtgaatctccccttgctgttgctgcccctgtggcatatatacccctactgctgttatatggccctgctactgctcttattgctgctattatatggccatgctgttgctactactctaatttcctgcacttgctcttttccttatggataagaacagatgaactacacttgttctattttattgataagaacagatgaactacacttgttctattttctttgggttgcttttttctcctagtagctgatttcctctttttatcccttcatgcaaatgattataattgatgcatatttctcagcaaaactgaggccatatctttcatagtataccccgtattacattggatctaatgctatttagtctaatggtaggaaatttataatctttttcgcgaaagttaaaccatgtcaacgcccggcgcaaacccgccctccccaacacctgcgaggatccaggaagaagcaaacccagccacagaggcagttgccgaaggtcatcccgcgacaacggcggtccaacaacccgaaattcatggtaatttataggataaattttcaccacatgaccacataaattttagctagcaccccttagcaaatattgccttctgtttgtgctgcagaattgccgcaggaacaacatacgtcgatgtcgggcgagacaagtgcaagtaggtctagtagaaatccgcggtcacaaaatatatggccgaccacagtgcaagttataagagaggttgacgctagtggtaggcccacggcgcccaggactgtcattggaagatggtctaactgctgcgggatagcggcacgtgagaacttcgggatcctccataaagatatcgggaaggtcacagaagccgagaaagagcgagcttggacggcaatggagaaatggttcacatttccagccgaagcaaaggataggctcaagcggaaggcattccaaaagatgggcaaagcttggaagaattggaagtcgaagctcttcaccgagtatgtcaacccgcccggcaatcatacgccgttcgatgaataccctcaaataaccgaagcggtgtgggaggaattctgctctctcaagaccacccaagagtttagggaatccagcgaggcacatcgcgtactgcaacagcggaatgagcacccgcatcggctgggcaccgcagggtacatcggcaaggaggcaatatgggcccaagaagatgcagccgctgcagcagcgaatgtccctgccccgttttcagacatccctgaacaaagagctcgcaactgggcgcgggcaaggggtaaggtcaacccggacggctctgtcacatttgagaacaaaagtgatgccgtcgtctatcaggaactggtgagttcactacttaacctaactaatttccgtccgtataaagtacaagttcgtataaacgactatcttcttttctagttgggcttggttgctgaacaagcttcacaaagcgaggttgagtccgcgccgaagaggcgcgaagatgacatcctcacaaaggcgctcggaaccaaagaacatcctggccgaactcggggaattggtagcgatgtgccctggaagcatggactccctcagtacagctcccaatacaggaaacggaaagtctccaaggaagagagggacgctcgtttgaaggccgaacttaaggttgaggtcattcaagaactagaagctagcatgaatgcaagggtggaagaaagggttaacaaggtgctcgccgacatgaatataccccgagtcacaacacctgctgtgcaaccaactcctcgtgtacaacacgacgcgagtccgtcacagcataggagtagttgtgcatccacagaggtgccggcccctggtctcccgatcgcaccactagctgcagtggaccacatcgaggtaattgttgttatccgatccatatctaataaaagacatttacacattccaatattaaattcaaactttcaccttatgcagggcgcagcacagtgtgtcctactagcgagagtccacccaactttcgctcctgaagtcgctgagggcatggctttcaagccctcggttacagacaaggtccacggcgcagacctgctagctgggtatgccaaggtgtccatcgatacagtaaaggacacgtggtcaggctatccgctgcccgtgcccccaaatgatgaaatcatgactttgggcgatgcgcgcaagacgttcatacaatggcctaaagaagacatagttgtgaagatgactcctcgtccaagtcgaccgacggagcttacacctcccaagtctaagctatcaattgaggctccccgtggaccggcattgtcagtacctcattctcccggtggagctgatatggacttggcagatatagctcaaagcttggctccaataaagaccacaagaaaggccgatagctccccaccacttgtcaagggccagaagcgtgaacgaggcaaggggaaggtcggggagttggcgccggagccaaaaaggggcaaggctgcgacgtcgatgccggtgagcaaatcggggaaggtcgtgagggcgccagcccaatttgagctaggcatgccattggtggaggacaatgtgttagctgtgatgggtattgcttgccgagagctacataagcaatacatggagctaagcaatgccaagcggaaaatgagggagtcatccatagttggacatcacgaccaccagccgttcctatcgtcgcctgcctatataactataggctttgatgacctcttcgaccttttcaggatccggaagttggacactggtcttctaaaatgctactccttgtaagtgcataccttctatacttgtgatatgactggactatatctcctaattaaattagttctaatacgtaaatattttaaggttgtgttggatcgagagtcgtcgccatggtaatcaggttgggttccttgatccatccatggtgaatgaggttaatttacaacagagctccactgaggtggttgactatgtcaaccggtgtttatgggcccatcaagacaaggagtacatcatgtgcgcacacaaccaagagtaagaggacaatacccttcgtgtatattgtttttgaagttaaggttcttagtactaacgctacataaccactgcgcaggcgacattggattctcctagtcatcgtacctaagtggagtagggttacctaccttaactccaataagtccaaagattatgatttcagtgaaatcaccaaggccttaaatatggcttggggcccatatgtggaaaagggtggtaggcacaaggagggcaagaacgaactttatcatgacaccaagtttgcatgcgcacaacagatcggagaccaatgtggtttccacgtgtgccacaacatgtcaacacttctaagagaggtgaaagatttcgaccctgaggttgttgctaatggcgaataagctcatttcaatatctaccatggtattccaaacggtgttatttaccttttatttaattaaccaaaaagtaaaactggcttccagattttacccattcaccccccggtattaaaggcgaaatgtgcgcctttaattttgcaaaataattaaccagaaaggacgttttcatgcccaatagactcatgaacttggctagataatttattgtgatgtaaaaaaaaatgttttaataatttctgccgatgtaaaaaattatgtttttatagagtgcaatgtaatttactttcatatgtgcaatatttatggtactttactaaattgtcatcacatttgatcaactacgatttatgttgtacgtctcatctgttttctcctttttttttttccttattgacaggttgtgcaggtcgatgacatcatggctttaatccatttggtaagtatatatg

SEQ ID NO: 21133 - DNA, 646 bp, Oryza sativa
tcttcctcctctctccccaactcccatgtattcatctctctcccatctcctttgtcctctctccaagcgtgagtgaggaggggtggtgcacagcgactgccatctaaaatgagaccaccggttttaacagttgagggacccgttgtatctggttttccggttaaaggacgaaaatcggattcgttgataagttaagagacctcagataaacttattccttaattagtcacatagctccgctggcccataaaggaaaaggcccaaggctcattcaaagctcctacccaacccaagtcacctcgcctttcccctctcaaaaaagggaaaaaggtcgcctcgcctcacatccacccgcgacttcctcctcgcccaccaccgccaccagccctccctccccctcatcgccgcctgcgactacgccgatattatgtacctcatcgacgtcctcaccctcaccctcggccgccgcaggggcgccgccgcgcggctccatccggtcgcccggtacgccagcaccgccgactacctggattcgtcctgcgatggactccttctcatctcccggaacaccggccccccgcaatactccatctgtaacccgaccacgcgccaattcggtgacctcccgctgatctccggattcatg

SEQ ID NO: 21134 - DNA, 717 bp, Oryza sativa
tgcgcttgcacaaaaggtgtatagcattttttatgataaagagaaacactttgattttatggcatggctccatgtttcaaataaattcgacgttgaacgcctaataaaagagttggtacagtcagttcacctttgtacagctgctgagttgagcagcatcagtagtttagatcaagctcagaggatacttaaggacaaactgaaaggtagcaggattttggtagtatttgatgatgtatggaatgaaatgagcagccagtgggagaatctgtgcaagcctctgcagtctaccagtaaaggcagcaaactaatagtaactactcgaagtcaaaatgttgcaaacattaacggggcaaccgagatagtgcatttagatggcctagaagatgaagactactgggaacactttttacagtgtgcctttcatgatgcaaatccatcccaatttccacaattggaaagtattggtcaagaattggtaaagaagttggctggttcacctttagcagctcagacagtagggaacttattaaagtttaaactagatgaaaaacactgggagacagtcaatggaagaaaattgtggcagatagaacagaaggaagatggtattatgccagcactgaggttgagctatgtgcgtcttcctgatcatttgaagcagtgcattatttattttgccttattccctaagaattaccaacttcgaggtgatgc

SEQ ID NO: 21135 - DNA, 1243 bp, Oryza sativa
caaccccaagaacatgaatccggagatcagcgggaggtcaccgaattggcgcgtggtcgggttacagatggagtattgcggggggccggtgttccgggagatgagaaggagtccatcgcaggacgaatccaggtagtcggcggtgctggcgtaccgggcgaccggatggagccgcgcggcggcgcccctgcggcggccgagggtgagggtgaggacgtcgatgaggtacataatatcggcgtagtcgcaggcggcgatgagggggagggagggctggtggcggtggtgggcgaggaggaagtcgcgggtggatgtgaggcggcgccatgcgcggcagaccaagcggcagcggaggaggggcttggggggtaggcgtaccaggatctcccagaccacgagctcctccgggagcgggaggccggggctcaccggcggcagccctcgcgttgccgcctccgccatggtcgccgtcgcggcagcggcggtggagccgtggaaggaggtgaggcgaggcgacctttttcccttttttgagaggggaaaggcgaggtgacttgggttgggtaggagctttgaatgagccttgggccttttcctttatgggccagcggagctatgtgactaattaaggaataagtttatctgaggtctcttaacttatcaacgaatccgattttcgtcctttaaccggaaaaccagatacaacgggtccctcaactgttaaaaccggtggtctcattttagatggcagtcgctgtgcaccacccctcctcactcacgcttggagagaggacaaaggagatgggagagagatgaatacatgggagttggggagagaggaggaagaagaggggtgagaatgacatgtcggatttgttgacagttaagggacctcatatgaacttattccactaattaaatggtgattttcgtgttgagggctagtttagcacagttctagctccatgtcaaatagtttcaactccaccaaaaatagaagcggagttgggtagagttctctcacaaaataaactagatgaatggagctgggtttaggctgctacacaactccacttcagacccaactcctgtagctaaattcaatgtaaggaaagtatctttcatgccatatataatatactctctctgtcccaaaatataataatttagtgcatgtttggtagagctacaactcctaaatttagcttcaaaagttgggtatggagtggagttgttaaactgc

SEQ ID NO: 21136 - DNA, 3308 bp, Oryza sativa
cgtggcagtttaagaaagcaaataaaaagaacatggacagttgatcggaagaggcaaagcaagaactggagaagtggaaaagtaaaccatgtcaatgaagaatttatagtggggcgagctaggtcaatggtttccgaagatgaggtgcttggatctcggaaatgctgttctgcgatcgatcgctctggggatggggcagcgatcgatcccctcccttcacctggttttcttttttggtaccgcattacttttctattttagtaaatttttacacctaaagtttatacatctcaagtttacacatctaaagtttagagaccaaaagtttataagtcaaaagtttatatatccgatttaaatttgaatttgaattcaaatatttttttatatatagtatttctgtaaatctaaagtttatacacctaaagtttatagatctaaagtttataagtcaaaagtttatatacccgtttcaaatttgaatttgaattatatctgattcaaatttgaatttgaatttaaatattttctatatatagtatttctatacatctaaagtttatacacctaaagtttatagattcaaagtttataagtcaaaagtttacatacccgattcaaatttgaatttgaattacatctgattcaaatttgaatttgaattcaaatattttctatatatagtatttctatacatctaaagtttatacacctaaagtttataaacccaaagtttataagtcaaaagtttacatacccgattcaaattttaatttgaattcaaattttttatatatagtatatctatacataaatttttctaacttttgtttttttaaaaattttgtgtggtgtactgtagtagaaagagaagaaggggaggaggaaggaggagaagagggaggagtatagggggttgcgatcgatcacccattagcctccccccttgatcggaagacacagaaacgcaccgattttgctaaacgtttgtcgcgtgatttctcatcgaaaatttgacgtttttctggccgtcggatggtgcgctagattggtggtggatttcgcgtggggagccacgtgggccgatctggtccgagctcgtgtcgtcctagccgttttctcgctctctcgcctgcgctttcttttctcgttctctctctccctttcttttctcgttcgctccggagagagtgagagctctcgcaaaataaatctccttcccggtgagttggtttctcgattttctccgtaaaaatcgatttctttaaccattgaaaaataagacaattgaaactaaaattatacatgtaaatttagttgatatgacatgtaagtgcactgtaattttgataaaaatattgtgtaagtaaatttgtattagttattttatttcaaatataaaattacaatcctatataactaaaattacatatgtaaatttagttgatatgacatgtaaatgcactgtaattttgataaaaatgttgtgtaaataaatttgtattagttattttattttgtagtccgttagatacaaatccaagggaagaaaaaatctagacccgagtgatggataggcggtcccgaaacgcacatgcactggacatactagacaggtaagcacggcgtaacgccgcgcggtagctgtcgtgcaccgtttttctttttatacggtggctcaatatctgttaaatattacacatggtcgcatacgcggcaacttgagcaggattatgtgcgctacgactacaatttcatatttttgtgttggagaaggcacttagactgaatgctagaatgtgtgtgtatccagtgctatttttagaagaacccctgcgtctatatacgaaaccttcttacgcaatacataaagaaaattaaaccaataatattattgcccaaggaacgtcacacacaagtgtaaataataccgagcaaatatatatcaaagttgatatctgcacttagcatttgaacacggggacaaaaaatagtaatatcccgatattcaagaaaagagtaattcatccaacatccaaaactaagtatattaatagacaaaacataaatgacagagaaacatctgtaggctatttcttgtgcagtagctccacacatcaagacagaaaggattaacatgtgtaaatcaaatagcaaaattcgcttaactcgcaaagttctctactaaatgccaaatatatatatatcctaaacatttgtataaaatgacatacaacaattgagcaaaaagtatcagtgtgaagttaaggtttagtgctcaactatgacgctagcacactattttgtccttctgcagagaaaacaatcccaaccatagagataattagatacaattaggaaatttgaaaatactaaagactaactccaaaatccaaatccaataaccccacggcaataacacaaggaaaagcactattttcgcggcaattaccccgcagctcccagggccccaactgctcgttcgagtaataccgttggagacctcgacaccagcgccatctcttcgtgccactcacgcttcacgtccctgctcctcctcgcatgtgacccgactcacgcacctactaccttgttctggcccttgtttagttccaaactttttcttcaaacttctaacttttccatcacatcaaaactttcctacactcacaaacttccaacttttccgtcacatcgttctaatttcaaacaaacttccaattttagtatggagtaaacacacccgtaaaatctttttctatatggttcagaataaatatatatacccatcaacctatgttttcaatacttttagggaccacggatccattgtgagtcaattctatcctaaaatagcccggaattctatcctaaaatacaaaggagtgattgatttaattaggaatagtaaatttaattgcagaaaaaaaaagtaagattaggctgctgttgaaggcttacacttcacaagttgacataacatgcatatacttgcatgtctgtagcgcttaactgcttgtacaaaactacaacctatgattttgtctggaagaacatttataagattgtgttttctaggttttgtttttttcccatgccttgccaaatgagatattcagaaaaccagattacttggtctgaatccatttttccatattaccatttggagaagattaacatactgctgtgctattacttatttggaaattgtgttatatgcatagattgtttaacttagtctacaggagaagttgtattttttgtatatacataggagatcacttttgctactttgagcagctgtcaac

SEQ ID NO: 21137 - DNA, 1397 bp, Oryza sativa
ctcccacacgaaaaacagagtggtccattagcacatgattaattaagtattaagtaatttttttttcaaaaatagattaatttgaatttttaagcactttcatatagaaattttttgcaaaaaatgtaccgtttaacagtttgaaaagcgtacgcgcgaaaaacaagagagtgggctgaaatgaacacagcggcacggccatgcgtccatgcccgacaccgaatgtctcaatgatgttctgcacatcaaccttaacgatatcgatgctgcagggggcaaggtaggcgtgacgctcaccgtagaaggtaggcatgggcagtatggtgtgggtggacggaccccatgtcgagtacgtacgtagaaggaaaccatgatgatgtccgggtggctggttcctcgatcgtcacccctgtgactgcacccggtacgccaacgtcgcctcataccacacctacggtccgtccccttcactgtccgggtcgcacactcacattactccagtatcccgccatcgcatttctcacgtacacctatcgaacacaacaaaacataagacaccaaccaaacaagaaatatgcatggcagcggaaaaaggtatgacaacacacaggaaacaactcaagtagcactgaagaaataaagaaagaatatatattgatgtgaagaatgtatgggaaaacaacgagatggtcggacttaaatagcaaaagaaagagccaataaagtgagagaaaaaataccacatacttaaggagcaaggaggagcataaacattggaaagaagagacacatgacaacacacatgagcagcatgagagcacgcagcacgcgcatgtcggcacgaggcaagcagaagcagctagctagatgtgtgcaacattgtagcttgccatgcatggactgtaagaagataaggagagagaaacaatccttagctcacaagctaaaacaaacgacaagaacataatactgcgtgtactgtaagaaataacgaatcaggaaggggcacgttagatataaccggccgttaccggctaagtaaaacacaacgtaaaataaaatggaaaaaatcaccgacacgtacgtgggcaccatgtgaagaaagttggccaccagtaacatacaccggatacgtcaccccaataggaaatcaaccggtcaccaaatcagtggaaaactgtaaaaaaaaatcagcaggacacgcggcaagcaatggaagagactaaaaaaatttcaaaaaaccaggaaaatcggaacctgatcggtgactactaggtaagtatttcgatgcttcgcctggtgggcctcgaccatggttcattttccagcagcagaccaataaaaacgatctaatcctaccatacaagttcaaatcaacagttcaaaagcaatcaagg

SEQ ID NO: 21138 - DNA, 4413 bp, Oryza sativa
tttcaataaacactgacctttgacagtttgttaatcacatagattaaattaccaccttgatttcacaaccgcccccttgatgaacacattggccatattttgaaaatgcaatttgtgtttttgaaaagaaaaaagaaaaataaaaaagcacaaagactgaaaaataaaaaaaagtaaaaaagaaaaatctccccatatttgcaataaaagcacaaaattgactattttttaaaatcgaaacaattctcccctttcaagaagaattcattttgtatattttcctgcatgtctaatcgtttagtttgatccacataatatgaatcgctctagtttatccggtacccgttgataccaccacactgtaaacactgagtgctacctagaggtcacaatgatgtctttatattatttattatctactccttgcatgagcatgacgagtgttattccacactaaatgtagaatcttaatgccgttaggtttggggggggggggagggggagggtaccaacataacgctgtaggcgaactggtacagttgtcccctttttaatgccaaaatttggtatgattctctagtggattcggttaatgatggaaattgattggtagatgaaactttatccagatcaagctgaattcaaataagaatcgtgaagaccgtgacaaggctgtttcatatttttagtatatatcttaaataggcaagattagttattttcgttttcttgttaggagtcttatctcgtgtccaatcaggacttgtatcaatccaagggtataaatatgtacacccggggtttttgtaaactatctcttgatcaatatacaacttttggtgcatcgccaccttttattccgacgagttgttagtttcgagcggggttgcatcggttaagtttgactccggcaagaggtaagttccatctagttcgcctgtatcagcgtggctagaacttccacggttaggttcgatattctattcaagttaatgcaagtcttgcctatatgatatatcgagtctatcttccacggttaggactttcatggttaggttcgatattctgagtaagttgatatttctctaattaaattgttgttttagatttatcgatatagatctgtcggctaaataggtttttcttattatcttcaatcttatagtgtctcggttaggtttgatctatcatattgctgctaataagtttatttctattaagctaataagtttttatgcgatgtttcatcgaagttttagctgatgagttatcatgttactatttctaagtgttgcatccgctcatattgatgatcatacatattttggttctagccgatgatagcatgaatgtcgacggtggatacccgtagaccagatatagagggtatcggggtacgctggtatgaggatctacgtagtatgacatcaaacaagcagaagaccaagattatactggttcaggccccttgataggtaatagccctaatccagtagatatgggattatatgatggaaaccacagattacaaaggttgcggaactcgatgataccgacgagaccgtaatcgagttggttcgactagatcacccgatgacttggctcctgtgggctccgactttgtaggctgaggtggatgtgttggcggtgagattcgatgccttaggacctcccgggggtcccttagagacatagagttatcgataacattgtacgaagttcaacggtcatgagtgaatttaaattgaagtctgaaaactgctgcgcgtaacggacccagaaatttccggcggccatctctctcctttccttggactacgcaccgtcggtaatgcgcttatttaaaggagttttggggatctattttgaagttcgtttgccgcagaactctccagccttcaagcgcccctcgtcttctccgctcccacagaaaaaaccctagtttgctcatctcagtttgttctccggcgatctctagcggtgttggatcttgataagtctacctccactaccgcgtccttgaagaagctgcaggacgacggcgccctccctggtagcgggaccatggagagggaagcaggaggtattgaacctgaacccctcctgggccgcatggttgcggttgaggattatatttcttgcggttttcttcctccgccctccgaatttcttcttctcgtattgaatttttatggcctttccttgctccatctgaaccccaattccatcgcattcctcagtatcttctcttatctttgtgaggcctacattggggtagagccattccttgatttctttcgtttttactacgagttgcgctggatggaatccaataggatatctggatgcgtcggattctgacttcgggatggcgggcatccccttctagtgcccctcttctcgtagcaaatggcgggcgaggtggttttatcttcagatagaaaactcggatccagtctttgttgtccctgaggagcaaccagacaagattccggaatggaccgccaaacccgccctaactccctcccttcagtctttcatcgatatcatcgatgacctctgagtacgagggttgttggggtatgaagttgctgccgacttcatcggtaggcggatccaactgctccaggctcgagcccacccggcctttgactattctgggccaaaggacgcgtcccgggttctcctcggggtatttttctcgtgtttcagatttcatttcttatgtgcacgttcctcctgacttattgagttctggttctcgatctcacaggtttgaatagcgaaaccgtggagcgccgcgtcggtaaagtgatgatcagcagccctacgatagcgagcaacatccccgtccccctttgccagaagggggtggccgaatgcgaggctgtgatcaacgtgagtatacttgatgactcctttatttctgtcatcctaggatcgcgtcgtgacttcatgtatgcaggctctccctctgacggatgtcatcgggccgcttgcggaccatcaggcggcggcgtcattgaaagagggcgtcgccaaagaggcgtccgacgttgctgctgctgccacgacgagtggcagcaacgttccgaagaaggggaggaagttctcctccgtgcccgggacccactggaaggcgcctaacccatcggtaagcctctcttgtcctttaacacgtagtcggaagatcttgacctcacaccatgcttatcatacttaggcctcggacgcgtctcccccgccttagcgacggcaaaggctggtgacgctcagcaaaaagtaagtagatgattttgaggtcctttaattcgcaaaaccttggccgcctgactttatgaaaatcgtggaaatcattcgcagggcggcgcgggcaaaggcgacgcaagacgggtccggtgcggcctccagcatgtcccctgtggcggcctcgacagatgtcgtggtcgtgactagggactgggaggcgacgctgagtgggcccgtcggcggccttgtgcccgctcggggcccgcccgttgatgccctcacctagggggagctccaagccgagataaagcgcatcctccaggctggtgctcgcgcgtgggccgcgagatcaaggaagccagggcggcggggtcgtcggcaaaccacagcgccgagcagctggcgcgtggtctggcggaggcccgcgaggacctcctgaagatgagggagttggtggctggtaatgaatggcggcgacaagggctcgagcaccggatgtcagagctcgagaacttgtcggagatccgcagctcgctgcgggtgtcttacaccggcctacaccaactcgtcggggagtgcggcgtgacgaccactatcccggcgacccctgacgagttctcgctgacgtcctcgctcgcggacctggctgtggcgatggaggagatcccctccaagcatgcggccagaatcggcgtggagacgtgtaacgggatctacaccggggcgtgccatgtcctcgcatgcgtgaagctggcataccctgacctcgacatcaagagggttctggatcaggaggtctgttctccccctttttgaagagtaggattctgtttcccttgtaccccttaatcaacacactataaaaacttctattggcccggacctcttttatgtatgcagctgttttcctttgttttcttagcatgtgattccgagtaccttgttgtcgttgtagagatgtcgacattgaggatgtccagcagcgcgggcagcctgagacgccggtggtcatcccggcactagcgcttgagccgtacgtgccgcaggatgacgtcgatcagagcctgtccgcggaggcgaacatggcgatgacgtctttaggtttgcaccttgggctttacttccttcactcttttgttcggattgacttaatttgctgggttc

SEQ ID NO: 21139 - DNA, 11849 bp, Oryza sativa
agatcgtcggatccaatactggaggacgaagttcgaggtggccgaactcgagaggaccatggtggaagtgaaaaaagaccaagctgtggaagcactccgaggtcgcgaggtgtagtttaactcgtacctcaggagctgttgtatggcgatggctggagtctgtagggaacgccgagtacctcgcgggaatcccgaggagtcggtggctggatatatctcatggttgaatagggcctgtgctcagcttgaaggcatcggcaagcgtatcaacgaggcgctgaagcaggagtgtcgtcggtcgagccgatatgccagagggcacgtgctggcctgtatctgagatcaccgcccgtagctgcacctcgagttcctccacgaagggttttcacgttctcggaggactcccgcagagatagagaatctggcgaagtcgattgtgccgcttgccgagaatgtctttcagtccatggactggcgtttgccgtcctggtagtctttgtatcctgtaaaaattatctcaaggagacatgtaatatattttggagcaattatgaattgtaagaagtacttgtgaaatagacaaggaatctatctaactaagttttcttactctggatatgctgtgtgtgagtgttttctcatttcgcgacttcgatcaatcgcttgagtcatacactctccctagcccccagccttgttgtcggagaaacgttctcggaggataaggctccttgacccttgacctgcctcggttgaaaaagcattgaccctagcccccagccgtgaagttggaatactcggtttccgattacacgggttggttaatacgcacgacgagagctcttacatgacctgatcttacatggtcgtttgtctctacatgatccgacaaggccttatctgctctgggtgtccccagccgaagttccctgaggttccttagaggccttgtcaagacggcgtaaagggacatgagggtaggtttcaacgctaggtgtcgtcgtggtaagggatcgtcgggaagaaacactttgattgtaatctttacctgaaaatcaactttattgaagctgtaagatgtcttgcaagtatggatgctattgatttatacataaaatttacgtaattgatcaatgttccaggaatttgctaactcacaaccatcgccgtctgcaatcttgaatgcacctggccgcaagacttgcgtgatcgtgtatggtccttcccacttaggtgagagctcgttacgccctgcttggctttgaacccgtcggaggacgtaatcgccgatcgaaagcgtgtgtgctctgatgcgcttctcgtggtattggcgaagggcctgttggtagctggctactctgacggcaactctttctcgatgctcctcgagtagattcacattgtcgctttgctgctcctcttgatcctcgtcagagtacttttgtactagtgttctctcgatgtcagagcatggcttctgaaccatacatgtggaagaagggtgtgtccttgttggatgtcgtcggtgtggtacacacggcccatagcacagaggagagttcttcaacccacttcttgtcatgtgacatgagtctgtcatagacacgggtcttgattccttgtagtattatgccgttagccctttcgacctgtccattactctgagggtaagagaccgaggcaaagcagatcttgactcccagcccaatgcaataatcctggaagtcggcactgatgaactgggagatgttgtctgttatgatgcggtgaggcaatccatatctgcagaatatccctttaatgaatttgatggcgttgtcggccttgatttcccccgtgggcgtcgcttcgatccacttggtgaacttgtcgatcgccacgaataggaacctatatccgccctgtcctcgtgggaatggtccgagtatgtcgagcccccagcatgagaacggccaagtaagagggatagtcaggagcgcttgtgctgatagccttgtgtttttactgtggaattggcaggcttcacaccgctgaaccatgtcgcaagagtctttgagggcggtcggccaaaagaacccctgttggaaagctttttcgactaaggtctggccagcggtgtgtgacccgcagatcccttcgtgtatgtccaggaggagatgtttgccgtcgtcggacgagatacatttgagaagtaccccgtttggcgcctttttgtatagatcgttgccgatcatacagtagatcttgacttgtctggataacttctcggcttctgtatcatcctcgggcaactcgtcgctacttaggaatttaatgagtgggatccgccagtcgtctgtagtctcgatgttggcaacggcgcgttctgcctctgtagcccctgagctgatgtcggggacgaccatgctatcttcgtcgtttgccactttcaccaatggctttgtcaggacgtctaggaaggtgccgggttcgagtggctctcgtctggacgcacgccgtgctaggtcgtctggtttgatgttgtccttgcggtatacgtgtcggaccttgattccatgaaaccttttttccagcttcctgacttctgcgaggtacttggataactcagggctagagcacttgtagtctttgtgcacctggtttgcgactagttcggaatcccctttcacaatcaatcgcttgactccaagtacggctgctgctcttatcccagcgagtagtccttcgtactcagctgtgttgttggtcgccctgaagttgaggtgaattgcgtgcttaaactgatcgcccgaaggtgatatcaagatgtgtcacatcctgattttcgttttaggatttataaattatttaataaattattattagaatttatattaaatattcattcatttacaagagaagttaaatgtgggaaataaaatttcctaaatataaagcatggatggatttattttttattaaattctccatggttaattatactctctggaattttctcggatttttcggagctccattcctaattttaaccatacaaagaacatttcagtaattatccacatattaaattaatcattaaatggactgattattatttttttaagtactttgagtgtacaagtattttcaggatttttcttgaaactagttgaggattggaagtatttttaacaattcaaagatcatttcagtgattattttaattggaaaaagtttttaaatcctctcctaagccgttgggctgatttcagcccaacatctctctccctcgcgcgcgtgctgtgcggccgaagtcggcccagccgagctcctccttctctttctttctttgctttgttttcagccagcccaagacgaaaagtctaatacgcgtccctgctacagtgtcgtcttcaagcttggacagaagcccgagctgccgtcctgtgccctgtagccgacgccgcttcctccaccaaatccaccgcatcccgtgctccgtttgcaaaattagttgaggggaaatatttctcttatcctcctctatcatttcctccaagaatcggactttatcccgaagaaatcaacgcggaatcgaattcgttttcgagtttatctctgcaactaaccctcggtttttccggctcaaatcctctcggttggagtccgatctcttcaatccaagcctataaatagcatcccctagtcgtcctcttccgtttgccccaagtcctgagctccctcgtcgcccgtagcgccgccgccacgttgccctagccgccgccgtcgtcggtgaccttccagccgcgtcgcgccgccgcggtagccgtgtccgttgccagccgtcgccgccgttgggtgcgcacggaggaggggaaccccggcctccccttcgcagccgccgaagaccgccggagcgccgtcgccattgttgacccgagccgagccgccgtcgaacctcgtcgccggccgtcgttcgtcgtcgtcagtcgttgttctttgcaccggtgagttcgcgttgttctcctctacgcgtaggtaccctccaaaagtccggccgagtcttctagcgccggcgaggtcgtcgctgatgtcgagtcgacattgatgatgtcagcgatgacgtcattaatccctttttcttagttttctctattagatgaaaatcgattaaacttcggaaattcataactaaatcatcgtaactcggattcgagtggttcaagttgctaaatttttctaaaatcaagatctacatgttaaaaatatccacatgtactgtttttgcttgtttttgtactgttttgttgattttgttctttcattttagtttccgaagttccgaagagagcgttttcgttgaggaaggttcggaagtgtttgcggaagctcaaggcaagtcacacagatcccaaacaaccctttgagcatgttgaacccatttaaagctattgttttatttcaacttatgcattattttcgaatgtcatcgggtggtgagcctttcccaattaattaatggccgaagatgactttattttcctatgggttataatttgattagctagaaccttatatattggtttgggttcagctaaatgctatatatatataattacttagccatgcttagaaacattagcacatgattgggataactaatattacactatcacttatggttatatttaatggtagctcacgatggtcaatcgtgattggttaattaattattgccaattaaaatttgtcaatggtgggttgtgagcacatggttgtgaaggtcgtgctcatggcaattaagaaccggttcgcgagctactgttgtgaaacattaaccgtgccaaccacaagccagcgtgggcaacggctttaccttttgtatagcatgattcattgcggggcactagactgagaagcggcgagaagtccgtgtgggtcgctggggagtccatgtctctggttatatttatagagggggtgattatgatccaggtatggtgcactgtggtgagttgtgttgtgcagagggtattgtcatagcctctattcgggtactttccagtatcgcgacgcatggtagacatgatgttgaggctgtgtcttgtgggtacagtggtacacctctggccagagtaaaactattcgaatgagcttatattatgccatcctttggtatccttgtgcacttgcatatttgctgtgtggcttgttgagtatgtcatatgctcattcttgcaataatcaaatctcagttgaagaaaaaggatccagaaggagaagacgtttggcttataccctagttgagttgcctgtgggagtggagctgaagccatcgctagaccgttattccgctgctgttgtttttcttttcttttgtaagtatgtaacgttattattatgatggatttgtatattaaattgtcagtttgtgtacctcggctgattcctggacgaggattttatgcacaaattagttcggaaattattagtgaatttccgggcgtgacaatatgaaccctgcccctgctccttgactgttgagtgcgccatcgaacgccattgtccatgtttcgctgtcggtttgactgtccgacctattttcaggcatagtccagtcagctacaaaatcggcgaggagctgggacttgatggctgttcgtggcacaaagtggacatcaaactggcttagctcgactacccatttcgcgatgaggccgacagcatctttgtttctcacgacttcaccaagagggaaggaggaaacaactgtgaccctgtgggtttggaagtagtggtgtagctttcttgatgtcatgattactgtgtaaagcagcttttcgatctgtgggtatcttgtatttgcgtcatggagagctttgctgacgtagtaaactggtctttgcaccttctctctcgacaacaatgacggtactcacagaatatggtgtggcggcaatatagaggaataattctttatcaggttggggagcaacaagtacagggggatttgacaagtagcgcttgagtgcgatgaatgcctctttggcttcctgtgtccatacaaatttgtcttgtttcttcagcagagcgaagaaaggttgtccgcgctctcccatcctagcgacgaacctgctcagtgccgccatgcatccagttaggatttgccttgatcttctccggatttgcctcgatccctcttccagagacgaggaacctgagcagcttgcccgatggtactccgaatgtgcacttctctggattgagcatgaggcgatatcgtcggaggttgtcgaacgtttcccggagatcatcaatcaatgagtcgcttgtcttggtcttgacaacaatgtcatcgacgtaggcctcgacattgttcccaggctgatcgttaagtgccgcttggaccgtgcgttggaaagtatttcctgcggttatcagtccaaacagcatcttaacgtaacagaatacactgaacggcatgatgaatgctgtcttctcctcgtcctcttttgccatgctgatctggtggtagccagagtagacatcaagaaagcttaacaactcacaaccagctgttgagtccaccaattggtctattcgaggaagagggaagtgatccttgggacacgccttgttgaggtcggtgaagtcgacacacatcctccacttcccgttagccttgtgcaccatgactggattggctagctactctggatggataacctctctgatgaagctagctttgagaagcttgtcgagttcttctcgtatggcttgtttccggtttggtgcaaatctgcgcagtttttgttttactggcttggcatcgggtcgcaccatgagtttgtgctcaatcacctccctagggaccccgggtatgtcggacggctgccaagcgaacatgtctacattgtcgcggaggaaggtgataagcgcgagttcctatttctcgtctagtgacgccccgatcttgacggtcttgtcgaggttggcgctggagagtggaacgatcttgattgcgctgtctggcttcggcgtcttgtttgttttgctcactttcttgggtggctcagctgtggcaggtgggttgggcgtgtgttcgaccatgtcgaggctccgcatgtcgcactgcaccgccagctttgcgttcccctgaatagtgattgttccctttggcccgggcatcttgagcacttggtacgcgtaatgagatgcggccatgaacttcgcgagtgcagttctcccgatgatagcattgtatgctgtatcaaattcagcgacaaaggtgatctgctctgttcggaagttgtttgcttggccgaaagtcacaagcaacgtaatcttgcccaatggcttggacgatgactgaggagtaattccatggaagggttgatcagtgggcgtcaagtcacttcgtgggatccccatcacgtccaaggtgctggcgaagagtaggttgatggagctgccgccatcgatgagaactcgtgcgaccttgatattccgaatagtgggtcgaccacgatcagatatcgacctggggtgacagcagtcttggggtggtcttcctctgagaattcgatcttctgctcagaccacttcatcttggactcagccccttgccatgtcgaacaaacttcgcgctccactttcttgtactctcgcttcgaggagtatgccgtggaacctccgaagatgtgcgaaacatggagatcggaatttgggtatgctgagtccgagtcctgagtagctgcttcagcggccttctcgactacatgtactcgcttgcccttctccaatgcaagttgctttgcgagtgactttttgaaaacgaaacaagcttctagggagtgcttgtccgacttgtgtatagggcaccatattttcttcgtatcgtcgccttgtgagtctgggtacttgggtgggtccgcatattctgctgcgaggacttccatttgagctttccttttcccactcttgcaactcttcttcttgcttgactcaggtgtgtccttggctggttttttctctccccccgtctttggcttgtcgttattgcgtctcagtgcgtcgtccgcgtgagcgcatcgatcgacaatctcgaatagctttcgagcagttgtgatctgtcttgtcaccaactcctgggtggtgtagcgatctctgacaccagtcttaaaagcgcggatcatggaagcgttggtgatctcggggatcgtatttctgcactcattaaagcgccgaatgtagtccctcaatgattcgcccggattctgtgtcaacgcgtgtaggtcgtcttcgatcgcgtggcgcttgtatgttccttggaagttagcgacgaactgttgccacaaatctacccatgaagaaatcaagtatggtgggaggtggactagccatgaacgtgcagatcctttcaacgccgccggcaaataattcgctaacgcgttgtcgtctgcttcggcagcgtagagtactatggaatagacctgaaggaactcctcagggtcggtgctcccatcgtacttctctattgctcccggtcggaatatctcaggccatcaaacatctcgtagagcacgactgaaagctctacacccaccaccgggggcggtgggttgtcggcgattgtatgtcctccgtggatgtctgtatgacgacgaggatgatgaggatgatgacgatgacaatgagtcacttggttccggggtacgattacgaggatgacgtctgggttctcgagaatcctgtcatcgcccaccgttgttgtcccgacgccgatctccgtcgtcgtcatcgttatggcggcgtcctcgaccattatcgcctggcatccgttgtttgcgatcatcgcgttcgtggtggttgtggcggttatcacggtcttggttctcgctcgggtgtcctcctcgctcttcgttctctcgatgtcgtgaagagacgcgatgccgggaacgatttttgttgtctcgcgcgcgtcgtgcttctcggcggccattcaaatggtcacggagatcgttggtgccgcgaggtggtggagtggcttgacgatgtgattctgctcaggtagttcgccattggcaccgccaattggcggttgttctagcagtactccagcggcggtctcctcgaacgcgttgctgaggttagccacttattctcgtagtcgttctgtccattgtgcgagatcattgttcagaacgggatcataagaggtttccctcaatattgcgttgatggccctgatgtgctgggccggtgtaatcacttgatcctccgcttctgtgttagcgcgcgcagacgtgctggtcccatcgatagcaaacacatcgcgtggtgtactcgtcgacgatgtgccctggtcttcaagcaagtgtagaactgacaactcgtggggatcgatgtcgattaccccaacaaatcgatctgagataactgtcgctcctcgttccttgttcgcatctttaagagagatttgtgactgctggaccttaggaggtgacgtcctcatggcgctgagaagaaccttgcagcttgagaggtcgtgattctttgtcttgtgaatagggcaatagacatcacgggttggagaagtacgttgaattccacgctctttgcaggcacggatctcagcttgtacatcgagaaaaacccagcaagtttgcaaggtgtgtttcctggttttgtagataggacaccaggaccttgttgcctcggaagttctccttgtcggctcgtgattctcatcggaaggacaagatttggctgcattaggatccttatcgggctcaaacgtcgtcgatgttccgctctccacgtccgcgggaggatccttcgacatagagccgtccggggtcgtaaccacgacgttctcgcttccggtcattgatggaccagccgagatcggcaccgtggtgaaaactgggaagacgatttcaccgacttgagtccacaccagcattgttgaaggttaaactccttggttgatgctggtgttgacgttattgttgatgaggcttgatggcatagtagtagaaccttgagcaccaagtccccgtacctagcgcgcaactgtcgacggtggatacccgcagaccggatatagagggtattggggtacgctggtatgaggatctacgtagtacgacatcaaacaagcagaagacaaagattatactagatcacccggcgacttggctcctgtaatagccctaatccagttgatatgggattatataatggaaaccacagattacaaagggaatagcggaactcgatgataccgacgagaccgtagtcgagttggttcgactagatcacccggcgacttggctcctgtaggctccgacttcgtaggctgaggtggatgtgttggcggtgagattcgatgccttaggacctcctggggggtcccttttatatcacgggtcagttgatctccaagtaggactcggagatatcggacccttcatgatacagtgacgacccagtcttgtccgagtaggacttctctcatatgtggatactgctcctattacgtgatggatttccttaacgtgtacaggaaacatccgtatgcgcgcaggtataccttatcggtatacaacatatatccaagggtagagggtataccttatccgtaaccctgacaatgaacttcattttttatttgattatttgaatctacgtcgaacctatagccgattgatcaaaactctatcgacattggctggcctcgctgcatcacatcggcctattgtccgattggctcattgatcttgtacagtcaatttattcatcttgttagttgcaggatcaaactaactggcacgccctgaacctgattaatagggcctgcactagagataagtggatctcccaggccttcgtgtgtcgtgatgaatttcatgttaacacctctatgtggcgctgaacgttgtacgtgaggtggaacagtgaggcgtcccctcaagcggaacaatacagtcgtcccctaacaaatcataaataaatgtgaggtagaacattacagtcatcccctcataaacaacttacacagaaaaggctgatcaatgcactctgtaacaacccactttagttctttgttgcataaaaacttttttcatgtgcattgcaccgcatgccttatttcgtgcatgaaaaatcatagctgagcagattaatgtttgtaccatcgctctaaacggttcccactgccctaaccaaccttcagttttgaaacttctccaaaagttatggttaaattcctaaaacttccataccttactaccaaccttgactccaagttacattcagattgaagcaagtctgcccatctaaccatttagtcaaacgctcagccgaaattggagtcctttctctcttcttctcgttttctcttgtttcgttgacctgttggtccccacctccaattcgggcgccacagcacagccaaacacgagctgtttcctcctgcgcagggttgcgcaagccaggctagccctcgtgcgtgactgtgcgtctcggctgggccacgtcccaccagaccgccctggagaccacacgccacgctgcttcagtcgcattgcactcgccctaggcgatattggctgatctgtccttctccaccataatttattgctgccaacagcacctcctcatttactcgagtgtgcacgagagagaggcctcctgcctcaggacctcgcgagattccctctacgagcctctgcaacaccctgccctgtcccatttgtttgccgcatgcttgcccgcacacataccatctcgagaccgagggtgtagagcaagcaccggccccatctctccccttccttccctggcttccgccttaaccgagaccttgt

SEQ ID NO: 21140 - DNA, 7791 bp, Oryza sativa
tgcaaaagtacacggtggacggacgccactgtgtgacatgattgttgtaacatcacaagacaaattgcaataggaaagacaaaaagaatggatagtgcatgggctcaaagcctgagactggtgcctatgcatgaagggatgcataaatgctcggttgagatgacaattaagctagctggcggctgtcttcctatctcggaatctatccccattccctgctatttattctagagttctgtgaattttgagtaaaatctaacaggttggttccacttttccaatcccgcacatcaattgtaaaaacatccaattaaggtcactaccaccgtcttctctgatttcctgcaagtcatccagttattttattctacaccatatagagaacctggactaaaggaagatgactacatacccgccgtctgattctagaatctatgtaggcataaagtttttcaaaaataaccagcatagtcaattccagttcaaaaaatagatatcgataatttggaccacagaataaaataagcacacattaaccatcaaacttttgggttacgagaatcgacaatgtattagctagttcaaaatatgtctactagaaaatattttcttggagaatgattaacgagttcaccatttaatggaaaatgttttgtaaagacacaacatacttcctttgatgatttctttagtttgagctagttataatttttggcaccctccctcttggccactttggtctcatagtttgatttgttttatgcaatgcagcttgttcactttctagcctttcctcgttttgggggcctccctctagggcgcttgacagtggttgaggccattacttctttgccttttagagtagtcttcacatgattgaccttgttttgtcctggctcatgcagtttatctgaacaatcagagtcgctatcttcacctatgaaaagaaataaaagtatattaggaatcgcaaaagatgctagaggcagcagttttctgaaaacataagaaatttattaaagatggtcaagggaataaatcctcggtacatcgcatgaagcaaagcatcatatatagcataccatccttttgacatggaagggttaatgaatttcgcagaacaaccttgcaactgaaaacatatagcagcagaaaggatgagatcgacagggggcagtggcattgctgcgatgactacatccacattcatatgcctctactgtaagccagcagactgcatgcttgataatctggcatcgcatccgtcggcctccattggagcagcacaatttgatttatttttccttaagtcatagattttgagtaggtttcaccagataaaacaacggattactgtagagtttcctgataaatctgaatagcactaactgcgaacctaacgacaaaagctgcaagggcagtctgcactcaacccgaatggaggacctagcatggatattgttgcaatcaacagaagcaagagacttctctgaagtccagccaaccttaactttcaaagccttaggttggtggttagtaaacttctgccttactagaccaactacatgtattgctagcctgaacatagcagtgtatgacctaggagtgcttcacagctgcttcacacatgctgcacctatggccggcaaccagccagcaaagcaaagagaagagccagctttccttgaatggtcacatcagacaaccgacgcaatgaggaacaacatttgcttctccaaactcgctgtcctcgtgaatgatggtcactaccgccgagcaagccactaaacaagggggttggccagcaatcaaaacacaaccttgctgaaactgccgcattggacaagtcctgccacggggattgaaggggagaagaaggtagactggagactgaagaagaaaactgagccaagactacaaatccaggcctctagcagcatgggctagcatatctagcctctaccagcaactgctacagttagtgtggcctccagcaccgtgtagccaaatccaccacaaatgccgtcactagcactgccaccaaagccacaactgcccagacgaccaccagcaatcgccacctccagcaccaccaccacccctccacaccatggagatgacaccagcagatccaaaataggactaggcgcccgacacagtacaacactaaacctgaagctaaagtacacaacattactagatagaggaggacacccaaaccccttctagccatcattagcaatgatatgccagaataaaggggggaagaggggtcgagagggagggtttactgtagtgctaccttatagcctatcgagctctccagatgtttgagtctcgttttcttttacaaaatataatatcaattattgccaaagatgctgatagtaaaactctaaataaacccatgcctcaaaaaaaagaggtgtcaccgagccaccagtatcagtcataggaaacataacccatgtgaccatgtctacagacaactagtcattgtctcctttttcttccggtcatagcttctaataactgtcactttgcacaacgattaaggtcgtaaaatatatatcgtatttttattttgcgcaatgtttaaggaagtcaaaagattgagaaactaatgttacatgacaatttttaaattatttcagtacgatgatatagacaaccataacacccccaagactctcctttttgcaaatatttggaatgctagatctaattgtaaataaattggacctagttttaatagtactactttataataaaaaaatgaaaatattagccaaaatgtagagtttagttgcgtggaagttaggatgtgaaaattaattaaactaatggtgtatgattggggtcatacggatttgcttcttaggtgcactatttaatcagttatcagagcttatagcaaaattgtcacctaaaatgatattggccttctagctaggatcaatatgtcttattttttgggctatattaattattatcattttttataacatagaatttgaagcatattattgtagtaaaattatactggatagcacaacctgaagagagcattataagaagcaaatatgtctaaaaattgatttaacacaagaaacctgatgaacttttgttcctcaggaacaaatttaccgctagatgaaccttgctcatcactaagaatctcttctttcagtgaaagcttttggagtttcgacaatcttgtgcgcagctggtttgtcccacctaactctagtcttttccataagctttcatgctgccatgtgaaacatattgtaaagcatattgtaatagcacgtggatgcagcatattgtagaaggattttattgggagtattggtagtaacatcattatagagagcaactatagttaggtttgtgtcctagatatacctttttaaagtagatgggttagaactaatacatttttcagaatatctacagatatgaacatgattgttcgatataactacactcaattgtgtgatttgttttatcgaaagtaaaacaagcatgaagtgccagaaattttgaggaacaattaccaaatgtgtgaacttttcaaaagagtacatctcatggacacttgtcttttgaacaaaggcacgtattgttactttccctgtttccacgtagagagcggctgacctcttggtatggaatacataatttttaatgggatcggtgtagtgctgcaaaagacaatgtgaaaaacccatgtacattcaaagtgaataataatgattaactgcaatcacatacgcggtctcttctaattctgccggtatttgtttttctaaagaccacttctttcacccatccttgtggcagcccttcagggttaaattccagaattgcaagaatctacaaatcaatcaactataatttcatttaggaaactatccaaacattagtactgcaaagtgagaaatcatctagtcgacactccttctatcctaatatatagcaacctagtacttaattagacatattctagtaatataaatctggacagactctatgactagatttatagtaatacaatatatctaatctggtactttgttgatacattttaagacggagggaataattattactattcaaataagagaaatagttccaacaagaaacatatacttgtgttgcattgtccatctgtatcaaattcagaaatcttcatttctttaatgtagagtagtacatcatcttttgagaacagtcgaactctatctggtgggtacacatagaactgtgaaatagcaaaatgaatgatcaaattcactcacatggaggagcagcctcaagctctcttccaacaatgtttggaaatgagcagccaacatggcaacaatggtgagcaaatccttcatatgcaaatgttttgcggtatattttcgctgaacattcccaatggtaatgattcataagattagagtaatcagttgattgtgacacactcatattatgtcacggttcgccgctataagtgacttaatgaataaattgttaaccaatagttaaagatggctgcagtgactataaaattaatcttttgctttgttacaatatgttggaataaacaaattaataacatgtaagcggtaggtgctagttcaaatgtcattggcaaaatttgctacatgacactcaatatttatgacctttgctgtgagacagccaaagaacgtgaattttctcgtagatactgcaaaaatgtggtaattaactgctggacactggcgggattattttattatatccgaaggaattggagagagaaacagctgtgtaagtacggttctacccttcgaatatttttttctttattcttccttattcttttctctctcttgttcttttttctcttcctctctctgctatttgttcaatgcgaggcagacggagtgtggcgcctccgatggggcgtcactacgcattcgtcgcccacgtcatcctcctcctctccattgcccacgctgctccgaggccaccactgccgcgcatcgttgccgtgggggcggtgctgtgcacgccagcgcggccgttcgcgtcgtcggtggggaacatcggaggaggcacgtggggctcgacgtacgcgacagcgagggcggtgaaggccgggcatggggcgctcgagtgcgcggtctgcctcgccgagtttgtggacgacggcgagaagctctgcctcctccccgggtgctgccatgtgttccacaccgcctgcatcgacgtgtggctcgccgcgcatgtcacctgccccgtctgtcgtgctgacctcgcggaccgggccgttgctgcagccggccatgtccttgccgctgaccaagctgctccgcaggtcggtgagcatggtcaccacgcccgcgaccgcatcaagcgggcggtgggcttcggcggcatcgcggacaatgtcggtggcgcgtccgagccggtgatggtcgccgctgctccgtgtattgtccaggccacgttggagtgacatggacggtggtggcggccggagatggcgccgctgcaaacccacaccaccggcacgagccacagtgacagcggcaggagaaggagaacaacatgccaacgccgaggcaggcagagcaggagacgctagagcggtgcgcacgcacaccccgtgcgtcgactccatcttcgctgtgggagctcaccgacgatgccttcagcggcaacgaaagaaagaggaagaagaggatgggagaaagaacaagagagtatgggagtgggcccatgggcaaacttgtctttaaccaatatttctctctccgttttcatggaaaataataaaataattccgcgagtgtccaatagctaattaccatatttttacagtatccacgagaagattcacgttctttggatgtctcacagcaaatgccacaaattttgagtgtcctgtagtaaattttgccaatgtcattttagcattgagcttatcagtgcggaggcggttcgtgaactaggcccttctggcgtactgcatagggcggtttaccttatacaccacttgtgcagtacaagggggccatttgcaaaaacaattttatgtcccagtgtttatgatttcctagtaccgttgcattcaacagtcgaagctttcataataaattagcatagagttaatatggaatacaatcaaaagctaccttgtacatcttgtccatgttgtctccaccagctctaatctcaaccagctagccctttggaagccattcatgtgtcctctacataaatcatggtagaactcacatgtactatttctaaacacaactaaaatcttaaataatatggtcatatatatatatatatatatatatatatatatatatatatatatataactcaccgtaaggttgttgcctacaacacagttctttgattccaagaagcgctgatccatctctgagaaaagataatacaacacctctggcttcattgtgaaagtgattccggaaaagggacatatgtaatactgtaaaaacacatagaaaattaacattgcaacaaaaatcttttagaacaaacaataaaatttaagttcaacaaaagaaatagatggccatctacatatttttatacccggcagatggtgccatcatcaccacgatagacctccattatccatccatctggaagccaacctggtcgctcatccacattctcatcatcactttgcaaattctttcttggtttctcaaagaatttgacttcatcacaatcatcttcatgtaagacaccaacagatggtgacttgcccataattaagccaagatcgaagaactctctcccctctcccgccctccctccctcgctgcctccttgccctctatctctgtatccctcctccactccccctttctctctcaccctccttcgcttcctccctctctttatctatctctttgaacttcgcacttgcttagatatatgtagcaaaggatgttcagctggtattttaataactgcggtttttagtaattaaatagtgtgtgtttatgcctttgagggacagcccatattgcgtattggacagctaatgtttaatgcaatgcatttaatgtggtgagttatatatgtttggttaagatatgttctagatagaataatatctgatgccaactgtcatatattttccaaattaatttatactactactaggcctgacctggtagtaatttaaataaaaaattaatttatacaatttatcataacattgtaaccatgcatcgtactatgaacaatcaaattaattaaatccaatgtcacctccaaaatttaacaaatctaagagtaatattattgatactgggatgcccaaccttctcgatgtaggatccggatacaccatgaaatcccataaactcgatgacaaacacagtgcccgtgcagcaccatgaattcgtgaaaccacacgcgatccactcaaccacacaaaagagtagatctattgccccctcaattccttgcaaacaaataaaagaatgcaagaaattcccaaactatggcataaacaaggaaatgcaagaacaatctacgacagaaattcccaatccctctctctcatttggcaatggctgtacaaaatctaggagaagaacaagagcaatttccgttgtgtaatttcaatataataaatgtggtctaccctcttgtgaacaatacatgtattagatagtcaaacagcctacatatctgactagaaatacaaggtgggctagatccatacgtaaccctgcaaattaaaaagattaatttggatga

SEQ ID NO: 21141 - DNA, 3780 bp, Oryza sativa
  unsure (1)..(3780): unsure at all n locations
cgaaggataacctggctaaaaaaattgggggtagacaaaaactattgtttctttcagctatgcacaacaaagaatccaacatcttttctttagctgtcttgttacgcgttctatttagagatatgtgttgtttgcttttattgtcccccacctcgtaatgccataaatatttttggtaattggtttagaaaagtacctaggccatgaaaaatatgattttaaaatgagctagagctttatgttagtcaatttgacggtgccgcaatgatagttttcaattgtaaacaattgtctaaccctatgcaagttatctttatgtcttcctagtatctctccttttggtttacgatgctaccatagaaagagcaaagtactatgtacaatggtgctatacttttgaaattggtaaccaaggttctcttaatgcagtatgggtggcatagtttcattaacattgttggctgaattatgtggtttaacactagttaataataacatggagttgggggggggtctgtaccatcacattatgttttttctatgtgttgaacatgtgaaatcaaagtgtgttttgattattattttgtgataaacaattggcttatgcgatgattggtttgatatttggagataattggtgaagtgttggttttgtctttggaccggccgatctgaccgggatgcgtgtaatggtcaaacttggtggttgtggtgaatagtgtttctgatgatgaacaagttttgacttgatggagccggtcagaccgagtcgtatgcacctattagaccgaagtagtggtgacggtcagattggccaacctaatggtctgaccagcttgctcctgtttggagttggtttctggttgtttatttggatacttgtgattacttcatgtgttatggattaccaagccaacacaaatgctacagaaacaaatcatcaaatgatgaggttaggcataattcagaaatgattacactgacccaagagtttgctaaggaggaccaaggactagttacaccattccaatgaccaattacacgtaccagagccaagaaatgacaactagaggtgaacttgctcctaggtgaacaatatctcgatattgacgagcattacatactacctaagtcttgcactttacttttgcttaggttgacacacaaatgatcaagataaagatgaattacggattacaccatgctaattttggagtccactgttgtattgatcagccaaggccgttgacacataatctgattgttgcacatctatgcatggctaaggctatgcttaacgccgaatgtcagagatatgggcccaggggtatgcaaagtaaggggaagttcccttcacttcctcatacgtggctgtacagcctggcccagcccccgctcctcgcaccgcgcaaagcgcggacacgttcggggggcctcggggtgccgtgtaaggcccctcggggtgctatgtcagcccctcggggtgccacgtcaggcccctcgggccctcgccctgcctggacccgaggcccttgcccagctgccatgtagcgagaggaaaccaagctgggcggtcattaatgggcggcgctccaaccgtccctcgaagcatttagtgcgatcggggcagacgtgtggagccccaccactggcccacgtcaaatcgggcgtaaccggtctgtgaccggcctgtcaccggtcacatccgattgacacgcggccatgccccacgtctcctttgtccccggtgaagtgaaggtaggtatgtattgtcacatcaggggcatcatctggactcctctccatgagaggagggtagccaccggtcttcgctcatttaagagcgaatgacagggctgccccccgtgtcaggtgaaggacggcgctgggcctcactaaagggccaaccgcggcttaacttccgggcgaagcattcgctcatttaagagcgaatgatagggctgtcccccgtgtcaggcgggggacggcgctggccccaccaaagggccaaccgtggcttaacctccgggcaaaggcacgggccgcggattggccacgagagggtgcccccctccatttttcatggaagagtaggtagaggccgtgcatgtggtatccccttcaactataaaaggaggaccttgcccagtgagaaaggaggagacaacactaacaagaaaaaagctctctgaagtttgagggactcttgtaatactgatcgatattcccacacacaggagtagggtattacgcttgatagcggcccgaacctgtataatccttgtgctcgtgtaagattcaggagcttgaaccgcggataatcgacgacctcggatctcacccgttgcccccggccgaactcacgaaaggggaatcccacgatctcccgatagagaggatcactcctcgataaaccttatcaagtttttgcagtgccaaattttggtaaggttaccnaaaattttggcaagatttcatatgtacttactaaaatttggcaacaaactaaatgtagttatttttttggtaactttgccaaaaaaaaggtaaggttgaaaatagtaacaaagtgaaaaagcccaacacctgctaggtctcgacctattgccgctgcaggtgtccatcgctcctcctgacctagcgccgccggccgccaccatgacgacctcccccttcgcagcgctgcaccggctcctcggctgccgcctcgatctgcagtgcgcgatacctcctcatcaccaagaacggaaggtatccatctattcatcccacacctaaattcccctcgttttgagtcacaccctaaatttctagcataactggaagataatttttgtgctagtacaactttgtttctaacaaaagaaaagattcgcctatgtactggatgcttcgtctatgtgcttgatgttgcttgcatgtagcgatgctagtaggttagaattatcacagtccatgccttttggattcagtttcaaagagtaaatgctgattactttcaggattttccttttggatttagtttaacatttacatttctcatgtgttttctttccttgcttatatgatagtgtcgtagttggctcaattacctttgtcgatagagatcagattatggtgtaaaaggaatgaagttctgatagttgttctcaattgatctgaacaggaaatacctgcattttttagttacagttgtttggttcttctttcctttggttccaagagtgtacaggtttgaaaatgtggcctaggaagaccttccatctccttcaatttcttgtttttgtcattcagggagaaacctgaaaagctgaaacatagtgtatggattcaatctttgttttcgtgttgagttctactgcttcttgctgacacaaatggtacatcatgactatatgatgttaaagtgcagaatataatccattttattagtgcagatgccagaagctgctgagtggaatgatgagaacactagattttatatatctgtgaaccctcgccgtggcacgacactccttgacatttcccttgtaggtgcagcagcgccgcccagtgccccactgggtacaatggtcacatgcttgttaactcgtccctctggtggttcacaagtagtttctcttttcttttcaaaaatctatatagatatgctatagattttactgacagtgaccagctcagcaagcacgcaaaggggagttagcaaagcttttgtaggatctagaagaaatggatggggttcaatcctgataattgagatggtggcaaagcattccacat

SEQ ID NO: 21142 - DNA, 1720 bp, Oryza sativa
gttttgtgattgtatcaaactttttactacctcaagtaaaatagtcaaggtagtcaaactaaattaattagaaacctaattggcaaaatgaagcaacttctaaatgtgcctaagttgaacagaaggatataggttttataatttattcaaatgctacagtatttatcaggagttaatataatttttcaagaattgttacccttagttttgacctcctaaaaattcaatttagttctcagcataccccttttcatctttttgtcagaattaaaatgtttcaaatttttgagtgaaactttgagaaatggaatctaggtagcataggttataaccacaaaaatcaccaaattgttaacatcattctaacttggttaatttgaacttcaaagaaagagaaacagaaaaatctctgaaaatcctgtaaactgaataaaacatgtgtttacctgtgttcctagccattctcgtcacccttacgtagcctaccacgacctggacccacatggcagtgcctttggcttgctcacacttgtgttccaccattttatcgcgtgggacccaccttgaatatagagagaaataccgacacgttggaacatcgtgacagcttatccttcttcgcccccttgctctcgggtaagtctatcgcgcgaacgtgcgccagacgcgaacggattggtaggtctagtatacgagccaggaatctcgcgaattttgcgataccttttcatcttttattcctcatagctaattacatgcctaattacgtgcttaaatcatgattagtttaatggccaatgtcctggtagtttgtttcttcggttaaaataagtccacacatgctttatgttttcttgttacgacttacgaggtttgtttggattggactgtagctattttatttttaaaaaatatcctgtgatgatcaacatttatatttctattaaaattaatacactaaacttttaattccagagatataaattctatataaagtttatataaataaagtctacacatagaaagtttatatacataaaatctacatatacaatctttacatatataaaatctacacatagaaactttacatgtataaaggaaataattcatataaaaaagtttccgtcaaaagaaacaatgaaaaaggactaatgaaaaaaagaaatctgaaaaattacggcgtggaaaaatatcgcctatatttgttgcgttgtccaatgctaattactatataataatatctgacaggtactaattacacgttaattaggtggcgggatgcatgctaattctgtaattcagttgggttgccaccggctgagatccgttggaggtgttcgtgacggacgaatgctcgcgaactagactcgtcccttgctctctagctttcccagccatccctcctcactctgtagtccaccctagatccaagaaaccagagtgggagagctccttcttgctctcctcgccatcatcttcttgccggccgccgggatgatgccatcacgccgcccaacgggtcatcgtcgtcgccatctttctttcgtttccgattcacccttgcacgccatagcctctgatctgatcttgccccgtttcttgcagccgatctctgggaacgccgacctcgccacgggagctctggagcgcggccacaccgtcgtcaacgcgcagccgcgggttcgcgcagctggttccgtcgcctcgaggcgaatcc

SEQ ID NO: 21143 - DNA, 1461 bp, Oryza sativa
cagagtataatctattcgaatagtcgcgtcctcggttatagacaatgcttgatgtgttagttatgttagcatcaaatgtggattattatggatgggattatgtttgatggtggtgttggcatgttgtgccatgttgttatggactttggtagtccatggttgatgatgagagcgccgtttgggctcatttgcttatatatttcagaattatatacttgctgtccataaattaaaatgatgctagatttacttgtccttgcttattttactcattaattgctcaataaaatttgcttgatgcaaatgttgaacctagagacccactataggctagaaagcttgcatacttctctctcccttttgtatatataattttgggtaagacttgcgagtacaatcttgtacttaatccggtgtctgcaatttcaggagaggattccggttatgagttatgcttcttgtgtggtcattggtctgccgaggacggcgagggcaatgagtgatctcttgcagcttggctcttgcccggttggtttgccctagtggggttgtggcaccaccggttttatcttttgcttatgaactctatttgagacttccgctgctatatttaggtgttgtatgttgggacctcggaccctattatgtgtcatgtacctcgctgcactttaaccctattatggtacttgctatgtttattaattgcttgcgatgaaagtgtgaggctagtcacattcctggggactagctaagcatgagtaacgggttttgatcgcttgagataatcggggatagcgctttggatcgagtcactggggtatacttttggtcgccaccttcgagtggttgacgggcatatgacggagtgtactggcaagctgtcttacggttatctcttgcgctcactactcgacattccggttattataatagaaggttgtcaaccgcgatcatggacacattgaggacgagtggctatttatgcgtgtatagatcccattccttcaatagtatgtggtggtcgtgttggacactggatgatataatactcggggtgtccacaaaaaatgccgtcgttaataaaatagtgaccaaaaaaagttgcgtggtcgttagtactattacgacggagcttttaacgaccactgacgaccacacttttgtggttgttaatgatctttaacgaccacatttaagcttttaacgaccacatttcgggtcgttaataatcaattctccagtagtgtcatggtagaagcagaggtcgtgttcaaagaaacaatcactcagttgaattttcagttgaatttgataaaagggaggactggtacacgcaccctagtgaaaccggcctgtccaaagacaaaatcactagcagccaattatcaccaaacataaaaaccaatcatcacaaaataataatccaaacacactttgattacacatattcaacaaattaaa

SEQ ID NO: 21144 - DNA, 4918 bp, Oryza sativa
ttcctgcagcccggctcactgctgataacagctagaatgggtttgggtgcccttagcttcaggtttagcgttgtcaggtttcctttgttgggcaacttgtattatttttgatctgctggtgtcatctccatggtgtggaggcgtggaactgctgctggtggtggtctggcagctgtggcttggagggggggggggtctctttggtggcagtgctggtggtggcgcggacggcagccgttactggtaaaaaagctagatctgctagctcgtgctgctataggcctagatttgcggtctttgctcagtcgactactttggtctccccgtcccattctttggtctccactccaccttgttctcccctttctccactcctcaacgtggtgcttgcccggtgcggcttgtttagtaagattgtggtttggttgctggacaacccccttgtctggtggcttgctcagtggcagtggccattgttcacgaggtagcgagtctagagaagtgagtgttgttcctcgttgtgtcggttgtctactgtgaccattcaagcaaagttggctcttgtctttgctttgctggctggtttggcaacaacgatctacggtcatggggtagcatgtgtgaagcagatgtgtagcactcccaggtcacccgttcgtctaactactctgctatattcaggctagcaatccatgttgtcggtgtagtaaggcagacgtttactaaccaccatcctaagctttgttcattaaggttggctggacttcaaagatttctcttacttccgttgattgcagcagtatctgtgttcggtcctccattcaggctgaacgtagtctgcccatgcggcatttgtcgttagcttcgcagttagtgctgctcagatttatcggggaactccgcagtaatctgttgtcgagtctggtgaagcctactcaaaatctaagacttaagagaaaaacctcaagttgtgccgctccagtggaggccgccaaagggaatgccgttgccccttatcgatctcatccttttctgctgctatatgttttcagttgcagtgttgttatcggtagttcattcaccctttcatgtcaaaaggatggttgtgctctatatgatgctttgcttcaggcgatgtaccagggatttattcccttcactctttctttaataaatttcctatgtttccagaaaaaaattatgatatgttgcctctcccacctttggctattcctgatattgttttatttctttccatagccgaagattgcaactctgacaattcagacacagcacatggggcaggacaaaacaaggtcagtcacttggcctcaaccactgtcaagcgtcctagagggaggcccccaaaacaaggaaatgcaagaaagtgaacaagttgcattgcaaaaagcaagtaccactatgagaccaaagtggccaaatgggagggtgccaaaaatcataactagctcaaaccgaagaaatcatcaaaggaactattttgtgtctttacaaaacatttccattaaatggtgaactgattaatcattctccatgaaaaaaattgtggcagacgtattttgatctagctaatactatgatgattctcgtgacccaaaaagtttgatggttaatgtatgcttgttttattctgctgtcaaaattatcaatatctatttttttgtactggaattgacaatgttggttaatttatacttgtggcataaagattatttttgaaaatcagacatcatgatggcttcgtagatcctagaatcagacaacgggtatgtagtcatcttcctttagtctaggacctctgcatggtttagaataaaataattggatggcttgcaagaattcggagaagacggtggtagtgaccttaattggacattttttactattgacgcgtgggattggaaaaatggtaccaacctattaggtttcactcaaaattcacaaatgtcttaaaaaacagctgggaatggggatagattcggagaaaggaagacagccaccagctagattaattgtcatttcacccgtgcatttatgggtgtgattggttgctcgtatccctttagcctggcacatctccctcatctaggctaaacctagcctaaattggagagacacatgcaagtgttggtttcttgtatcaggctagcctgactagcatgaggtcatgtttggttgctgtcacatcctgattttcgtttcaggatttataaattatttaataaattattcttagaatttatattaaatgttcattaatataaagtaaaatgtggtaaataaaatttcataaatataaagtatggctggatttaagtcttattaaattttccatgattaattacactctctggaattttctcagatttttcatagcttaattcctaattttaataatacgaagaacatttcagtaattattaacataataaattaatcattaaaggatctggatatagttttgctaaacacttagagtgtccaagtatttttcaggattcttcttgaaattatttgagcattggaaatatttttaacaattcaaagatcatttcaatgattaatttaaattggaaaagtaattaaaatccccttttccttttcgggttgaaactggaaaaagtcatttttccctcattagcccatccttcctctgtgccctcttctccattctcggagaaagcttatttcttgtcccttcttttcttttagccccgacagaagtctactttgctcccctgttgctacagtgttgtcttcaaccttcagccgtttctctcacgtgcccgctcacagtagcgctgcatcctccaccaaatccggccatgccgttgctcccaatctaaaattgatcgcggaaatagaaccctctcaatctcctctaccttttccccaagaaagaccccatcaaattcgtgcttaatcccatgaatttcggtcccgttcttatcctaacaaatcgggataaaccctaattttcggccaccaaatcccaccacatccgtatcgatctctacctcctccgcctatataaaggatgcactgggtctccccttcgctttcccctcctttccccgagctcccatgcccaagccactcttccccgcgagctccatctctctccgccgctgccgccaaccccagccgcaacgtgctgtcatgtcacgctagtcgctagatactctgacggacacattggcggtgacaacagaagagcaacaggggaaggcgtaaagtgtaaaggcgtgatacgaaagagaaagcgtactttgtaaaaggagtaggtgtgagtgccatgttgtgtgtggggccagtgttagctggcgtgtgaggggataaattctccatgagttgtactgagaagattatgaaaatagaaatggaaaaactaatcccacctactctgtatccttctccttcctctgttcttcctctgctattcccccaactccggcgagctccgtcgccgtgattagggccatgccaagttggtatcagtcgcttttcgatccccggctatctctcgcactctctcgactcttgatcagtaaatccggtgtttcgttcgtggtcttccttcaggttgatttgcggtaaatcaaggctaggttgatcgggtttggagaagacgacgacacggcgccagccaaaccaagtttgcaggttcggcagacgatcgcagcgatgaaatccatggaggagcgcttgttggatgccatgaatgcaatggctgccaaggacgacatcgccacgcacttgatgtagattgacctcaaactcgagcagcagggcgagcggttgggtcgggtaaaaaccaaggtggatctctccttgacctcccttgaccaggtgcagcaagagcaaacttgggtctaacgggctctgaaggcggtcattgtggcaccatcaccaccgccaccgttgccgccggaaacaccacatcaagcgccgttgttgtcgactccttattcgggttccgtggcttcaacctcgtctgaaccacaaccaccaccacctcctccattgggtaccttcacctcattactctccgggtgattgtgagcattgtgacatgggtcatcgtcagtggactcctaaaatggattttccgaagtttgatggaaatggggttaaggtgtggattgataattgtgagacttattttgctttctatcaaatcacggaagcatttctagtttcagcaacatctatgaatctcatgggtgatgccgcaaattggtatcagacatggaagttagaagtgggttggcatgattgggagatgttgaaaactgctatttctagggaatttgatgtgcacctttggtctgtgaaaatggatgagttactgttactcaaacaaactagcacagtgatagaatattgttcaaaattcagtgaacttgtttatcagattcgtctctatgacccgctcttgtgtggttctgttttggtttctcactttatgttgggactgaaggatgacttgaggtctttcgttcaggcagctcagcctactactgttacccaggattgtcttgttgctttggctcaggagggtgctcatattggacaaccaaggaagaggtttaatcaatgccgagataatgctgttggtagaggcaatgagaaacctaagttggctcgtggtgagttgtggaaagcacagcagctgaaggaatatagaagggctcagggtctgtgtttcaaatgtggtgataagtatgtttctggtcaagtctgtgtcaaacaagaggctgagttaaagttgctgtgcaggaagagccagtgatcttgtttgatgatattttggatgctgtcactgctcctgaattggtagaagaggattttaatctctccttgcatgctctagctggtacctgttcttcggctactg

SEQ ID NO: 21145 - DNA, 3891 bp, Oryza sativa
tgcactgtctagttcttcttctgaatatcctgctatacagcagctactgcagcagtatagtaccctgccccctgatagggtgctgaatcattcaattaccttgttacctaattctgtgccagttaattcatgaccttacagatattctcctgctcagaaaggtgagattgagaaacaagttttcgaaatgttgaccgctggactcattactcccagttgtagcccttttgcatctcctgtgtcgctggttaaaaagaaggacaacagctggagattttgtgtggaataccgcaggttgagttctttaacaattaagaacaaattcctttgcccatagcggaggaacttttggatgagctagctagtactaagtttttctccaaacttgatcttaaaagtggatatcaccagattagaaagttggaggctgatgagtataaaactgctttcaaaacccatcatggtcatgtccaattcagggtgatgccatttgggttaactaatgcccctgcaacctttcagtgtctcatgaattctatctttgctcccttcttgagaaaatttgttttagtgttcatggatgacatattgatatgcaacaaatctttggaggagcatggtcaccacttagagctggtgttgtagttgttaccagggatgaaaacagtagcggtaattaccggccgaccgggctacctttttcgaatttgaccaatcggacgttccggaaacggtaaatatcgtaatcgaaaacggaaacggtaaaaaatacggaaacaatatcggaaatagtttggtaatttaccaaccgttttgtgtggttaccgtattataccagtaattaccgtttatatattccggtaaattatcctttttataaacatctggccggctggccccagttatttttctttggcccattttctcagcccaataataaccctaaatccctaaccctagagttggtcggctactcctggctccccaatccccgcgtcgacgcggctaggagagtccaaagtagatgggagatcgatagcaaggagcagcggaaggggttttgaaacagctgaccagggacagcgctgtcgtcatcattgtcatccccggccaccggcattcgtaggctgtcagcgtccccgaatccacccagcagcaacggcaggcgtgcatgggaagaggtggagcagccggagcaggggaagaggcggatctggagcgccggcggtggagactctggatcggcggtggagacgcgctggatcgactggagagtggagatagcgatgggaacgagatagggtcaatggggatcctcttccatcaatgggatgggtggataaatatctcctatcatcttctattttagcccctggactttgtaaatattacgagaacttcttcatttagttgatttcttccatataaaccctaagtttcatatttattttcatactagccctcaatgatccttctacttgatcaaatcaattttcctattttgtaattaataaatttcatatattagacgagtctctgaatcctaattttttatagttttccaagttggacacccaagttcgagttctagattgctagctaaatgtgcgatgttattgtttgatgtttccgacaggaattatcggcttccgatcgataccgacacatttccgattgaataattccattttcgatttagatatttccgatatcgtttccgctaccggcttaccgttatcgattatgtttccgaaaaataatatggttgcggtaatggtttagggtgttccccgattgtttccgactgttttcacccctagttgttacagcagcatcagttatgtgctaagttgtccacgtgttcatttgccacttctcaattggaatacatgggccacattatctttgctgaaggtgtagccacagatcctgagaaaactcaagctatggcttcttggcctattcctactaatgtcactcaactaagatggttttttgtctcactgggtattatagaaagtttgtgcaacactatggcattttggctaaacctctcaccatgttgcttcagaagaacactaagtttgtatggactcctcaagctcaggaagcttttgcagctctaaaaactgctatgtgtactacacctgtccttactctccctgacttttccaaaccttttgttctggaaatcgatgcttgtgctactggcattggagctgtgctatctcaagaagggcatcctgtggcttttacaggaaagcattgggcattgctaatcagaaattatcaatttatgagaaggaatttttggctattataatggttgtggataagtaaagatcttatttactcactagtccttttgttattaaaactgatcataaagccctttatcatttggatgatcagagtttagatactgacagcacgccgaactagtaatgggggcgactcgcagtacagatttgcagaagaaggccatgactaaactgattggtctgcagtacaaatttcagtataagaagggggtggataataagtctgctgatgctttctctagagtggggcatctttttcctatttcagttgttcaacctgcttgggttcaggaggtccctaattcatatgtggtagatctttttgctaaataattattgcaataattggccattacctctcctaattctcaaggttttaccttgtcgcatgggttgataaggaaagctgataaaatctggattggagttaattctgctttgcagaccaaactaattgcagccttccactcttttgcaataggacgtcactgtgggattcaagctacataccagcgagtgaagaaattgtttgtgtggaagggtttaaagaaatccatggaagaatttgtctagcaatgtgcagtgtgtcagcaagctaaacatgagcactgttcttatcctgggttgctgcaaccattaacaattccatatggtgcatggctagatatctcaatggactttgtggagggtttgcccacttctaaggggagcagtgttatcttggtggtggttgacagatacactaaatttgctcattttctgcctcttaaacatcccttttcagctttgtaggtggctgagttatttctgaacaatatggcttctctctatggtatgcccaagtccattgtttcagatcgcgataaggtgtttacaagtaatttctgggcagactttgtttaagaggtttgaagtgccattacatctctctactgcataccatccatagtctgatggccataccgaacgtgttaaacaatgcctgtagatgtctttgaggtgtgcggtctcctcttccccacattagtggtgtgcttggctccctttagcacagttttggtataatacaaattaccactttgccttacaatgctctccttaaaaatcactgttggcactgatccttcgtatggtcttcttcctgccatgtaggggcggatctacagtactaaggccagtgtcacgtgacaccgacgactttcggcaaaatctatagcaaaactacttatctatatgttataacactatgatctaagcataattagcatactatgacattgatagacatgttacgataccaactaatcgattttctggatccgccactgctgccatgtcagttaatgcctttgcatctactgactctgattctcctgtagctgatgctttgctcagagaacgtgctatgttttcttctttgctgaagcatcatctcacctgtgctcaaaataggatgaaaaaaacagctgatctgaagcgtactcgtcgctcatttcagattggtgatctggttctcctgaaacttcaaccgtctgcccagaagtctgttgtttctcaaccttttcctaag

SEQ ID NO: 21146 - DNA, 646 bp, Oryza sativa
tagagcgtgtttggttgcctgtatgtaggttggttcacacccacggatgcaagcaacgcgtgtttggttgcttgcacagcccatagggcctagttccactcatgtaaatttaccttccgagccagtcctgaaggaaacgcttgatttgagcttcgatccccatcctggccaagcgcgtgcaggcgcgggtgcgggtgggtgcaagtggggacacgtcaatgcatgaggctggagggggtcaagcatccattctcttccctctcccatttgctcctagaggccaccggattcgttgtcgtctctatcgtcacctcgtggagctcctcagccgagtggagccccttgttactgctagccgctatcatgtagctagccagaaagcaggagacttggacaggatgacggatctggatgctcgagcggtggtggcactgtcaccggcctcatctttctcatctcatcgccctcttcctcgcgccttcttacgcgttggccgccagcctccactccatttttagccgccggatccagcggccacgagctcgaagtcgtcagatctggtgacccaaagctcttgatcaccggatctagttgttccgatggaggtgagccgtgcggccgacgagatatgcgaggctgcatcatg

SEQ ID NO: 21147 - DNA, 3647 bp, Oryza sativa
  unsure (1)..(3647): unsure at all n locations
ccatagaagagaaatccaagccgtccatgtgaagccagatagcgggaggtgccaggattggttcgcccaaactgncggttcgccgaaccaaaaatccgtcctcctggcctcttctttggtcggtaggttgcttattgggcccccaacatcttgcacaatgttttggcccagttctaagtagttttggctgacatatggtcctccaatccgtgtaaacgcatcctgaatgcgcggaggtccattttgtcgcatgacggatgtgttttctcctcaaaatacctgcatacacatattttaccaacactagtgaagatgattagtaatactacttaccactaagttggataccatgttttatttcattatatgcaggtattgacggttagatattatgatttaaggatcgtcaacaccatgctgaacacgtctccatttctgtagttgtgacaagacccctcgcataactcaactcagagaggcgcaactttcctggatcataatcaccccattttagccaaggtatggactccccagcgacccccatgggtttatctctggcacttcatagtttggcacaccacaatgagccttgctatacaaagtgtcaagttgttgcccatgctagcttgtggttggcacggttaatgtttcacaacagtagctcacgaaccggtccttaattgccatgagcacaactatccaaacttcaaaccatctactcacaacccaccattaatcaagttttagttggcaactaattatccaatcaagattgaccaccgtgatcgaccattaaatatctatcattaggttatagtgaagctttagttatcccaatagtttgctaatatttctaagcatagctaagaaattatatctaatatctagctgaaccaatatataaggcccagactagtcaaattataacccattggaaaataaagttgtcgatttctaggatcggtatttgttggcagtatgtcatgagacccttcgaccagacctgccgaaaccatgcgaccagtcaggattcaggtttaaggtgttaagttcaacggggcgaagccccacagcgaagacgccgaagccacatggcaaagacaatggagtgaggacggcaagagatggacccccatggcaaagactgtacattctagacgaagggtgcctgccgaaggagggtggcttcgccatcccggtcgctctggccggcccttgggtcggcattcgccaaccaggcccattagaggcccatgaatgcaaatgacactgtgtacctatgtaaatgtccccttcataagggcaaccatgtaaattcccctgtaaaacctaaaccctaaaaggagaacctgtaacagggttataaatggacccttaaggccatgtaatggggggatcccgaagaaaaattctcaatttaatacactaccattttccaaccactgttgagtgaccacgtctttcgatgtatgcatttgtcgcttcgacaatagtaatatattttatagggtacgctagatcaaagaaagtgatggtgacacaaacgtttatcctggttcaggccctcagagtgaggtaataccctacattcagtgtggtggaatatctgtatccggtggaaaaaggagatgatgtatgctcggttgtggagatgatcatacctctgtcctctcgggacccccgccccctcttatataggatgaggggtgttgatggtccttaaatcataatatctgaccatcaatacctgcatataatgaaataaaacatggtatccaaattagtggtaggtattattactaatcatttccactagtgttggtaaaatatgattatgcaggtaatttgagtagaaaacacatccgtcatgtgacaaaatgcacctccgcgtattcaggacgcgtttagacggattagaggcccaataagtcaataaaaacaatttagaattgggcgaaaacatagcctaggttgttgggcacccaataagcaacctcccggccgaaggagaggccgggaggagagtttttgggttcggccgaacccaccagttcggccgaaccaatcccggcacttcccgccatctgctttcacctagacggctcggatttctccactaaggcgattgcagggtgttttggtcatttcccatacacctaaccgtcatttggagcctatataaggaggctaccttcttatttccaagacacacaactttgtgctgaattacaagaggctctattgtattttttgtacattagaataaggtagagagtgaggggaagctctggaggagtgcccggaagtttggcactcatccaacttctacctcgacgagtgtagctttcataggaggaattcgggaggagtaccggagctgtcattacactctacttcgggatcggagaacttcttctataaagtaagcattcgtgtttctttcttaagttatttaattactttgtttaagtaagatagatttccatctttgcgggttcattgtttagttttttatactaagtgctctagtactaggattctggatagagaaggaagttcctgcgcgagtattagagtagtaattaataacttagacgtggtgtctaggttagggattacctttgtttcttgtgtatcccacggatttgttagaggtaggcagcaggtggtgacagccctgaatcccgtcgtagtaatcctccacgttgggataaatcatagagctatagccagaaccacgctggcagaccagcaggggacggtacccgaagcaacagatagagaattaccttgcttagcgtagatagttaaaacacatagaaagtcctctctagcctagcctacctttcatcagttgttgtacttggatagtcttagccttaggtagtctacacacgttccctgagttcgatattcttttggagtcacccgaaggtgaagtgctatagctgtattccgtgcgcttgcggatttatctgtggtcgtaagaaataccaacaagcatttctagcgccgttgctaatttatccgagtcgaggtcattctcgtgtctttattttttatttctcttcttttattcctttccttgatggagcaacccaaaattcaaaacctttctgctcctcgggttgatctttctgagccatcctgttcttcaaaatcaatcctatccgatggctacgaaatcggtcctggctttatagccatgattcgagagcaaaccttctctggtggtattggtgaaaatccatacctccatctttgggactttgagctagtgtgttcatgtttatccatcgtaggcatgacacatgaaactctaaagtggaagttgtttcctttttctcttagagatgaagcgaagcaatggtacactctgtctgtcaagaaatttcacggtgaatgggaggagcttaagtgcaaattctgccttgctttctttccattaacccgtgtaattaatcttcgattagacatcctttctttccgacagaatgagaaggaatctctcgatgcagcctgggccaggttctcgctgttaactcagtctggcccagacttgtctttacccgaccatgtgttgttacaacattttcggtacggttagacaaggagtctactgcaaatctcgatatttccgccggagg

SEQ ID NO: 21148 - DNA, 2763 bp, Oryza sativa
tcgtgttcctttcttatgttatttaattaatttgtttaagtaagatagatttccatctttgcggtttcattgtttagtattcgtacaatgtgctctagtactaggactctggataaagtaggaagttcccgtacaagtattagagtagtaattaataacttatacgtggtgtctaggttagagattacctttgtttgttgtgtatcccacggatttatcagaggtaggcggcaggtggtgacagccctgaattccgtcccagtaatccttcacgttcgaatacatcatagagctatagacggaagcacgctgtcagaccagtaggggtcggtgcccgaatcaccagatagggaattaccttgcttagctgtcacgcccgaaaattcactagtaatttccgaacttatttgtgcatcaaatcctcgtccaggaatcagccgaggtacacaaactgacaatttaatgtacagattcatcaaattaactaaaacgataaatacttacttaagaggcactaagtcctcaccatgaagaaaactgcagcggaaaataaaatctagcgaagctccggctccactcccacaggcagctcaactggggtataaaccagacgtcttctccttctggatcctttttcttcaactgaggttgattgattattgcaagaatgagcatatgacatactcaacaagccacacagcaaatatgcaagtgcacaaggataccaaaggatggcataatatagtctcatttgcgaaagcagcatttagcaaagagttaagagtagtaaaacagtagagtaattaatcaaaaattttaatcaacactggacagcacacctatgctgcacaggcccaaccatcctgaacaaccatacccggctgtacagatctaactccaaaccaggagctaagcaaattattaccaggtataacatccataattattgtgagaggtgtgagactaatcacgaaaaacattgctcaacccgcccataaccgcgggcacggctattcgaataattttactctggccagaggtgtaccactgtacccacaagacacagccccacaacatgtcaccatgtgcctcaatacaaccacggtacctcggaaaggagctgtgacaataccccttgcacaacacaatccaccacagcgcacctttcctggatcataatcacccccttataaacaaggcatggactccccagcgacccccgtgggcttatctccgccacttctcagtctggtgctccgcaatgaatcatgctatacaaaaggtaaagccgttgcccacgctagcttgtggttggcacggttaatgtttcacaacagtagctcgcgaaccggtccttaattgtcatgagcataactctcaaaaccatgtgctcacaacccaccattatgaagttttagttggcaagtaattaatttaccaatcacgattgaccatcgtgaactatcattaaaccatcattaaataatagtgaatcataagttatcccaataatgtgctaatgtttctaagcatggctaagcaatcatatctaatatctagctgaaccaatatatatagctcaactagtcaagttataataacccaaggtatcaaggaataaagtaatcaatgcaaacaggccataacaaaagaatagatttacaccacccagtgacatttgaaaataaatgcacagttgaaataaatagagaatttaaatataggatcaacatgctcaaaggattgtgtttaggatctgtgtgacttgccttgtaataatcggtcttcaattaatcttcttgaatacttccggcgcactcacgaaccttcgcaacaacggaaacgacaagctaacacgcaaaacgaagaaaaagactaacaaaaacaaaataaacaatacataaaaagtaaacaaacatgtagatcataattttagatgaattatgagacttgaacggcctcattctgacttcaaatgaatttattatgaattttactagattaaatctaattaaagcccatttaaaaataattaaataaatttaattcaatttatggataattttaatatgtagatctttattttatacaacttttgcaacttgaaccacattaaactgagttacaatgaattagttatgaattttcaaagattaaatcggattaaagcatttatatggattttaattgaattatgacgcaataatgaattatttttgaaaaggaaaaggaggattattccgtcatcaaaggcggtccgggtgcacgggacggtctaaggaaacgaatggccgagatcgattctatccaaaacgggcggccgagatcaacttgatctaccgcggttcacgggacaaggcgacgatgacgtcaacggtgacgtcagcgatgacgtcagcaccggcggcggctcggcaacgcatgctcgccggtgaacgacggcgcgacgacgcaaacggaggacaccaacgggtagagggcgacgcggcgaactcaccggtgaccaaaacaacggcggaagagcaacggacggcgccggcgacgaggaagaagcggcgacggtcttcgggtcgacggtgacggcggtgctccggtggtcttcggctgcggcgaagcggtggacggggacggcgacgacctcgcgatcccaatggtggggatggcgaccaacgacggcggctgcaacggcggcgcggcgcggctgaaccgacggcaacgacagcgacggctagggctacgcggaggcggcggggctgcaggaat

SEQ ID NO: 21149 - DNA, 1115 bp, Oryza sativa
ctcgccgtcgaccgccggcgccggctcctccaccccgtcgcccggttcgacagctccgtcttctgcgtggaggaggcctcctgcgacggcatccttgtcctctggaggaagagggccatcggtgcccattccagtgtccgcttctcgatctgtaacccgaccacgcgtcagtccggtgacatcccgctgccgctgctcaccgggttcatgctcatgggcttgtactggcaccgccccaccggcgagtatcggcttctgctctacaggatagagctacctgcttcggagcggctcgttgatgttctgatccccggcgatagaaacgcctgctacgtctacacattgggctctggcgatttgccgaggtgcattgggtggccagaggcggaggcaaacggcgcatctgtgctgctgcatgggagcctgcattggtataagagaatcgaagatatgattttggcgtttgacattacagccgagtcgttccggtggatgcggtctccattcggcaaggcggtgtggagagcgtttcatggcctgtttgagattaattgtatgctcggcatgtactgctgtgacgatggtgcgacatttgtagatatctgggtgctggaggattatgagagagaggtctggtctctcaagtaccgggttgaattgccagttctagagatcaggagagagcttgatgtgaagcgtgatctttacagtgtgatggtttcttccgaggatggggatgtgcttgtgctggttaactgcaaacgagccatgctctacattggtactgatggcaagctgttggcgagtttgccacatgataatgacggcctcagtattactccagtgaagcttagagcaagccttgttccgcatgcattctttccatctctgctggactatgtcgtgaatgcttcgcctttcgtgtgatgcctgctgaatgaggtggttcctctttttaagacttctttctattgcccttgcctgcttctgaattatatatggtgcaatctctatgtattggatgaggtttaagcttacaaacttcttaattgcagtatgcattatgtatgcaattaaacttcttgcctgaaaactgatggtacatgaatttgtat

SEQ ID NO: 21150 - DNA, 1573 bp, Oryza sativa
acgcccaagtggaggccctgcgtgcggaacgagcggagctcgaggccgcatgggcgcgcgttgaggaggggcggcgctcggtggacgccatggtggaggtgggccgtaaggctcaccgccgccacatctcggagcttgaagcccgcaaggcggcgctggcggagatcgcccgagaggtggaggaggagcgagaggccgcccttatcgccaccaccgcgatgatcgaggcgcaagacaccctccgccttcaacacgcaatctgggaggcggagctgaagaaaaagctcgacgccgcccaaggggtccttgactccgccgctgcccgagagcggcgggtaacggagactgaagcgacgtctcggcggcgcgaggaggcccttgagtcccgtgccatggcgctggaagaacacgccggcaccgtggtgaggggcttgatggaccgcgaggccgccgctgctctccgggaggcgacgctggcggcgcacgaggccgcctgcgccgaggaggagtgcgcgctccgcctccgcgaggacgcactcgctgagcgggagcgggctctcgaggaggctgaggccacgaccaaacggctggcggacagcctgtcccttcgcgaggcggcgcaggaggagcaggcgcgccgcaatcttgaatgcgtccgcgccgagagagccgcactggaacagcgggctgctgacctcgaggcgcgggaaaaggagctggacgcgagggcgcctatcggcggggcggccgcgggcgaaagcgacttagccgcccgcctcgcagctgccgaacacaccgtcgcggaaatgcagcgagcgctggactcctccaccggggaggccgaggcccttcgcttggcgggcgagattgggcccgacatgctttgggatgcggtctcccgcatgaagcgcgccggtcggcaagcgggcctctggagaggccagacgtcggtgccccccaccaatctggaaggcctcgctccgcacctcaacaggatggcctgggttctcgaacaactccccgaggagcttgagaagaccatcaagtcatcctcgagggacctcgcgcagggagcggtcgaactcgtgctggcgagctaccaggcccgggaccccaacttctctccatggatggcgctggaggagttccctcccgggaccgaggacgacgcgcgcgcgcgcgtccgggatgccgccgaccacatcgtcaacggtttcgagggctcggcccctcggctcgcgttcgcccctagctccgacgaggagggcgatgccagtggtgaggacgacggtggcgacgaggccggcgacccgggcgcgtcggaatgagcccccgagcccccgtcaatctttgattttttctttttctttcttctaaggccttcatgcctcttttgtatagatcaacttaatcttgttaaggtcggtgtagtcgatgcacatccgaagcttgccgttcgccttgggaacgaccaccgggttcgccagccactccggatggatgacttcacggatgaatccggcctccagaagtctcgccacctcctcgcggatgaaggcttgacgttctgggg

SEQ ID NO: 21151 - DNA, 1243 bp, Oryza sativa
tccttcctcccacttcctcgttcgctcagccaagtttttgactgcgcgacagtccgcgagatcgtggagggaggtgttgtggacggagcaccacctgccggcggggcgctccctgctgggagtaccagcctctttctttttgtcgcacgcaggcctcccctttcgagtggcccgcggagcgccctcgacggcgaggacgtgaccctcgtcgccggaatggaccgaccttttcttcctcctcctgtcacgccgccctgtctgagcggcggatccgggggcggccgaagctgccacaccggaaccggaggggttccaggtccaggcctcctccttacgagccactcggtccgcgagctgaaaaagctctgcggtagtctggggctctttggaggcaatcttttcgagcatgcggttgtgccgcacaccccccctgaacgcgtagatcaccgcgtgtgcagggatacaaggtatagtattgcggacttggcagaaacgctgaatgtacgagcgaagggattcatcatccccccgctgtactgcgtgcaagtccgcttcttcacctgggcgtggataagtgccttgaaagttcatggtgaactgctggcacagatcctcccaggagtggaccgacgcgggtggcaggttcattagccaaccccgtgcctgtcccttcagggccatgggaaagaaattcgccatgaccctgtcgtctcccccagcggcctcgatcccggtcgtatagacctggagaaactcggtggggttgacgctcccatcatacttctcggtgatggtgggccggaaccttgggggccaacggacattccgaagactcgccacaaaggctctacagccgacaccaccagccgggggcacggagggctggtcctcacgtccatgtcgaggtgacactctggacgaggaggcgccctccgttgcacggggagtacgccggctattacgccggcgctcgatgttgaggcgggcatccggctcctcatgctgatcctcccgagtcgaaggtgtcgacgagggagtggcagccgaatgacgtgcagccgccgccgctcgccgcgccctccgccttgatgacacggaaccggtggtggcggcgccggaagtcttggtggtggcggaccgtccaccagcacccaggcgctgctgggccgtcacgaccaagttggccacgtcgtccagccatcgctgagctggagactcagggtcatggacgacgggtgggtga

SEQ ID NO: 21152 - DNA, 1050 bp, Oryza sativa
tttcgccacgtcagcgatccgcaccgaaatgcatcgcagccgtttacggaaacagcatcgaacgtcacacgttcgtccacgttatcgatccgtggggaaaccactccaccaatcagcgcccacctcaagttcgctataaagtcgtcgcccccgtccccattctcttccccacatcgcagtcttgcaaacacacgcagcaaaatccacaccgcttcccctccccgagaagaagagagcagcatccatggcgcccaaggcggagaagaagccggccgcgaagaagcccgcggaggaggagcccgcggcggagaaggccgagaaggccccggcggggaagaagcccaaggcggagaagcgtctccccgccggcaagggcgagaagggcagcggcgaggggaagaaggcggggcggaagaaggggaagaagagcgtcgagacctacaagatctacatcttcaaggtgctcaagcaggtccaccccgacatcggcatctcctccaaggccatgtccatcatgaactccttcatcaacgacatcttcgagaagctcgccggagagtccgccaagctcgcgcgctacaacaagaagcccaccatcacctcccgggagatccagaccgccgtccgcctcgtcctccccggcgagctcgccaagcacgccgtctccgagggcaccaaggctgttaccaagttcacttccgcttagattccatctattggtagtatttagttctgtctactatctggtagtggtagaaatggatgtcttattagtgtgtagttggcggttgtggcgctgcttttggtaaactgttgcttatttatctgagatattaacgatgctcttctagacttctatgtgcttcctgttttgtgattgctcgatttcttgtttgtggtgttcattctgtttgagattactacgatactgtgaaattttctggaacaaaattgatgttctggtatgcatacgtagcaactgaggacatggcaactcacttcaggaataatgctgctcctggcttgtttggtgttctacacttttactca

SEQ ID NO: 21153 - DNA, 948 bp, Oryza sativa
catgcagccagattgttgagtctgctatctccgaagtgatgtctggaagagcatccttggtaaacttattcagatctaatgaatctctgaacacgtcatccgttggactctttcctgtaaacatctcaagcagtaatattccgagactatagaagtatagatatcaccaagagttgatatccagtacagctgtacaggcccaacatccagccgcgtttcggcctgcagcggcgaccttcacagcttgttttgcaactcgagggaagaggattgggagtttacacgagagaattgatggtgagattaagatgagaattttgatttttaatcaccagatttcaccctcctatacaatgcaatacatctactagatgcaatcgcggaggcctttgcacgtacgtacgtgcacacacccatggcggacaacgacatcatggcggcattgccggaggacgtcctcctccaggtcctctcccgcgtgggcaacgtcaagagcctcttcatgctggccgcaacatgccgccgcttcaccgatcgcgccttcctccgcgacctctggggcggccagcgcgccggcgacctcctcggcttcttcttccaccggcaacgcaactcggcctcgacattcggcttcctgccggcgccgccgcttcgcccccatcccctccagctacgacggcgagcccctgacggcgcgccgcggcatcctcctgatgcggctttccccctccaacgactggtcagaggcgaccagccacctcctcggcctcttcaaccctatcaccagcgagcaccacgttctcccgcatctgaagggcccctccaaccttggttccttcgccgtcaccagctgcgccatcatcttctccgacgacctcgccgggaagcagcagccgccatcttcaggccgcttcatgttctcgcagctgctcgtcaccaccaagcaca

SEQ ID NO: 21154 - DNA, 908 bp, Oryza sativa
tagatcttgtaggtctcgacgctcttcttcgccttcttccgccccgccttcttcccctcgccgctgcccttctcgcccttgccggcggggaggcgcttctccgccttgggcttcttccccgccggggccttctcggccttctccgccgcgggctcctcctccgcgggcttcttcgccgccggcttcttctccgccttgggcgccatggatgccgccctcttcttctcggggagaggagaggaaagggaagcggtgggatttgcgagattgcggcgtggggaaaggaggagacggggggagatgattttgtagaggaggggatgtgcaacctgattggtggaaagcacgcggcgcggatcgatgacgtggagggatgtacgacgttggatgccggggtcgacgggttggtgggatgccgaaaaatgtgagcgggaacgggaggagttaaggcggtttccggcgcgcgtcggtgggcgaatttttagagtttgagctttccttcggcgtacgcctacagcccagtccagcccaatttagttgtcaggcttcttggcgggctgtctttgtttatgggctaattgggcctatttctttgctctgaaagccactccacgacttgttaggctacgtattcggtaatctgcccacgtcaacatcccagtgagacgacaacgacgtcgtcgtcttcaagcaggcagctagcctaaacccatctccatctgcaagtaggcttatgtaacagtgcgttgatcatgcaagccttccgtcgatcgcctagccgcctaaatcgccgtgttctgaaagtcaattctctccgactcaacgaaaatactaacaacatgcacctggccgcgttgaccgttcgaaatgtatatattccctcgttcacgaaatacttttcattgtgg

SEQ ID NO: 21155 - DNA, 1294 bp, Oryza sativa
aaaaaggaattaaaagaatgcaatcaacaaactgtcatcatctccaaatttgcttcaaagaccatctatactctccatataatacggacagccattggtactaagatatagcactaccactctcacaaaccaatcaagaaacacaatacgtcccatgacgatcatgatgagcctgaggcttgaattatccctcgtcctcatcctgacgccgatcgttgcagccgtcgctggtggtggcagcagcagcagcagcgatgaggccacgttgcttgccttcaaggcagcgttcagggggagcagctcaagtgcgctcgcctcctggaacagcagcaccagtttctgcagctgggagggcgtcacgtgcgaccgtcggacgccggcgcgggtggcggcgctgacgctgccctccggcaatctcgccggcgggctccctccggtcatcgggaacctcagcttcttgcagagcctaaacttgagctcaaacgagctgtatggagaaattcccccgagccttggccgcctccggcgtctagagatcctggacattggaggcaactcgttttccggtgagctccctgccaatctgagttcctgcatcagcatgaagaatctgggcctcgcctttaaccagcttggcggccgcatcccggtggagctgggcaacacattgacacaactccagaagctgcagctgcaaaacaacagcttcactgggccaattccggcatcgctagcgaacctgtcattgcttcagtatctgtacatggacaacaacaacctggagggcctgatcccgctggacctcggcaaagctgcagctctacgtgaatttagttttcagcagaacagtctctccggcatatttccgtcctctctgtggaacctgtcaacactgacggtgcttgcagcaaatgacaacatgctacaaggaagcattcctgccaacatcggtgacaagttccctggcatacaatactttggattggcggataaccaattcagtggagtaataccttcttctctcttcaatctttcatcactcacaattgtgctcctttatggtaatagattcagtggatttgtgcctcctactgtgggaaggttgaaatctcttcggcgattatacttgtatggcaaccgacttgaggcaaataacaggaagggttgggaatttatcacttcactaaccaactgcagtcagctgcaacagcttgttatctcagacaactctttcagcgggcaacttccaaactctgttgtcaacttgtcgaccacactccataagctctactta

SEQ ID NO: 21156 - DNA, 930 bp, Oryza sativa
attttttaagcctaattaatctataattagagaatatttactgtagcatcacataggctaatcatggattaattaggctcattagattcgtctcgcaaattagtccaagattatggatgggttttattaatagtctacgtttaatatttataattaattttcaaacatccgatgtgatagggacttaaaagttttagtcccatctaaacagggctcagaatagaaatcagaatagaaaggatgaatggagagactattggagtaaataacaaatttgaattgctaattaaatggagatttggctaaatagacggttggagagtgatttggagaggctgtctggagatgctcttaagctcgaagaggcgctgcccctcgtgcatcgccgacccccgaccataagtatcacgagcaggcggccgccgccgagacatgtgctgctcagtcgctcagagcctcagatcacccacccgcttgctgaagcgctagtactagtgtactaccagtagtagtgtaggcggagaaaagcagttggcaaagctcgcgcaatggcagcctccaccaccgcgctgagcatgaagctgctcgtcgacaccaatgcccagcgagtgctgttcgcggaggcgagcaaggatgtcgtcgacttcctcttctccctcctggcgctgccggtcggcacggccgtcaagctgctcgggaaggactccatggtcggctgcgtcggcaacctctacgccagcgtcgagaagctcgacggcacctacgtccagcccggcgcctccaagaacgcgctgctcagccccgtcgtgctctcgccggcggccagctccaacacctccgtcctccgcttgccggccccgtcttcttcgcagcccaagagcttcttcagctgccgctcctacgactgtttctactacgtgacggacgtga

SEQ ID NO: 21157 - DNA, 914 bp, Oryza sativa
ttttttgacggagggagtaacttccaactttccgtcacatcattctaatttcaatcaaacttttaactttgacgtgaactaaacacaccctaagtagtaaattagtatggagaattcgatgaagaatttatctggttaatttatcacctcttggtagccgatcttgaccgtcttttcctcgagcgcggagaggtcctcgacgccgatcttgctgagcagcgcgatgctggagatgctcgacatgggcatgaaggtgaggtcgtccatgacggtgtacgtcaccacgtcccgcacgaaccctttgccagtctgggcggcggcgaggcaggtcgaacagcggcagcccgtgtccgacgacatccccgcgccgaagggcgggaacgccgccttcagagacggcagagacggggtcgtcggccggatggtcgaacactggtaggccgggtggcccggcggcggcggtggaggaggaggaggagcaacgtacggcgcctggacgcgcgggggctggacgagggacgggaagccaccggcggtggcggcgaggcaggggtgcgccggcgccgggttcagcagcgcgtcgcgcgcctccgcgctctgcatgtacgcggcgtccatcctcctcacgctggcgtacacgttcgcgacgccgccgagcgcgttctcgcccgcgagcagcttcaccacggcgccgaccggcatggcgaggagcccgacgaggaagtcgacgacgtccttgccggcctcggcgaagagcacgacctgggcctccttggcgatgagcagcttgatggtcggcgtcgtcgacggcgccgcgtccgccgaagcgcacgacgacggcacggcggcggcgttgcccatgttgttgcctgcttcaaccagcgccgcgtacgtaaaaccctcgcaggatcaga

SEQ ID NO: 21158 - DNA, 601 bp, Oryza sativa
ttcctgcagcccgaggcgacgcgtcgggcgcggtggtcggaggtggccctcacctttgatcagaccgaccacccaccgtgcgttgcccggggagggcagattgcgatggtggtttcccccactatctgcaatgtgaagttggggcgtgtcctcatagatggaggagcggctctcaacatccttcccccgcggcctttgatgctatcaaggccctggggatggtgctccgaccgtcccagccaattatcggtgtgacgccggggcacacgtggccattaggtcacatcgacctaccggtcaccttcggtggacccgccaacttccgcacggagcgggtgagcttcgatgtggcggacctcagtctgccctacaacgcggtcctagggaggcccgcgttggtgaagttcatggcggcggtccactacgcctacctccagatgaagatgccgggccccggtggccccatctctgtccgtggcgaccttaaagtcgcgctcgcttgcatggagcagcgcgcggaccacctcgctgctgcgaccaagcccgagggtggtgacgagaggcttggcacctccgcccccaccgccccgaggggcagcgg

SEQ ID NO: 21159 - DNA, 588 bp, Oryza sativa
ctgcagcccgcgagaaacgagggggcaaggtagtgggcgcgggaagcgaggagccgggcatagcgttggcaagggaataaagacgccgaggaagggattcgtttccttcctctcgccattcttccccttgccttcgccacttgcgctctaactcttcgtttcctgtgccctacccttgccatactcgctcgctctcaagctcctcctccaccggcgtcatggcacggggctccgcaccgctcgacggtagcgtgctgccgccttcccgcatcgtgagcgagaggcaggccgggctgccgcgccgattcatgccggaatctgccaccggccgggaggtggtcacgctgggcgagggacgcccggcgccacactacccggggcggtccgtcttcttcctctctttcgcaatggcggggctggtcccgccattctctatttttttcatggatattctggagttttatgatctccagatggcgcacctcacccccaacgcgataatgacgttggccatcttcgcgcacctgtgcgagatgtttatcggggtgagcccatctctccggttgttccggtggttcttcaccgtac

SEQ ID NO: 21160 - DNA, 734 bp, Oryza sativa
cgaaagtcgaggcggaccaggtatctgaggacgtctccgctcggcgaggtcaacgtgacccccgccccggcgccctgaagagacagggagccgtcgaactacatcacccagtaggcggtgtgaggcagctgcgaggggcccgagtggcctcgggggcggagacgggctcgggagctggggtccattccgccacaaagtcggcgagggcctggctcttgatcgcgtggcgtggttcaaagcgcaaatcgaattcagagagttcgattgcccatttcaccacccgtccagtaccctctcggttatgcaagatttggcggggttgacgcttccgtcgtatttttcggtgatggtgggccggaaccttgggggccaacggacgttccgaaggctcgccacaaaggctcgatagccggcaccgccaaccggggacacggggggccggcccccgtgcccggaccgaagtggcgctccggacgaggaagcgccctccgttgcatgggcggcgcgacgaacgtcgcgccggcgctcgatatcgaggcgggcatccggccccccacgcacatcttcttgggtcggaggcgttaacgagggaatggcggacgaacggcgggcaacggccgccgctcgccgcgccctccgcctcgacgacatggagccggcggcggcagtgccagaggcctcggtggcggaggtccgcccgccggcgcctaggcgctgctgcgccgtcatgacca

SEQ ID NO: 21161 - DNA, 5951 bp, Oryza sativa
attcccatagttaaagttcaggggagcaaagtttacctttttcctgtaaacaggttctttcattcgattatgtttaatttgatcgacctagattactagtatttgctttcctacaatcatgtactatgggaaggatccaactaatgaactaaaattttattagagttgctcatatattaacaaacaaaaaaaatacaatcatcatctggcctgtaactccttaacagccgtccctgtaaccagatctaacgggaactacaatgacaatatatgctctcaaatgcatcccgcaaataaagaaaagaccaaataataagctgaaatttagtttatatatagcagaacaagattcgggctaagccaacaataaacacatcaattcaagtaacaggaagtaaactgatacaggctagtactcagacttacgctttaaagtctgctgctgcataatccaggtaattggtttcacccagagaaggcaggtggtagggttttgtataagagaagaaagtccggctggcaaaaggaaccacaccaattgttgggtggtttgctttggtagctgcgttagggctttgaatagaattcaggcactttgcttgctgcattggaaggcagtacaaggaaattaatattttttttttcaacaaaggcatacaagttcactcttatattgtggaaaaatcaaagttatcgaaaattgcatagatgtgagaaaggaaacaaaagaaaaggcaccgccttgttctttttttaaaaaagaaaaggaattataaattggccggtttgaaagtgtaaaactagtgctagcaaagaaattgagtactattagctacttacagaaacaggaaggccatggttattgggaatcaccgtgctaaaacgacggagagctccattaaaaacattgttgatagcagaaacgcctcctccttcctgagaggaggaaaagagcaattatgctcttccctgctgtgaaagaaaaaccagaaatttgaaagatttggaggagtgtgtatacatacagcggaggtaggacgattaggcatcgatctggacagcacggacgagaattcctgaaacaagaaacgcctacacatgtcggcgatctataattctatatactgcttggaatttccggcgagcgctatctgcatataaaaaaaataaggggctaaaaccaaaaacaaaacgtaatcaggtgaggtagttttcggcaggcccccatgagcagcaaggaatctcaacagggaacttagaatctaatctaataacaatgacacggaaagaaagaaagaaagaagataaaactgatcctagcggctgcacggagggaagatgggattgaacaccgggcctccaaaccctagcacatcgcggttggggatcgaacacaaccttttttgccaaatggatttaagccatccgatgggggaggcaacgagcacggatgtaaaatatctcgcgaattatctcttatttatgtaactagcatggtggcccacacagattgcgcggctagcatcattatattttctctcatataatagcatatatgttttctcaatgtattattcaaatatattaaattgacaacataattttaaattttgtactaactttacgaaactactaatatgtaatattcatattgtattttatatacgtgttagttattaattatttttaatatcaaattttagttatttgtaaattatattcctatatagactctagactcgtctttcaatatttttttaattccgaatttttgttatctgtaaattgtatttccatgtagactctaggctcttctttcaatattatttatttttaattttgaatttttattatttataattgtatttctatgtggattttaaactcatctttcaatattctttaattttttttaatttcgaatttcaggtacttctaaattgtattcctatattgactttagactcttcttcccatgtgttttttttaaaattttgaattttagttatttataaattatatttttatacagactctaaaccatacttttaattttattatacttattttgaattttagttagctttaaattcctatatggactctatactctacttctaatattccttatttttaattccgaatttccattatttcctaattgtatttctatatggactctatactctacttctaatattccttatttttttaattccgaatttcagttatttataaattatatttctatatggactctagtcttttttattctgaattttaactatttctaaattatatttctatatggactctgtttttctttttcttcgattaatatgagaatttctaggccgtgagagcgaacgtggatgcttcattttctattcctttaataagttaataaattagttttgttaatggaatatgtttaatactccaaatattcgatgtgacatagattaaagtttagtctctgatccaaaattccaaacaccctctaagtacctcttgatgtcttgatggccatcaatgaatgaatagatgaatgatgtagttgtagtaataaactccatgaagtacgtgctccgtgacaagtagtgacaaacaaatgcagaatggggacgtggttgaaggtagaaaacagggtctagttgttgtagtaaaatctgaagccccgtgaaacgtttgttagtacggtggtgacgtggcgtgggtccaacgaggagggagcacgcacggtgagggagaaagtgatgaagttgcggttggtcagcgtcgtcacgagctggcttaagagaaagtgacgcaactgagtacagagtattacctccatctcaaaaaaaagtgcagtcatagggaaccccgtgtccgacgtttgaccgttcgttttatttaaaaaatttatgaaaaatttgaaaaaaaaatagtcacacataaagtactattcatgttttatcatttaataacaataaaaatactaatcataaaaaaatttcaaataagatgaatggtcaaaagttaaacataaacagtgcaaaactgcatttattttgagacagagggactaaaactttatagacggagatgacggtccatgcaagttatgaatgctgaaaagcaagagagaaggaggaggaagaccctctgtgagagcagaattcattaatttttcattaataatataaggaggtggaaagttgataagagaagtcttgtgtcggttgttggtcgggacgggaggaaggttcgtggcggcggcggcgtcgaatgagcgcaggacacggccgccccagaaatcgcccgtcaacctcccctctcgtgtcgcaagccgcagcacacaacggcgaccgtgcgcgcgcgcgtccccacgcggaggggaatggtggcgtccgacgcggagacacgcgggggaggggaagggaaccacgcgcaaacccaacgccctacgagactgtagtcgacgatgatttgataatacagcacggcagagcagagcaatgccaaagtcatggtctcctcctcctcctccccccaatccaaacccccaaaaccaaagccaaaacccctctcgccaccgatgggcgcccgcgcctctcgccaccgccaatcccccgaccaatcccaatcccaatccccatccccacaccacaagcaccaccaccaccaccaaaccacccgggcccccaagcccaagcccaagccccagccaccgccgccgcagcagccgcgatctcagcctccgccgccgccgcggcaccagccccagcaggcgccccagcaggcggcggcggaggatggggtggggcgggtgctggggcggcccatggaggacgtccgtgcgacctacaccttcgggcgggagctggggcgggggcagttcggggtgacctacctcgccacccacaagcccaccggccgacgctacgcctgcaagtccatcgccgcccgcaagctcgcccgccccgacgacctcgacgacgtccgccgcgaggtccacatcatgcaccacctcaccggccaccgcaacatcgtcgagctgcgcggcgcctacgaggaccgccactccgtcaacctcgtcatggagctctgcgagggcggcgagctcttcgaccgcatcatcgccaggggccactactccgagcgcgccgccgccgccctctgcagggagatcgtctccgtcgtccacagctgccactccatgggggtcatgcacagggacctcaagcccgagaacttcctcttcctcaacaagcgcgaggactccccgctcaaagccaccgattttggcctctccgtcttcttcaagcccggtatcctcccatctttcttttctactgcccattccttgctgcttcctccaaattaatataaataatttacacaaaccaaatccaccaccaatctattagccatcatctgctctctgtgtggacacctccaactgcgatgactatggtatcctgtcggattacacttcatttacgctctcatggtcaactcaaagcgggatcagggacaaatatagcggcaaaggcctgtgcatcatgttaggcaaggcatgggcttttgtttcaggaccacaagagaggaaatgtcatgaatcgtagcactgatggggtgctcaaggtgtgttcaaactgatggggtggtgtgggaatgcaggtgagcagttcagagatcttgttggaagtgcatattatgtggctcctgaggtcctaaaacgactatatggagctgaggcagacatatggagtgctggagttatcctttacatccttctatcaggggttcctccattctgggcaggtacattacatatcgctgctctttgcatcaaaaagtttttttatagagcagatcactatgtcatcaggcttttagtaagaaagcccagaaccaggttcaatacaagaaagcatccaatagattttgataccattatcctaacatggaccctttgttggttttaccagaaaacgaggacggtatatttgatgctgttctgcaaggtcatatcgacttctcatctgaaccatggccttctatatctagtggtgcaaaagacttggtcaagcggatgcttcggcaggacccaaaggagcggttaactgctgctgaaattttgagtaagttgatattttcaaactctgctatttgttgccaatcttggttctacgaattgatttgcccatatgtgtggttggaacttttaaagcgcactgcttgctattattagtaaaagcatttgtggtgattttacaaactaaatcttcatctgtgtatagtatcttaatctgatattttaaatacacagaccacccatggattagagaggatggagaggccccagataaaccacttgatattacagtgatcagtagaatgaagcagttcagagcaatgaacaaacttaagaaggttgccttgaaggtaataagatgttttgaacatcaagcatttcttctctatggctttgcactttattctgcaatacatgataaatcttgtcttttattatgttatggctaggtcgttgcagagaacttgtcagaggaagagattgtgggtttaaaggaaatgttcaaatctttagatactgataacagtgggacgataactcttgaagaactaagagctggtctaccaaagcttggcactaaaatttcggaatcagaattaaggcagttgatggaagcggtatgctcatattctctttctgtctctgcacgctcatatcttgattctgtaccaatgccagtagttcactataatggccttgtttggatcctccgagctattaaatagccctccggaatcttgctatttaggagtattaaacgtagattaccgataaaaccgattccataacccctaggctattttgtgagacgaatctaatgatgtatattaatccatgattagcggctaattactgtagcatcactgta

SEQ ID NO: 21162 - DNA, 4472 bp, Oryza sativa
tattttgacaaggaccacagcgggtaagtttacttctgtcatttttttgaaaatcattttgataggttcgatcttttggattaactagtttgttgtttgcttgtttctgtacaggttcataacagtcgatgaattggaagaagctctgacaaagtacgacatgggtgatgaagcgacaattaaagaaataattgctgaagtggatacagaccatgtgagtcactccactaaatacctagaaaactccagtgattactttttgatatgtcatcaacgtttagaatatgaaaataatcattcctgcggcctttaaatcaggataatcgaattgattacattgaatatcttgaaaacattggaggagatttggttttcaagtatgctgaatgttgctcagccatctctaagatcatggatgctggctaattataattttcatagggtaaatctaactatattaataaactatgtaagctagtgaactttgatccatcctgctctctagtaatcgagttcctgttagataaataaaaaggttagctatcgagaaatcattccttctctaagcaatatacttccaccaacatgaatacatgatgtgggtgaataactgaaaattgctgatgctattattcaaaagtgaacattaaaacgggaactgcatggatttcctactaaatactgtgtcctgacttactgcttaggatggaagaattaactaccaggagtttgttgccatgatgaagaacaacagccctgagattgttccaaatcgacggcggatgttttaagcctttcctacagttattgtgaagtttttttcctttcacaaattctatatggttccatcttagggaagtgagcattatctttgtaaatgttacaagagcagttcgtatcggcggaattcaatgaagtatatgcaaggcatattggactcgttatgtatcatggtggatagctctctgaagtgggtgtggtgcgtttgtgtatgtatgcttgtgctttctggccatatgttttctgtctcttgataaaaagagctctgtaaaacagtttctactgatcatatcaggcaaggcaagataacgcttttctggtgaagctgaatttaactgatgatgtatgcttcgaaatttgattacttttctttgccagaagaagaatttggcaatgaactctttgacgatagataagttgataactcgagaaggttttaaggttaagaagaatttgaccattgaagcgaggattggggatccgttaatggtcagcccaatgcatcttgcttcaatgccagattccacagcccaattgacctttcagaatttggatcgcaacaaaatgttcgcgatgacaggaccatatgccagcaaatctggtacaaatctcccttgaaaaggatacgaagaacatcagaagtatctctacaagccagcagctccatttcgaatatgaattttattgtctgctgaaagccgaggcttcttagaagcagaatagcacagcaacaacatggaactgattgggcgctgatgcagaattactacattttgttcatcaacaggaatggcaccactgatgctgacctgaaaaattgacacttacacattcagctctaaaccgcacaagcgaaaatcagatttacaataagcctcttgcttgaactttacagtgatatcacttcacacacacaaacgggaactaatcatcgaactgaggcctttctcgtctttgctgacttgtgcttgataaagagggtagctagcatgcttttagtgctaactggaaccttttggatttcacgccctctaggtttgtccaatgcattaaatgtcgacatatgcatgaaaccaggctggtcctgaaaatgcagacatggtaatttgcttttgttgggtttcataaagaacaaaacaactatatggggataaacccattttactgaatatagacaagtatgatggtaaaatattaacttgtttttaattcatactcctactaagcttattttatattccaattatttacctttgaaccaacatttttcttagcatcaaaactggtgttcccattcggttgcagaggcttgtgcatgggagaagcaggtatgtccttgcctgaaagatcaattatttagatggaacactcaattggcatacgaatatttcaaaatccccctattttacagttaaacgatatgcgcacatccatcatcagatcatggtcatgagacacaacacaatttagcatagtgtttgattacctagaaggtacatggaaccatttgatgcaggtttagacgatatagtatcccctagtctgcacaaaagatgacaagaagatagatcagaagagaatagctccattgcaccttagtaaatgaagaaaggtgcaatttaaacagaactgaacaaaacaactaatgatagtatcttacgtaaatgtatatttctgtgctccagttgtcgaaatgctgttctctgaagacagatgccatgaaagggtcttggctgcagtccaaatatgaaatgttgtttgttggttcatatgaaaagtagcatccataaaatttgcaatctgaacaaaaaggaacaagaaggtccatacctgaaggataaggtttaggttttgaatcctgaccattgtctgtttgcaggcgtgcagcttgagttcttttatgaccggtagctagcttggcaagtaagtataggcaagatttagcatttaattggaaaaaacagtggagaagttcttaattgtatacatccttacatggtaggatatagtgcttatgatgtttaaaagttgttccaccaatcttctgctgcctgaggcctgctctgtcggtgaagatttggcaggtgaggatttgctataaattggaggataggataaactgatattgtcagttaaattgtcatggtttgatcagcacatactgcatgcaaagcagatatagctttacctggtttaagcgtgcaaccttcagctcaaccgtagagacctcagaagcttgctgttcaaacaggtccgttaatttgtatgcaacagtaccaaggtgatcaacagcattgacgacagctcgtacagcataatctttcaggttttccagcaccctatatcagcagaaaagcttcaaattatgaaaatacgatgcactaagaaacaatgctttagaattaccatatggtctttttctaaaataaacattttagaacccatgtttcagaatttcttctacattaacaaatatgagaaaagcccctaatagtaacatgtgggctgcaaaattccaaattgaatatactagtagtatacagagatggtggttagataaatccaaaattccagagaatacagacatcctatattcttctttaggcagtagagtttgttttgttgtcacatctcaacatcaagtccccttgccacacatgttgctgtcctccttcacttattaggtggttttagcctccaatacctatcatataattaactgctagcacacgatgtaccaacgattcgattcaattcaattcaacccctaaaacaaaagacgaaagtagagctagataccatgcaagatgcaaatttaccactgattttatgattgtaaattaaaatggtaagtggtaacaaaatgcaccaaagagctaaaacctcactcacatctgcttctgctcgctgtggaggtaggatttctcgcagtactcggaggcggagtagagctgaggccgcaggttcttgagctcctgcacacgcacagacgcaaggcatcaccaccaccacaaaccaagaaccggccggatccatggacaaaattaagcgaaggaaacgagacattcttgtgagcgcgagggatctgggatggaatgcgggcacgcacctgcagtgccttgacgaagctcttgctccgctccatggaggcctcgtcgacggtggtgggccccaccccggcgacccccgcccacccgcccgccgccgggctcggccgcaacggctgcattgtcgcaccaccgttcttgcctcctctccggttggcggcggccggcgagtgggatgggcaagaagaagaagcggggaggagaagctaagctaagctaagcttagctcagtggaggagagtgagagtgaggacgaagcgacactactcctactaataaattgctcgagcaagtgtgcaattgtatataccacgcagcaagaaagcacgggtctctcttggcgcgtcggaggaggaggtgatggcgacggtagctagcgccggtgaagaagcgatctcggtgggattggctttagcaaatggaggtagcaatctcacgggggaatcatcatcattcatcatcagagctagcttaattggtttgtttgttggtttggtttggttggtcgatcgctttgttttctacctgcaactgtactgagcagtagtggatctttgctgtcctaacctcattgtccttattacc

SEQ ID NO: 21163 - DNA, 7459 bp, Oryza sativa
aattcctgcagcccattgtcctctgtttcttgtggatattggtcgagcattgcgacgtttactctccgagggtcgatgaatccagtatcgaaaaccctccgccgtcaggccctttgaatctccattctacaacgataaaatggagtatattattttctatagtctacttatatacaaggacctaattaattaaaggagacgtatagtaagaaatctaactgaacgatatacttacaaaatccagcaactcataatagagacgtcgagggcgtccagctggtatagttcggagattcccttgaaattgatccagagaatgtcatctccttgcaagaagtccgtgtccctgatcctcgctccgatcatctctctaccagtggcgctcatctccatgtacagctgatggaacttgtacatttgtgtgggtagggactgcagcagctcaggcttgacaagcggtttaccgagttcgtacatgtatttcacttccaccttttcgattggtgcgactcctagcaattgatccgtattagaccggtgtcagtaataaatttttctatcgtcatttctttaccggtcaccaacggctcgatctcctggtttggttgctctccaagctgagggactggtttggactttccagaagatgctttcttcagcgttcgctcatagtctgatagcttgattgcctgcttgacagatgcagacatacccctgaagaagtttctgacactagggtctataggaatcttcttttctggacttcgaggcttgaattgtctctggacttctgatgcaacgtaagcgtcaagctcctcttgcgtacaatcgtaccccgggtccttgttcttggcggcgtcaactttcgccttcttcgttgcccttgtgtgggcaggcggtggagctggggggcccttgactttgaaggtgccggaagaggagcttgcggaggagtaggtgtaggagcccgaggaggagtcggtgcaggatcctgaggaggagtcggtgctggagcctgacgtggagatggtgctggcagatcatgaggaggagacagtgcaggatcctgatgaggagatggctgagccggaggagatggtgcactatacaccgcttgtcgcccagggaggatgatgtaccgcctgcaccatagaataatggcatggcttgtgtctcgtagatgcgtctcaccgtctccttcatggtaatccagctcgaggtcctcgtacgcgccttcgaccaactcaacttcgaccttcgagtatcctgctggaatcggcctgcagtggtaagtacctgaagggtccgttgggatggccatgcccgacgccaccttcatgttgtgagagattatttattagtaatcaacatatataagcagcaactagcggaatggctaaatctaaaatatataaactacgagcttacctttattgataagttcttgtaaggaatatgcagctcacatggtgtccgctgagtgatgtcatcaacgggacaggtcgattcgtcctgtgtttgcatggcgtccatgctctgtgatcctacctgccccgttgaggcgcagctgctacggtttcctgacgggctcaccattgcaggaggaatggtcggctggggatcatgggaccgatgtgcggccatgcgttcatcaaccttccttgccacctcctcttgcatgctgagttcgtagctcgatacccggaactctagatctgcaatcttcgcctcggtatctctcttactcctcatccgattcctgtacgtgtggatgtcctccttgaaaccaatcttccaagaaatcacccctttccctcgtgttcgtcctggatgctctggagtctgcagggcgagtgtcagctcgtccctatctctgtccggtcagaacgtgccctgagaggaggcttccactgcatctgttagtcgtcgcgcagcctctcgtatctgatcgccgaagaccagtgagccatcagctgggttaagcgttccaccgtgagcatagtaccagaacttcgatcgttccggccaattggcggttgccggttcgatacccctctcaatcaagctagcctccatctcctcccacttcggcatcgcgacgctatagcctcctaaccccaagtggtgatggtacttcttcttggcggcattttctttgtttctttccatcatcgcctgcccttgttcacctgtcttatatgcaacgaactcgtcccagtgatcccttagctttgggaatgtgtcgaagttcggtgtctgccccttcaggatatatttcttgtacagctctcccttgaagctctgaaactgttctgccattttcttcagagtccaccttttcactttgtcctctgtacccgcgggaagggtgaatgtctcgagcattgtggtccacagcatctctttctccgaatctgggacaaagctctcatgatctccacgtgcccttgttcttcgccagtacaccgtactgataggcacgttatcccgcacaacccaaccgctgtgacgtacatagttcttggcggcttcggccggggcactaggacgtccatcttcttccacttctgttatgatgtgccgaccctcaagcttcttcgctgcacctcgttgcccgtgtaccctcttctgtccaacggagggttgactaccactagcctcctcctcctggttcccctccacatccctttccacgtgcccctgctggttcccctccgcatccctctccacgttcccttcctcgttcaagtactggtttggatcctcgttcccctcttcttcattccagtactggctgcttccctccgcgattgtatcgtacaatatctgttcctcatcgcggtcagccatctgttgatacaagaaacatctgctaagtcacgagacatttatgttttaacaatctaagtcatgtatgctaagtgtaaatgtcgtacattagaaccctacacaaccttacgtgctaagtctaattacaaatcgtgatataagctaagtctaggtgacgtatattatacaaccctagctagtaaataattatatactaagtctaattacaaataaaataatcttatattaaaactcaaataatattacatgctaagactaaaatagtcatgtatgctaagtgtttcatgtgtatatgctaagtctaattaagactacaatagtcaattgctaggagtcgcacaaattccgtagtcaataattacatactaagtctaatttgcaataaaataatcttatattaaaactcaaataatattagaacactacacaatcttatatgctaagtctaattacaagtctaatattcttaattgcattacaaatataacaatcatttatattattacgtcacttgcctgcacgaattccttctagggctagctcttccactccggcttgagggacgactccgacaacacgtcttttctgcaagatacaaaaaatatgtattaggataaatgcgaagtaacatatatatatatatattgcatttcacgttcacgttcgttcgctcgttctcattcacgttcgttctcgttcacgttcgttgtcgttctcgttcacgttaattcgttcgatcgttctcgttctcgctcttgttcgttcgatcgttctcgttctcgttcacgttctcgcggcaacgtacgttgacgtgttcgttctcgctctcgttcgtttgatcgttctcgttctcgttcacgttctcgcggtaacgtacgttgacgtgttcgttctcgttcatgtgttcgttaacggtggtgtggcggcatcgggccggcgcttggcgcggcggcggcgtggcgacggcggcggcggcggcgacggcgtggcgacggcggcggcagcggcgtggcgttgcatgcggcggcggcattacgcggcggcgaaggcggcggcgtggcgtggtggcggcggcgttgcacgtgcggcggcaaaggtggcggcgtggcatgccggcggcggcgtggcgcggcgtcagcgtggcgcggcgtcgtcgtggcgaggcgtcgtcgtggcgtggcgtctcgtggcgggcggcgcgatagagagagagatcgagatcggagatcgatgaagggagaggcggcggcggctcttaccccagagatgcggcggcggcggaggaggcggaggcggcggcgaggacgacgagctcgagacgacggcgagatacggcggcgtcggcgcggggatttgccctaggcagtggcggcgaaggagagaggccgagagagatcgatcggccgaaaacgttaagtgttggtggagaagacgagggcgcgcatcgggaatatatatagccctcgatctttactcccggttgatgagaataaccaggagtaaaaaaaagatctttaatcccggttgttctcaacaaccgggactaaagatatctttagtcccggttgtcctcatcaaccgggagtaaagatgttttcccgctatttccaaattattttttaacccggttagggttaagaaccgggactaaagattatagcactgcatattattttcgcttacatatgtgtttctaaaatagaagttaatgcattaacattatttaaagtacaaagattaatgacaattacttcgaaaaattatttttgtctgtaataaattaagtggataaatcgtaataagcaaatatatgacttaaaattaataaaaattccaataatcatacatacttagcatatgaatgatattattaaattggtaaaaactctaattaagatatgtatgtacatactgcatgatttaaaattaataaaaattgtaatcatcatatatacttagcgtaggaattatattaaattaaatgttaaaaactctaattaacatatgtaaatgccacatgcatgatttagaccttttaaaaattcgaatagtcatatataagtagcatatgaaagatagtaaattaaattgtgaaaaactctaattaacatctgtaaatgccacatgaatgatttaatacttttaaaaattctctagtcagttataattagcatatgaatgatagtcaattaaatgtagcatatgaatgatagtaaattatgccatacatcaattgatttatatggataatcaatacatccaaaataatttacatcgtgtacacaataattacggcattacatcggcggtgacggttgaccgcacgtactttctcctcactattgttccctccttgtgatcgctgcgtgagtaaggggtgtcttcatttgataggaggatgctagggtcaatcgtcaccgtgaaagggggttgcccatccaactgatcgtaatcctcgtcagtcttgtcctcaacttcgacgatttttcttttgcctgggagaaccacttgacgcttaggctcgtgaggccctctgcccttctttcctttgctagacatgtccttcacaaaaaagacttgcgttacatcattggcaaggacaaaaggttcgtccgagtatccaaccttgttaaggtcaacagttgtcatacaactatcatcaatcattacgcctccaccagtcaacctaacccattggcaccggaacagaggaaccttgagaggaccatagtcaagttcccatatatcctcgatggcaccgtaatacgtggcaattgttccatcgtgtcccatggcatcgacacgaacagcgctgttttggttcgtgctcttcatgtcttgagctctcgtgtagaatgtgtacccattgatctcatatccctggaatgtcgcgatcgacccagacggtcccctcgccaggaaggcaagttgttggttgatcgactcgttacccatgagatgttgtcgtagccatgtgggggaaagtatcaatgtgatgccgtgtaatccatgcatcggacttaccgatgttcctggcgcgaactagagccaagtgctcctcgatgtaaggagctaccaatgaagagtgttgcagaacagtgaaatgggctttacggaataaattgttgtctaccgtcattattgctttccttccgagagttccctttccccgtagtctcccttcatggcgtaattcaggtaccccgattgggcgaaggtcttcgataaattctacgcaaaattcgatgacctcctctgttccataacccttggcgatgcttgcctctggacgagcacggttacgaacatacttcttcagaacgcccatgtacctctcgaaaggaaacatgttgtgtaggtacacaagcccgagaatacggatctctttcacaaggtgacaaagcagatgcgtcattatattgaaaaatgaaggtggaaatatcaactcaaaactgacgagacattgcaccacttcattctgaagggcttctaatctatccggatcgatgaccttctgcgaaattgcgttcatgaatgcacatagctttgttattgttgcccggacattgtctagaaggataccccttattacaactggtagcagttgtgtcatcaacacgtgacagtcatgagactttaggtttgtgaacttcttctccttcatgcttattattcgcttgatattcgtggagtatccagacggtacctttatgctctccaagcattcaaacattctttccttctctgccttgctaagagtgtagctggctggactcaagtaatggcttcatttctcctttggttccgggtgaaggtcgccgcattgttccatatgcttcagatcattacgtgcttccagtgtatctttcgactttccgtatacacctaggaagccaagaaggtttacacaaaggttcttagtgaggtgcatcacgtcgattgcgtggcgtacgtccaagaattcccaatatggtaactcccaaaatatagagttctttttccacatcgccgcgtgaccatcttcgctctctataggctggcttccaggcccctttccgaacactactttaagatctttaaccatagcaaacactgttttcccactgcgatgtttaggcttcgtatggtggtcggccttatgttcgaagtgcttgcctttcttccataccgggtggtttgctgcaaggaatcgacgatgacccatgtatacaaccttcctacagtgcttaagatacgtactttctgtttcatccatacagtgagtgcaagcctcgtaccccttgttggactgtccggataggttgctaagtgcaggccaatcgttgatggttacgaacagcagcgctcgtaggttaaattcctcctgtttgtcctcgtcccacatggggacaccttccttcttccacaactgtttaagatcttcgaccagtggtcttaggtacacatcgatgtcgttaccaggttgcttggggccttgaataataatcggcatcattatgtactttctcttcatgcatagccagggggaggttgtagatacacatcgtaacgggccaagtgctatggccgttgctcatctctccaaaaggattcatgccatccgtactca

SEQ ID NO: 21164 - DNA, 16731 bp, Oryza sativa
  unsure (1)..(16731): unsure at all n locations
cgatttatacatacttgtaagcagtcagccgcaagaaggatgctcccgatggtaataccggcgttgatggcagtttgcacggtgaccaccaagtagaacacccatccagatcctgccaagagaagagacaaaattgaattaatgacactcttaatgatgaggtaattaatctctacatttagaagaagatgaggtgcatgcggaccgaggacgtcggcggcgagctcgcggaagcggatgtggcggcggccgtgggcctcgcagtggtcgaggaccctggacatgaggtagtaggcgtagaaggtgacggcggcgacggcggtgagcgccaccaggccgagcgcccaccccatcccccgcagcgcgtacgggagcgtcagcaccgtcggccccacgatcgccgtcgtcaggtggaacccggcgtgccaccacttccctggaatcataattcaccaacaattaatccaagatatatactcctccggccatatgtgatgtgatcaggtagtagctaggttaattaggtgacctttggactcgagcacgaaggcggcgccggcgtcggcggcgggcttgatgccaaggcggcgagcgccggacgcggcctcgacgtcgaacaccgcggcggagggcggcgtcggcatggtgttcatcaccggagagggagagcggagcagagggctgcctccggtgccggccatggatctacgtcgaggtcaagaagaagctcgcatctcgctgaacacacttacaccttacagccttacaggggtatggtatgagatgagacgagaattgaattgtgtgtgcgttttgatttgagtttcttgtggattacaactacaactacaaccaggacagcgcgcgtgaggaagagaagtaggcctgaaaccgttgacctttttctttttgacaagaagattattgaaggagtcttgactgtatcccactcccaccccacggcgctggagacacgtaccactcaaaccgtgacgcttcagtttctcatcaagccaactaaccgctcatgcgttgcaggagacccaaggcagatacagatattatctactaacagcaggcagcagcacacatgtagattataccaacaacatggaacctatactgacaataaggatttctaaactaaacaccactagcctgttttgtactccctccgtttcaaaatgtttgacaccgttgactttttagcacatgtttaaccgttcgtcttattaaaaaaaattgtgaaatatgtaaaactatatgtgtacatgaaagtatatttaacaatgaatcaaatgatatgaaaataataaataattacttaaattttttgaataagacaaatggtcaaatacgtaataaaaagttaacggtgtcaaacattttgaaacggagggagtagtacattagataaatgaagttgaatatcactgtatttatctactgtgggtaaagtacaggccaatggggaaactataataaacttttgaggggatgtcccctagttatatttgcatgccacttaaacaattatgaaaaaaattaaaaaaattgagaagatgtattaatatgtgatatatcacttcataaacatgcaactttaaattcaactcctacatatcgtaacaaaaaaaacaaattaaattataactagttaacgtatatttatagtcaaatttattcttttttcgttttgacatgtagaaattaaattttaaattgcatgtttgtagagtgatatatcatatgttaatacattttctgaatgtttttaaattttttaataactatttaagtgttaaataatatggaagtagagattttaaaatccactctccaggcaaacgctacaatgcagcccaacccaagatattcagagagattatctataatcatcttgcttagcgtgcaggttgtactaacagcggcacacatgtagagatgtatagtacgtagtataaacgcaacataacacaacctgtactgacaagaacagtactaaaataacactagctctgggatcaccacttgcttgttttgtacagtacacaaatgcagcgataataaactgttcgttagttcgtacagactagagggatcagtggggcgtgctgaaaaaactgtaggaaatatacaggtcaacgctgcaatgcccaacgagcaacgatacacatgcaagatgcatggtactgtacgaaaaatgcctccagactccagccaactgaagatggaattgttctggcagataagcagctgtgcaatgtgcatatataatgcgaatttccatattactcctcccatcccaaaatataaatatccaagtacttttggctttccatatgacatagtagaagtttgttcttaaaaaaaaaatctactaacagatcctttacaatgtataacatgttgatttcagccccccaaggtgttcatgtgccaaaacactgttgacaaggaaaatacatttatcgattaaaaaaagcatattaataaaaactggaatcacaacagagtagtacgttattaaatatttcgaaccatgcactggtaagctcatgcatgttttccatgattgagtaatataatggcgcatttggtcagccaaactagagttgagtttcagtataaaaaacaaatgtaatacctttgtaaatgaaacctcaagcccaaatcatcaaacattcacatctgccacctagcaaaaggtggttaagattaaatatttacaactttacatacatgtgtaatataatgtaaaaaggcactggtatagcagacatattacaagcccacaacgatacacacccagaatattgtctatactctattgctctgtatcaacaacatatgcaggggacaggaaacaacatacccagacacatgaggaacttagagctgttcgcatgcttaggtcatatatacctaaagaatgcttcaaatgaagtaatggaatttgtacgacaatttgtcaactttgaatgagtaagtggtaaatatatataaaaaacaggtcgtcttaggtactcgtgtattactgttgctgcacactcaagcttcaagaagtacaatctaaaggcttcttccatgccacaatccaatttaactcccttgacagcttttacgtggaaatgagtttttgcaaagcaagggaacatcatcagagccagagagctaacttttctcttcagggacgtgcatgccaaatccacgttttaacttctcaactctgatcattaaaatttgaaattgttagtgcctggttttaagaaatctgatcaaaacgtagttgctgataaaatttatgttactgagtctaagcgttgacacgggagtaatcattatgaatagaagaaactagtaacacaaaactctcgtaatttcatccaaaggaacgatatgatgagcttgcacaatatcatctgatgatttacttctacgtatacaatagactacaaacaatgaaaatactgaaacaaccacagcaagatgaaaatagctaaaagacaaggttatgcatagagcgctctattctttggagggcaaaagatccgatgcccgtaaattgtggacaatgaagcttggataggacataacgaccaatctagttagtacaaacaaaaccggaaatctaattaaagaaataagaccagacaggttggaagagttgtaactactatgcacgcaagctgaaagtattgatcatgtcatgctctagtgttctatagctaaggtggtgtttggatccaaagactaaactttagtccctgtcaaatcggatgtttggacattaatttggagtattaaacatagactatttacaaaactaattacataaatgagaactaattcgtgtgataaattttttaagtctaattaatccataattagcacatgtttactgtagcatcacataggctataatcatggattaattaggttcaatagagtcgtctcgcgaattagtccagggttatggaatggtttttgtcaatagtctacgtttaatacttctaattagtgtcaaatatccaatgtgacagggactaatccaaacaacccctaaatttcctctggcctgttatgtgagatgcattagcttggcctacatgtgcagagaggcagagactacagaggacttttcgtattctgtgattacagttgacgtgaaaagggaaaaaaaatcatgtacagtcgttggctgcttgttattgggtttttatatntagggtgtgtttagttcacgccaaaattggaagtttgattgaaattggaacaatgtgacggaaaagttggaagtttatgtgtgtagggaagttttgatgtgatggaaaagttggaagtttgaagaaaaagttgagaactaaaccaggccttactttgaaatgatatactcctattcaacaacaaattaactaattctttggcatagatgatacggtgcattggaggccatgatttcaaaacgtgggacacaagaacaacaggtgcaacatgaaaacacactgcaattgactgaattgcctggtattcatgtttgttgatgcctgatttttttttttgttaatctggcaacataaagatctggttgtctttagctttgtcagaagatgctgtgaacctgtgactacactagagctatttgactagggttgtttaacttgaaagatattgctgctagatcctgtccagcctagatcttctgtcccctggcacaacatctttatttatttaaaattttgcatttttctcatgcttttttcagttagtaagctcgggcttttcttctcttattggttatgttgtacagagttgtttcaccagtttggcatgtgttcaatgccttaccaatttaatacatcttaagccatgatctgaaccttctcctggctcttctattcttgttggatcacacactcaactcccaacttcaataattagtcagactctgttcattaggttgttctttaaaatgactagtgtaaggaggccaaaaggtgaaaatattgtgcaagaaatgaatggacactacgtgaccacaaaatactggaaatgctatttcacatggtgttgttcgaactgagctgaagaagaaacttacgtaggagcaagctttccaagctttcgtaattttttgccagttgtttcatcaatcacatttccattgatctcaacagaatatgattttccagatatccgtgggagacctcttcctgcaagcaattcaaagtctttctgatgaagttctctaccattgacaataactcctgtgttcccaccggcacaatttttcggcattggataattaaattcctttataaatggctgcaaaaacaaagctctgtcatgacgtgctaccacaaagttctagagaaagaactacgagaaaaataatcatcttacagggatgatgccactacactcatgtcccatgacaccccaaaatccagcgcggtagtcatacctgaatcacaattagagaatacggaatgttaccttacacggaaattcccaatgccttgtgaatttaagttggtgaagatccaacaaagttgctttggaaagtacattaggtagatgatattcccagagtaatttttactgtactaactttgcattttcctcgtctttgtatactaatcagattaattttaaaactgtagctggtaaaaggcagaccattgaattatggagcttgcatgtcgcaagcatgcagatgtgtgaaaataaattatagttcacactgtaccattacgattaacaataacagaacaaaactaatgttgcacatagttactgaatgccgagacaaagtaagaccgtgataataaattaacagatgttaatacatgaactaggccatgcaagaaattttttgagctactagcatttaatgggagcaatcaacagccaaaaaaaaaaaaaaaactctgcaggacaagaatcttccaggtatctcatcactgtacaaaatgttctagtaatcaactcagggaagtggttgatttggctgagaaaagttatcaaggaaatcaggtacataggttggttaatatgcaattgagaattacacagtcatttaatcaccgctgtgcagtataagtcatcttaattcctactgttaagatagattcttctgaagaataacaccaatctcttttgcctgtagttgtgcgtctcttgatttcaaaggcaaatgataaaaagatgctaaagaaaacaatgacaagtgccaacacggtagatatcaaacgctaagaacatcagtccataacaatttccaaatttatgaagggagaaggtgacttaccaatatgaaccagggccaactggaccagacttcttctcggccttccgtaggacacgttcggagattgaatggccattgattgaaaccttagcactgtccactgattgattgaacaaagaaatgtccttcaaacctttcttcaaaaaaccagcaaaaaactttgaatccccgttcttagtagctgcagactgaacttcgtctagttcagcctcagaagaaacacgagaactagaatttgtgcgctcattaactgatgactcaagcttcgatggcattatggcatgttcagaatttggggagagcaattcactataacaatcatctaagtcatcttgtttgcatatcgtagctatagtttcaacttgaatgacactgttattatcttctttgctgcatttgctatatcgctcagtaatgaattctgattgaaagttgttgtcatcttgtttgattttttcttcatactttttgctcacgtctccatcttcaaggctgctggtatcatcattatcagccgtcagcttgtctatgttacccatgcttccatcatcacaaaagccacttgtactttctttgagcttttgctcatgtctactgctgacagtttcttctccaaatccttctttatgatctttgctgttctgctcatatgtcacgtccgatctttcatccctaacattagcatcaacagaatctgccatgatatttaggctacattccttgcttgtgcgatctccaccactacaatcttttagacgactggaaaatggatcgacacatttgtcctctataactggggcctgtagattgcctgtattaaatgctgaagtttctacttgactgtatgcatctccttgacatagtatatcctttgggatatttgcaagtctggaccttctaacagatactgatagtaactgactgctcctgtttgatccacactctttgtctattctgtcataactagaagtagaagacacagaaatattgtctgcaagatccttgttctgctgccatctctcttgtgcttgcagcttatggaaactagaatttccttcatcctgatgttggtaccacccaaaacttttgttaacctgacgactggaactccccactgtttttgatgcagggaaagatgtcggcgcaaccaaaggatgaattttcacttccttaagcttgaaactaacgatctccgagcacgaaccacaccgaacttgaatctgcttccgagctgtgcatttcccaggaggcagctgcagcagctggttacaagaactgcatacaacgaaaggagcggcgcctctcacaggacgacagaaactctctgccttcttcctgaaaaactctgtcctcctcttcgacaccgagaaatgagagtacaatgacgaagcgacagacctccggtcaagctccgatgagactgatggggacctatcgaacaggtgagacccctgctggcctgcaaagtacctcgtcatgggaatgtgctcctcctgcatcacagctctctggccatgaaggcactgtgcacactggcaggtgctctgatggtgattccccccaagatacccagaattctcccactgcctctccggccattgccggaaccgcccactcggctgcctctcatacctatctctatgcatagaccgatgcagctggtcattcggactgtgcggaaagccagacccgtaccttcccgtgtagcgtgagcggtagtgctccggcccacggcctagcggcggcggctcggcgtgcgaggggcgcagcgaggccgtgcggcggctcatgcggtggcgctcccgcggctggtcggtgatctcgcaggacctggtgatgtggtcccgcagctcgtcgagcttccggagcagctccacggggttctccttgagcgcgccccaatccagcacgccactccggtcgccgccgcattgcccgtaatcgaagggctctggaaccctagcccttctcctgtacttcatctccttcgcctcgctccccatggcgcctcccacgggacgagctttccccccccccccccccccttcgccgaatcgaaaaccctgcggggaaaacttccaatgagtcgctcgaaattcgtagccaccaaacacgaaatgggaagacgccaatgtagatcagagcagcgaagcttctgaatgctacggagaagcggaggaggcggcggtggcggttacctcgaccccaatgttgcggagcacacggcggcggcggagactctacggcgcggggatgcggagaagccaccggcagcggctcgccgatagggctacgcggcgaggaggaggcggtgggacgtggggttcgccattgtggtggatggagtggcggccgcgcgctgcggcggcgagaggaagaagacgagtgggggtgaagtggaaaagagaagcctaaatcggcgggaatccagggactggtttgtaattatcaactttctagggggtttcggcgcgatgtagctttgggtttcagttggggatgacctggctgagacgctgacgaggtgggcccacgtgacagctggtctgatctggctttgactagaaaagagcccccctttcttaacgcgccattgcttgctttatgtcaaacacagtaacagcgtgattagtggctgtgctcaacaacattaatactccaactaaaagtaaccaaaaataataataataatcggcctgtctatctatatatctatctaggtgagtgaggctgcttgtgtatagtttgtttgtaattttaaaatcttttcttttcattagcattcgaaggttcatctcataatttggaacgcataacaaccacatgcttttcgcaaactatgcaggagttagcttgctaaatatcatcctaaggggagttgacagagatcaaataattcgattttaaatctacatgtgttgtacggcgcatttttgcgatataaatttgtgtatcagggggcagccccttgtaagagccgcaataaacagtggttagtgcacgttaacaaatgagctctcgtggacctcatttttttagtgaggtatatatctcatttcttcaacaatactacttgttcttctagctatagtaatatatgagagcatacagtgtgttataatccaagcaatcagtttgtcaacgacaaaccagacgaatatatggacctaaacatgtggcatgttcctgtttctttattagaattttgtcaggttatattccatcagcatttgatcaatatctgacacaagaggctgaacattcattacaggacgttttagccttcaaacacaggcggcattgacaagagcctgaaaaacatgcagtgctacgaaaatgagaaagttcagagagatccaaaactgtactacttgagtatttttttttcttctggcattgatctgtatatctattgagttttggagtacatacataatagttaaacctgaacttacatttttcagatgttgaaacctgaaccaaaattgtataattgggtatatcttcagacagggaactgtaatggctgttgggttctggagtacacaggatagttaagcctgaacttacatttattcagataatgaaacctgaacctgcatgattgtaaatgtttccaaactctaaatgcttgcatgctaattaaatgcaatctagctgtagctgcctaatgcaggatacaattaggcaagctatgtggacaatgaaggttgagattaattagcaaagtaatgaagggagtggggactgaagaaaggctgaaaagtggcgagtcatgtcatgggtgatgagaaaacagcgaagcaatgcacctaactctcgaggtcggaagtggccaaagaagatcgatcaccaaacaaactagttagggggcgccaaccaaccaccgtcaaccacagacactcggacagacagctccaaaagatgcagatgccagtgctgcacatttggccacatgaaagtcgcattcaatttgcttaattaaactagtaatttgcctgtcgaatagcccatgctacaccgacgaccgtcggtcctcttctagttttcagatgagtgtgtcctcttaacaggagaagatttgcagctttttcgtgctgaaaaaacggtacggacagtccggtttgtgcgctgtttgtatccaagaacatgacgaaattagttgaaaaaaaaagtggtatctgaatgaagaataaggatgtgtttgtttctgtccataacattaacattttcttgatctgaaaaaaaaacattagtattttctttcagacatatatgtattgtaagatattcatacgggaccaaatcaagtgtacatgcgattcagatttgtagcatctgtgaaacgactgctctgcaatcatattcgtttcagtgtctccttttctaactgtatccatatatgttcatgcgtgaccaaaattaaaaataaaaaccagacatgcattatatctgtttcactgtttgcctaacagcaaaacagttaggcaaacatcacatgggtagcccactgttagccttccgctgatgggctggaaagtcgaactgaattcacggcccaccccctgaggttggacggggccggaagcccgcgtgtggagatgggccaggccggttacttcctctgttccgagatcaccgcctccaagctcctcacagtcacagccacaagggaattgaagccgccgccgcctcctcgtccttccggccgtgtgctctcacgcagggcgcggcggcggcgatcttctgtgctagcgtggcggcatcgccgttgctttggaggtatgagctcctgtcctcctgtgcctcactttccccttcatatctcttggcttcttcaattttttcccgtgcaaccattcagaatttgtttttgcctaaacattcccatctgtcatagaactgctcctttttctttctttttctttttttggctcaattgctatgcagcgataggccgggcattttcaggactcaacctgggccgaacacgaaacctacaactgggctctgtctgcaggcctaatattacaaacttggaagaaaaaccacacaatttcggcggtgacacggcggcatacatacatcatcatcgatatgtctttaacgcagtggagaattatcacgggcgagcggcacatcaaccgatcaaattatcgatcttgacccatgccatgcaatggcgagcttcacatgtccaacaagcaaaagcagcgaagaaaaggcatccgacgatgcgaccacggagcagaatgctaacaacaacatagcagtatatgcatacggaaggagaaagaaagaaaagaagaaaagcagaggcgaggagcgcctcgcatgtgaaaaaaataactcaccggccgggagatggaatggatccctagctagcttggcggtcgaattcatcgtcctccatcgccgccgccggcagctggctcctctctccgctcccgtgcatgcatcccccatccctttttaattaaagccatctgtctagctagctcattcagaataatcctctttctttctcccatctttttagtttttagctagctttgcaacagctagagagcacagttcagttcagttcagaaattcatattcactgagattagcaaccatgcacacgtacgatgtgtgagcctcccctgcatgtgcccgtcgtgagttcatcaaagcttgatcgatccatcagctgtttcctctgatcgctgatggacaaagaggtagcatacacatgctgcttgttgagtttgaagcaaattaatcttcttctttgacatgcatgcatgttgagttttttttgttattttgtgtgtgttgtgctaattgtgttcaatgatcatgtatgtattcatgtaggtgcagcagagaagccacctggagagatttgcggcgctggacgaggcgccaccgccggcaccggaggagaccgtggtcaccggcggggagatggtggactacatgctgggacagccgccgccaacgacgcccgggccgcagagccaggtgtccttcgacaagctcaccttctccgacgtgctgcagttcgccgacttcggccccaagctcgcgctcaaccagccggcggcgtcggacaacggcggcggtggtggcgacgacggcgacgacgacgacgacagctacttcctcaggttccagtcgctgccgtccctccccgccgttccccctcctcgtggcggcgccgccgccgcgcatcaggtcgttgacgagcaggagggcagcaagcagacggtcgacgccggcggcgtgtccgagagcacgacgctggtgcagcaggctgacggcggcggcggccgtgcggagaaggccggtgagcaggggaagagcgggcggcggaagcgtccccggacggtcaagacgagcgaggaggtggagagccagcggatgacgcacatcgccgtcgagcgcaaccgccgccgccagatgaacgagtaccttcgagtcctccgctcactcatgcccggctcctacgtccaaagggtaacctatatcgctcggcgtcgccatggcatttgatttgatttgcacaagtaagaacacacatgatgatctgaatctgatcgatctttctcgcatgcatttaatttagggagaccaagcatccatcataggtggtgcaatagagttcatacgagagctggagcagctgatccagtgcctggagtcgcagaagcggcggcgcctgtacggcggcgacgcgccagcgccacctgcacggccggtcgccgacggagcagttctgccggcgcccatgcagcagccgccgccggcgacgccgccgttcttccccccgagcatcccgttccccgcgtcgtccggcgccggtgacggtacaggcgccggcgtggccaaggtcgcactggacctcgacgcgagcggcggcggcgaggtgggcggcggggtccgggaggagatggcggagaacaagtcgtgcgtcgcggacatagaggtgagggtggtgggcgtggacgccatgatcaagatcctgtcgcggcggcggccggggcagctgatcaagacggtggcggcactggaggagatgcacatgtccatcctgcacaccaacatcaccaccatcgatcagaccgtcctctactccttcaacgtcaaggtatatataaaaatcaattactattacactctacaatactatcgaattatcatctgaacaaacgaagaactgttacattaatttgctacgcgcgcgcgacagatcgccggcgacgcaagattctcggcggaggacatcgccggtgccgtccaccagatccttagcttcatcgacgtcaactacacgttatgaaatctctctcttcttcaagattgtgaaaaagggggtatatatatatatatgtatatgtatatgtatatatatatatatatatatatatatgtatatgtatatatatatatgtatatgtatatatatatatgtatatatgtatatatgtatatatatatatatgtatatatgtatatatatatgtatatatgtatatatatatatatatatatatatatatatatatatatatatatatatatagatatagacacacacacacactatatttgtgcccagcgagtgggtgtgcttagcttatgtgtgtagactgataactaagtatatgcaatcaacttatttactatatatctgcactgcattatatatatgctggtgttcagtgttcaatgatagtatgtagatcgagatgtacccttaattaattaactataggagttacctaattgaacaagattatttgtaagcttggatgctgcttctgtgtttgtatggggctacagaaataaaatttccattgctctctttagtagtgaatacaatgtcatatatctgattaatgacgccatatatctgattaatgacaatacattagctaagtgtaatattatggagcactagcactgttcggtgatgtagaaaggctagctgtgttaactgttaactcctaaattaactggttgatggattttcatcattcgaggatatatatatatatctgtttgttttgtgcatgtcacttaaaaaattatcaaaaaattgaaaaaatattttgacaagataaatcaatatatatgagatatatcaatccacaaatatgtaagtttaaattcaacctatataattagaaaaaaaaatgattacaaatagtgtgtaatattcgcaatcaggtcttagcatacaatgttggtacatatggaaacagttataaaccatacaatgttagatatactagaaaaaaatacctgtgcgtgcaacgggtgaaggctattttaatcttattattgttatatagtatagttaagataaaattcactgcattaaattcgcttagatatatattttgttagaaaatcatgagctgcaattagaagtccgatcgtcttaaattagcatgcgagttttttaaagagatttcttatacgattctttctgtatttctaaaagcgaacgaacttaaaaaccgactcaaatatggatttgtatttgcaaaagcgaacaaatttaaaaactgactcatacacggatgacgtaccaagtatcggaaaaaacaacttcaattcttataatagtagagatttaccttcacttaaagatatagttcagggaaccagagaatgcaaccagcaacacagaatcaacaacacaccagcagtagaattaacgaactaactcccaactaggtcgtcccattagcgtgggaaggaggagggaggttacgaccgagagagctgagccggggaggaaggaggtggatttttgactagctagaacatgattaacacagttctgttcgcgatggatttttgaaactaccatctccctgttaccagacatgaggtgcttgatcgatttgggagagaaattcgaacacgaaaattggaaactccgatcgacattattctgaaactggatccatctataagtgtaagagcaattttatagttcttgaaaagatatcatgaggtatcattttttttattgtaaatttgatatacctcttggtacctattaggagtactaaattttttatgaggatttttattgtgcatggaaggtaacgtaacttttcccatgatggatatctactgttgatttatagaagggtaaatgaggaaaaacagaaaaagaataacacagacatgtacaatttagtaattcttagccaataatcttttctaacttctctcattaccattatttgttgctcacccatttgattacttcatgtcgatctgccgcttataatcgctatgtctcattgatagatgttccggcgtaaaaaaatcctaaaactaaatcttttcttccctccctgacactaatcgctatgtcttcatgatagttttttattagagcatactctgttattatcttcattcaatccacaaagacaaggacatgtagaattcaatcatatacccttacaagatatttcaccaatacgaactatgaggagttgcataatatttttttaattttgtatttggtgtacataattacttggataaaagttttagtttattttacgaagtccatgtaagattaataatatataagtataatattcactaagtaatctcgattacctatttgaactaattgcctattttcatgcgtagttagttaccgagcttatcttcctagcttgtttgaaataatcagggccttttaatttggagatttgctctggtctaaaaaaataccttgggataccgatacatcacggtatcaaattgttttcgatcgttggattttaaaatctttaatctgggtctggatctcagatcaagttgttaatctgttgcagtaagcaagatgttggtgagaccctgcgtcagaagcatctcaaaggtgcagacatatctttttccttgtgttatttatggtcaagccagaaacaaaagacttcatgcagaggccaaggatggcctcggttgaattatatcatcttgatgtaattgattgagtcttaataaagcttccattattttaaaaaaagaaacaaaagactgcaattatatgatcttaagagcgatccatcaatgtttctgatgattcacttttcctatgtccgtatgtcatctttcacacacttgttagctgaatgattagagattgatatcactgaattcttccgtatctaacatacaaaagaactgaaccatatgatgtttagatgagagtctgaataatactttgcagcacttgttacgggaaacaccacattttctttcctgataacatcaccatactttcactagagctgggccatttacatagattctagatagtcacaaacaggataagaaaatagattattcaagagactaaaccaaacgttttcttccggtggagactacagtaaagctgaaaa

SEQ ID NO: 21165 - DNA, 690 bp, Oryza sativa
ttctctccttccaggaactttgatgcctcctcaacagccaactggaggtctttctcggtgttcttgtcgatgttgatgctcagcactaggcttctgcgacagatgaattgagctcaggtgtggagttgtggaagcgtgctatcttcacgacatctcctagcctgtaccgatatagacctagaacaaaatagaaaaaagaaaaagattttagtgtttcttaaacatcaccgtaataagtaaactttctgtgtcctaaaacaaaataattgtatgttagccagagatattaaagaataaaaatgttattggtgagtctggcatggttggcatacacaaaaagaaacatatatcatctgatagagttttaagataatcataatgagtaagcagcaaagagttcaaggagtggaccacaaacattcacaataattactcccccatgtgcttaataatattgatgtatacattgcaaccgtgtgatttttatgttttttacataataaggagctcttgtcaaaaagaggtttaagattgaaggggcaagactaataaatatttcttttttgaaataatatgtcacacaaacttatctagttatttctgataaatcccgttggtatcatgtctgaccagataacagcaccagaagcagaactagggatggctgccccttgctttttgtagaatttt

SEQ ID NO: 21166 - DNA, 665 bp, Oryza sativa
tgaaatttgtcaccttattatgcttatcgtttactagtttatgataataaatgttcatagtctggcttcttctgtggctttcatacagttccggtacaacacacggaaagcccaagttcattccattcaatgatgaattacttgagaccacacttaaatataccgtacatcttacgcgtttaggaaccggtaaggatctctgatttattattatttatgctcaagtaatgctgctttttctgaatgttcaacaaactttgatgatcaggttcaacatgagttattgtttttatacactgttttgcatgctattaacttgttgcttctttgtgtattttttactctgcatcccagaatattagaataaccttctgttttgtgtttacagtgaataccctattggccaaggaaaagcactgcagtttgtttatggtagcaagcaagtcataacgaaaggtggcattcttgcaacaactgcgacaacaaacttgtataggagacagcgctataaggaaggcatgaaggatatccagtcgcagtgttgcagtcctgatgaagttatctttggccctgatttccaccaatccttgtactgtcacttgctgtgtgggttaatatactcagacgaggtccattcagtgttctcaacatttgctcacagccta

SEQ ID NO: 21167 - DNA, 17275 bp, Oryza sativa
cagaattcggtagtagaagaaaaggtaattttggaggctctatgaatttaccaatcaacaatgttcatttgggaatcttgtgtccagataacttcagggcctcatcgtttggcatattcatatgcttatcagctaaaatttgaattttcaacattagatttggagctgattttagggttttttcatcgaagtttatttttcagcctttgcttttagatcgctaagaacacatatataaaagttttatttacaaattgattttcgtttgcaaatatgccatgccaaacgatgaggctgtcaatcttttaagacgaacatgattttctggcaggttcttatccaaaaaattcaggacgcaatctaaaagaaaataacattgtatacttaactggtttagagttgacacttacacactactgctaaaaatgcaaatactcccttctcagtatcatcattgcaagctagtttgaggagattaggccctgattgaagttactaacatgtctatcactctttcaagcacacaagttagctacatgcatttgtactttcaaggaaggagccaaccaatttaaattaccaatccaattgctctacagttggatttcaagcatggtttggattgtagtaacagatagagcatgcattaagtgggggtaccttgttgttctttagggcagcagatgcatcagagttgatgaggcgccggaggaggggtccgtgctgaaaccctaccggtgaagccgtcgcacccagacccggagacggcgaggccgccaccgccgccgagaacgcgcggcgcagcgctacccgtgccgccatcgccgtccaactccaacacccgctgcttctattcttcttcctcctttttttttcctttgggaattgggacgcttccttccttcgtaaggctctccgcgtacgggccgccataccaggttcgggccttcccctcgagttcaagcccagcccgaaagtcgaggaacaaaaaggatggcagaattcaatccaaactctgaaggaataagtctatttttcctccctccctctgttgccctcggtcaaactgtatccctccttcaacttcaatttgaaccctaataaattttagtaggataacaaacaacatgatcttaccaataacaacctatcaacatttgatagtttcagaactttcctcataaaaacactaccattttttttagattacacggcagacgcacacgcgcacacacaccactacacatgcaacaccactcaacacctccacgaatgcgtcacctaacacattctctaagagatggaaaccagcggcacatccctgatctcactaaatacatccaaagttattaaaatttggcaatggtaaaacctcccaaaatctagcattctgactttcatcttgaatgtaagttgtaatgctctgttcgggagtgagggttacgaaccctcactctccgcacgcaaaacgaaacagcacgtgattaattaagttttagctatttttttaaaaaaaatagattatatgatttttttaaaacaactttcgtatataaatttttttaaaaaaacgcaccgtttagcagtttgaaaagcgtgcgcgcggacgaggagttgggaactactctaacgaacggtataaagtaaagttaagtaaacgtggtggaattgctgctaattaatttggttttttgttcacctttaggcactccgagaacgaaaggaacgtgcctcagtttttgaggacccttcagattgatgccagagcaccgtcatgacaaactcaagtgtgtgaagatactcaatttctcgtctgcaaagagtttggttgagctaacatgtcacattgttgaatcggcgacatcgctcgagtgtcttacgctggacacaacgtcaggttttcctagtagatgttcagtggacaagctgggtaaatgcctcttgttgcgcagagaggtacccgtggaagctcatagagcactggaggctgtcaaaacgttcatcaggttgaaagttccttccaaagttgagttcaacgtcttggagccttgcagccggtgccatgctgctgttgagtggcctttagatgtcaaaaatgtgcctgtggttctaccaaatgattagttcattattgctagtgtcatgttacaagttttgtgttattttagccgtgcatttgtcccgaaactatatatcagccctgtctactgttgaggtttgtaatatgacatggatttagaacatgttacctagtgtaatttcatcttttgatattctctattttctgtgtttgaacgattgttgatttttcattcatcacaatacttatttcaagagagcgtaatctattttctggcactctttattttatgcactgaacaaaaaaaaagagagagtgaaatgtaatgcaaacacgcaggtgtgtaatgtgttacagtttgtgaaaaatgtgcgaaagataattcatctccatacatttcgttttgtttagttttgcggtgcaagaagtagctgaacattatttttagtgtttggtttgctgatttgaagcggtattcgtttatattgttaacgtttcttgatgttttttaagtttttgaagaatcgatgtttggttgctagtatgggatttctgaataatttatagccataggctgtgtttagttccattcacacttccaaaaattctgtcacatcaaatgcttggacaatatatggatcattaaatgtggataaaaaaatcaattgcacagtttacatgtaaattacgagacgaatcttttgagcataattacgccataatttaacaatgtggtgcttcagtaaaacatttgctaatgacagattaattaggcttaatatattcatatcgcagtttacaggcttaatctgtaatttattttgttattagtctacatttaatactttaaatatgtgtctgtatacttaaaaaaatgaaaatgaactaaacacggccatactttatcataactttaacaagtcgatttttttagaaactttaacgattagacttgagcaacctgaaaataactagattgagatggctaaaatgacacatgtttctttacgtacggcaagttgagacgacaagacgattattattcctgcaatttaaactaaataattttcgtgtggtgtagatgaatatagccatgcttagctaatccttaatttctccttagagagaaaagcacggcaaattaatatccatatccatagatagatagaagaagaatcgaggaggagaaggaggaggatggagcagctccggcaggtcggcgaggccatcggcggcgtcaacgccctcatggccttccacgacgacctccgctgcatcaaccctcgccaatgcgccctcctcgcccacgcctacgccctcgccttccgcgccgtcgccggcgagctccgcgcccgcctccgcttccacgaccgcctcaccaaatggaagcccctcgacgatcccctccgcgagctccaccgcgtcgtccgcgacggcgaggcctacatccgccactgcctcctcctcgacccggcccactggtgggcgcgcgccgccgccgccacgcacggcacggaatgcgtcgagcaccacctccacaacctcctttggtgcgtctccgtcgtcgtcgaggcggtcgagaacgtcggcgaggtcaccggctccgaccccgacgagctcgcccggcggcggctggcgctggccagggactacgacaaggacctgctcgatccaaagctcttccgggagaggctcggcgagacgttcctcgccacgcgtgagctcgccgcccggatggacatggcgtggaaggaggacaggtggctgctgtcccagcttctcgacgagaggaagggcccgacatcgtcgccggagccgccattgacgcggcaggagcaccggctcgccgacctcctcgccgcgccgcgcgggaagctgcacccggcgagcgtgctcctgatgagcgacttccacatgcggaggcgcctcggggggaacgggaacctcaaggaggtgcagtggttgggggaggcgttcgctgtgaagcacgtcgtcggcgtcgacgccgaggcggcggccgcggaggtggcggcgctggcgtcggtgtcgccgcacccgaacgtggcgcactgccgctactgcttccacgacgaggagaagagggagctgtacatggtgatggaccagctgatgagcaaggacctcggcagctacgtcaaggaggtgaactccgccaagcgccgggcgccgctcccgctcgtcgtcgtcgtcgacaccatgctgcagatcgcgtgcggcatggcgcacctgcactccaacaagatgtaccacggcaacctcaacccatccaacgtgatcgtcaagccgcgccatggcgacgcctacctgcatgtcaaggtcgccggcttcgtctccggctccggcacggcgaacgcggccaacccatgcatctggtgcgcgccggaggtggtggggaacgaggcggcggcgacggagaagggcgacgtgtacagcttcgggatgatctgcttcgagctgatcaccgggaagatcccgttcgaggacaaccacctgcagggggagaacatgagcaagaacatccgcgccggcgagcggccgctgttcccgttccagtcgcccaagtacctgaccagcctgacgcggcggtgctggcacggcgaggcggcgcagcggccgccgttccactccatctgccgcgtgctccgctacgtgaagcgcttcctggtgatgaataacccggagcaggcggcggcggacgcggctggagccgggccggcggtggactacctggacatggaggcgcagctgctgaggaggttcccggagtgggaggggaacggtgtcgccgacgtgccgttcgagatgtacgcgtacagggtgatggagagggacaagatgagcaacgcgtgcagggacaggagctccgactccggcagcgacggcaactcgctgtggggagatgacagcgccagcggcgggtccagcacgacggcgacggacgcgtcggcgtcgagccggccgctgcttgaccggagcggcagcacgaggtcgtcgccgccgcgcaaggtggccatcgccgccgccaaggcaggcaagtgtcgcagcggcattgttactcgtctaaagccttcctccaagattacagctagctccatgtccgtgacgtgtgcagggccgccgcagaagtcgaggtcgatgggcacggtgaggccgccgccggtcgtggcccgccgaacgccgaggattaagtccgacggccacctcaatagggcggcaattccgcctacccgacggcgtaaatccggcgggaacgcttcagactcggagttagcttagcaaaatgttgggtagccttctttctcatatgatgagaggttttcacttgtttcagaaatacagtatcaaaacgtcaacaatgaaaaaaatttcactcttgtaaataataagcaaacgaatggatggatgtaatgtaatactacagatacttcaggaatgggaaaaggaaatgctggtataaaacgcaccaacattactcggtttaagtagagtatttatcagcagaaacaatcttagacaaagagaagaaaatgatgaaaatcaactattagcagcacacagcatactgcatgagttttcaatctcaatacaccatcacgactgaatagactttatgagttaggcaaatgcttcatgctttacagccaacttattaatttttcccacgggtccagcaacaattaggatctggaaacagtagtaggatataccaacatgggctgagagggccttatgctgaatgggagcctcagtgctatgatccttctacctgcccttcctacaaaaacagaactcaccaccctacaaaaatagcagttgataatgaccagcactaactccaatttcttcagtctgatatcctcatctctactcctagaactttttgcacaaactcgtatgtcacgaatgcaatagcgatagaaggcaccacctgatgaagaggcaagcaaaggtcagcatgtcataaacaagcactacgatgatgatccattaaggttgcaaatatttgaatttttcgtaggaaacattaccttcactgaattgggcacaagacccttgtacaaagcaccaacaccttcatagcgaacagttttcctgaatgcatcgatcataccattgtactggagcgcctctttgccttctccagtaacaatagatgctgcattattccaaccaaccatctgcattctcctcctgatgacatcaagagggtaagcaacagtctggcctatggttccagccacagctccacatccaagccttgtaactacatgcaactcattgtccttgccaagatcatatggatttgtctgaagcagccagtccttcagagactcgtacacagcaaagttgaggccaacatacggaacctgcaagaagatgacaaagataatgtggaaagcacttgtcagcaaggcactaacgaggcaaagctgttaactaattaaagaagagacctaccactccgataacagatggaagccaccctctgtatagagcacggaagccttcttcacggtatactgaacccaatgcatgaaacataccacggtactgataaggagacttttccgtctgcatatatgacatttagaggtcaatagacagaatatgaaacagaagtagattgagttatgctgtgttgacgttgttgatacattacctgcacggtaatcctacccctaaccatatccatcgggtaagtagcagacatggctatgataccagcacaagcaccagctccaaggcgcaatagtggactaagctgagcatcctctgtacagcataggaacatgtcagtgctgaatccagaattttctgttatcaactttatataatacatcaacaagaatataaattctcttgttcaattgaagcagaacattcaagaaatctatttgtacagaaaaagacatgaacatcaggaacccttccagtcaaaaaaaaaacatcaggaactctgctccccagcatttaaattgttaatttacatttttagaacaatactatacataaggaacattggatattgtgtaagctctaagatccgtcacaggctcgcagcatgtccagcagtgttgcacacgttgtcatattactgacaactctacagcatacaaaatgatttggactcagtgtgcatatacagtgagcacggactgagataacgagaacagacactggagataacgtgcgctcagagtattgcactacttgctttgtactactctttggaggtgaggtattcaatctttcaaagttgctaatggattccagtttggtaggtgattcagttacataagcctgtcctctaatagggatttaaaaagtaaaaggcagactttgttttcaagttcaagcggatgaccaacaacttttcttgtgtgctttatcgtcctaaagcaggactacaaaggtcgctagcagaaacaacaaataattagctgtacaaggaagactttgtttccaagttcaagctggtgagcaacagcttttcttgcgctcatcacttcatatcaggactaataaggtttctagcagaaataacacatgatttagctgtactgggccatctagacgaatgaaggtttttgacttattatacaaggcctcacaatcttgaaaacgatcataatatatattgaaactaaaaactgaacaagagatgggcaagctgagtataaaaagtctacaattgtatttttcctatagataaacggaaaaaaccgtagagcagtcatgagactcattacgtagtcaacaaccaaaggtctgcaataacaacatggtgtgtaaacactttcaaaataactaagatgcatacacaggaaaactaatgtgtagtatggtaataacggagagaagcataccattccctgtttgttgccgataaagccataaaattccactgcataaaataacaaagaaggcaagaatacaattactagtgctttcatgaaacaaaaccatattaacagtagagtaaaaaggaaatgcttctgaccaagatcaggtcaaagaagactcatcatgcaacagagaaaaggtctgcaaagtgcaaaggacaaatagcaagtaggtggcaagagagcaagcagtaatgtaggatgacagtaattggaaacaataacaaaccttgatgcttgctcatagctaaaaaacttcacggcagaatttggaacaattctggcacaattggtaccattgcccttaaaaagtccacggagaccctctgttctccatatgtacttaagaccttgaattgtaccgttgtacttgatactgtgagggttttggacctgcattaggaaagataacacgaatcaggtgttagaaccaactcatacaattgcccacacatttccacgcaaagtacttgtacaaatttacaatattaacaagaactggactagggtttagcaccaagtgcagtgtctgtacttcaactattaatacaaatggctatatatatgtagtgaaagaggttatgtttcaagcaagctccgcaaagtagacaacaatagcatgccaccagataagaaatgcaacagcaatgaaaatatcacctgaagcagaatcttcattcgttcgagcggagcaacagcagtacgtgatctgttcaacaaaaaaagtaaataaatattataagcataattgtgtagttagttagaaacgattggtccaagtagattgtcatttgctggtcaagctcgacaaaatgcaccagaatggataacgagaaaagaaaacctgcaccaggtaaacattctagttgatccgtgtgttttgctcaaacataaaataaataatttctgcgtggacttcagctgactataacaacacctgatagcaacatttttagcccaagaataaaacaagttgcaatactcttaaaccgatcttatatcagatgacataattatgcatataattgattattgttcagctttagatgcaagtgcatgacattataaagaacaacatactccatgaaacctaaattattaaaccataaaggtgaaaactaattggagtgcgacacaaacatgtaaagggtctgatgcataaagtgagaaatgactcttatttagaggaattagacagctattagtgaaaccaaactgagatattgaaatgtccaggccagccgcccagatgatttgtcgtaaaactataagataataacagacaagataaaggctgaaaatttaatagagccataggatgaaaaagccaacaccaccttgtcagacacaatatattgctagggtgttggtgtacttatccagataatatattttgcattgaatacaataattcaagtggaacttggttagatcacaggcaaaccgaaccaacaagacggaaattttaatccaccagatggccaggctataccatgacaacgagttggaccgtaaatgcattcgtccacatggcccagtgaaccgaatcaactaacgagtcaacgaaacgagatctggttacctcgttagggtttaagcgtggcgaattcatcataagagtccatagatcacacatctccggaacagacgttcatgcaaaaacttataaccgcacacacacaacatagccgaaacaaatcgcgacgaggaattaaaaaaatggtaggacacgagaaccacaaatccatcaaggatcaaacgcgaatctaaaggaaaccactgaatctaatccgggagccgcgcagagagaattcaacacggagacgatgagacgcgggcatggagaagaacaggggggatagatagatagatagagagagaaagagtgagggaaactcacactccaccggcgacgccaccggcgaagagagacttgcagatggagagcacctggtaaccaggccccttgaccccctcccgcgcgagcttggcctcctccgccaggttgacgatggtggtgaccgcggtgtcccccctgctcttccccaccacgtcctccgatgccatgtccacccggcccgcaccgcaccggatcgcccgctcgcctcgccgacgagatcagcccccgcgcccgtctcctcctctcggcctcgggtttttgcggcggcggcggcggcggcggcgggaggaggagaggaggggagaggtgtgcgtgcgtgcggcggggagaggcgactggttgctaattaacctatttcgttttttgcttttgtcacaaaaataatatataatgataataatattgctgcgcgcacgcggggaacagctggtccatcactggctgcgggtgggcccgaggagggagtgggacccacatggcggtgactcagtacactgtggcgctgtaggtttaggggcgccgccggggggttgcgatctcgccgtccgtgcttatctccctccgccccccgctgcctcgggatggacgaacggggcccacctgtcattgacacagagagagagagagagagaggaggggagaggcttaacggaaacctagatccgtcgcgacggagtgcccgtgttccccctctctctccgggcctctccctgctttaatttatctttatcgtggagatatagattttgttgttagttaataaaatctgagaagaatgatttcttcggatttaaataacgttgaatttaaacaaatttcttctgctaattagtgttcatctcgttgataaggccatatagtcaccaaaaaaaaatctctactttgtgagacatgtgtaattgcgagcatgaaaatgactccagtgcacacctgtctcctgggctgggcatacatatttcatttcattattttgtttagtttttgttcctttttctcccagcatcgatggtataattctttgcaccatataatattccatcatttccttggtgccaagaagaagaaaaaaaagacattgcttggttcctaattaagggagttcggtgctcacaatcgatcgatcggttggtgaatgactgaatatcatttggtaatgtcggtacggtatgtaacactgactgcacttcatatatggtcttaatttcgaagtggatcctgcatcacacattttatgcggaaatatgtgtggatgccaaaatgaacggtctaatcatttacttatcggatcgtgtatttccatggccaagtttaattctttgctgactttgagaaaaagaaaagaaaaaagttgatagaatgtgacagacgtagactaatatttggcctttcctgctcaacttgggccaaaattctcgttttatggctgtagcaattcgaggaccacgcatcagtgcgcaaaggcatttggcgactgatccatggatgatacgcatactgcaagtatgtaacagcgatcacaaatggttttgcgttgcgtttttgtggatgggataaaataaaacgtcgtggacaacatacatagatggacgcgcggcaaaattcaggggaaggagatcaacgcctctgcaatttgcagtcacataattttcatttcagtcgccatatcaataaactagtggacaagaatatctgaatatgtactcgaatgtatacgttgtccattcatctatagtgcaagctgttttagatttgttctttggtcagattcatttgtttaattaagtttgtagaaaaaccatagcaaaatctgtaacatcaaattgatctcactaaacccactgctgaatatatatatatatatatatatatatatagcatgtttgttttgtgttcaaaatgcaaccatacttggttaaatgaacaagtttaattcagggtaaaatgaaacacttacaggatataaagttgagggaacaggataatgaagtatgtgatgcaagaatccaaaggtggtgtgatcggcaggtagccatcgcatggcaatgtggcggccggagatcgaaagggcgagacaccgtcgttgtctctccgtttttctccacaaactctgggataaggccggggaggagaccaaaatcacacacccccatgacaccatgtatacaatggtatcggggacggacgaaaagaaaaataggactgaacaaattagataaagttttaactttctttgtaaatatatgacaaaaaaattaagaggtttccctcaattccaacattggtattggaactagatgttggttctatggtttgggtccgctcagtagagcacccaccacccgtgtcgagcgaatttattttccatgtgattttactatccttaaaaatataccatactttataatgtaaaatttaatatctccggatactaattacctcgatgtattttttcaagactataaatttcttaaattatagtcatacatacggatgagacacaatggtcatgacaatgcgtgaagcctgttgatgacttcaatatatctcagcaccacgtgcaatctctgggtttgcgtagatataacttgcacttggtgtacatgggtggtgtgagtttgtgcgtaagttcagatactactaagttctcaaaaaaaaaaagttcagatactactacagcgtatatacgtgaagagttgagaaaagaaaaaacaggtgttcaagccccatcgatccatgacagatccgccactaggaataagttcactttaggtatcgtccagtctaatttttatctctgcagcacaaaaccaacttacaaaaccgtgcaaagaagctccctcagcggtatagtcgctggttttggctgacgtggcgcctacgtggcgctcctttgactaggttttcgtccaacgtgggcattgacgtggcgcttacgtggcaatttgatccaaaaaataataaaacccgtgggacccacatgtcaggtttacacaaataataaaaagtggtggggcccacacgtcatcctcactaccctcatctctctctcccacttctctctctccagccggcggagcggggtgggcggcggccggagcagcggcagagcagagggcggaggcgaggggcgaagcggggcgggcagcggcgggtcggtggccggagcggcggcgtgttgtggcccacaacttgtgggcggagcggctggtcggcagccggtagagaagaggaccggcggcgcgtcgtggccggagcagagggacggagcggccggccggcgggggagaagtcgcggaggtggacggaggggcgcggggcgctgaccggctggaggagaggagcttcccgcggcccgtagctgctccgccctcagctccggccgtggcccaccactcgttccacgcgttctcccggtggtcgttcacctgcccctgcacgccgcgcagcgggctccgccggtccagcactgcgtttttcgccagccggttgaacatcctcgccaccgccttgtcgctgcccagcccatttgacaccacgccgccgctgagcagccgcacgtcgtcgccgggccggaagctgatgtcgcggaggctccgcgttgggctgcggctgaagtggacgcccgcctgctccagctccgtcaccgacgggacgaactcgtcctcccgctgcctcttgcggccggtgctcggcggaggtggtggcggcgtcccatggaggaggcttcggtggcagacgtcgatcgggtgtagcgccagggcgtcgccggtgatcagcggtgggtctcgcgtcatcgacacgaatcggagaaccatgtcgttgatgacattatccgtctgtccatcacacggatcaaatcaaatcggttcttggatgattcttgatttcttgattgattgatcgattccgcgatgtacctaacgctttgtgcgggccgcgaacgacggcgacgaggcgccgtcctactcgtagcccgctccggccactgcccaacctgctccgccggccggccgctgcgccccgctcgtagcccgctccagccgctgctcaacctcctcctatcggcttcgcgcgtcgccgcccgctcggctccgccggccgccgccgctccgcactcctgccggcttcgcccgccgtcgtctcccctgtccgccttgctctggcgagttggcatgtgtttagagagaggatagagataagagatgaggccaattgtgacatgtgggcccatgtgggcaccaccaattttttattatctatgtgtaactaacatgtgggtctcacgggttttattatttttttcagatcggattgccatgtaatgccacgtcaatgccacattggatgaagacctagtcaaatgagcgccacgtcagctaaaactatggactatactgccgagggaccttgtttgtatggttttgtaagtttggggatacgttgtatccggttttgtatagcagagacgaaattggactgagcgacaaatagagggacctgaagtgaacttattccccgccactacggtacaagcccacaagtcagctagacagagtgatgggccgatatgcacgtgctttgcttacctttcggcccatatattatgttctctgggcctgtagagcaaacgatcaagcccacgattaaggaaagtagcacatggatgggcccggcctgctatatgcgaatgtggtcgtcgtgggccagcctatcctatgtgtccactactaactactagcaatggattccagatgggctttctctgatgaactaggcttttttagctcatacagatatcccgcgtaactattctctctctttttatattttttctttcccatgagaataacaataataataaaaaacgattgctttcattcaattgactattgactagaccactcactatatatgcaccacatgaacaagcataatagtcgtacaagaccactggctcactatgcaataagtttagggcttaattgttttgggggaaaaacaaagtatctgaatttataaggattacttctttcctgcaaggtgaggagtatagagaaaacataattttttttcatccattcatttttttttgaaaaaaaaatctaataaattaatgtgcgcaaacatttatattcctttagtttttctatttctatagattcaaattcgtccgaatcaaataagcccttactatttagtccaccgttccataaaaaacctacatagtactcgatgtgacgcatcttagaactgtgaatctggataaacatctgtccatattcgttgcactataatttatcacattcagtattagatttattttttctagacggagagggattacacaccaagtaattaaccaatggaaggaacgaacacgcatacttaatttgactttgaaaccagctactagtacgtgtactggcctatatatagggttggaaatgtacatatgttggccgtgcgagcgcgtggacaagtcgatggatcggtcggaaacctaaattaacacacgtgcaatgcgaaaatgacccatatccccagctgaccagcaagcaagctaggcagcaaacaaaactactactccatggagagggatgcaacaatgtcccggttcgtgcaggcacggatgcaactatgcgacaacgacttacttcccagtctccaagggccttttgttctccacgaaccgatccactgtaagctgcaccatgcattgcatgatgaaatcaaaacagtcaaaagcaatattttcttttcgcgaggagtcaaaagcaatattatttgcaagcatgtaacgttgatatatttttcataaacttcgtcaaacttaatgaagtttgacaaaaaaaaatgttaaagcatcttataaaaaagagtgacacgacaattttaatttgctactcaaattaaagagatacttattttacaaattatataaggctatgtttatttgtggagcaattttacagaccttaaggagctaccatgagataaaaaatttagtataaatatagccttatataattactaaaataagtatgtacatacgtaagtaagtacgtatatacacgtatccacccgcgacaaagacagatccatttgtgatttccgcagatagcctagcctatatcatcctccttccccctcgaggaccaagcataccatgggcgggccttttagtggtctgcctgtgagatgagaggttatatatatgtgaaaaccgtttatagtggtattcatcgaatcaaacagtactgtgctacaatattcaccgatgacgagttgacgaccgatccattcatccaatccggccaaatcgatcgacattactacgtacatacaacttatggtcaacaacatctgcatggactcttaatacacattacccggacagtccagatagctactgtacaggtactgtatgcattgcatcagcgccgtacgcacaagtaccatacgaacgtcgtgctcctatagtccctagccgtcgctcactatatatacaaattaaagtcgttcctcgtcttagctttgaataattcaaaaaccaaaagatcaaaaccaagggctacaaaaccacttttaattttaccaacaaattcatcccccgtgtgttatgcgtgtttcgcggcgcagactagtttttggattattgttaccaggtttttcgtatggtcaacctctgaaaacatcgtgttagttactatagcaagttctaaaaaaaaagttactatagcagttttcgttctagtccgtatgcctcgtatatgagcatgttcctagctaggtttgtcctgatcgatcgaattgaaatggattaattattggtcatattagatatcaatctgaggctagtgtcgttttctacctctagaaaagacatgatgagagggaaggggcagcttaagaaaaattccactaattaatggtggagtggcgtcttgctcagagatcgtgttgacgaaaaaatcgaacacactggcctgggagatctatttagctcctgtgcaggtccaaaggttgatgagatgcggacgtgccagtctgtttgatcttgcaactgacaagatatgtaaatagtagatcaaaacagtcgatcggctgacaagccgatggagcaatctcagccgatatcgataatagccgatgccaataccagccgatagcgatagggttttgataaatcggctatatgtccaatgtagatgatgatataaaaggcaatcggctgatgataatataatattgcaatataatccagtataaaccaatcggctagcaatgatatgataaataagcatcgattcgaggtttaaagcacacatcggctggaggtccgatgtcatgaaatccacgagattagattaa

SEQ ID NO: 21168 - DNA, 661 bp, Oryza sativa
ttcctgcagccccgtcaaccttgccggccagctgctctggtcgacgtgcctgtcagcgcaccgcatcatcccctacagctccaacgtatataaggtcgcggatcagaccggagccgggttttaatctcaaccaaatcaacggcttggaatattggatccactgagttaaataaaaattaagggatggattttattaacgccacatgtcagtttgagagtgttttgaggattgccacatggcagcgttatatcgttttaagaaagtttaatggacttttagtataggaaaatgtacgaattacccccgtatcaatcgcggtcgtccgaattacccccctgaaccacaaaaccggatattcttcacccccaactatataaaccggacgaattacccccctcgaccacatccgaggtggttttgctctacgtgacatacgcgtggcagtccagtcagcattctatatatatataaaatgtgggacccacctgtcatacgctcactctctctcactcttcctctctctcttctgtctctcactctcgtcactcttcctctctctctcacggtcaaaggcaggcgggagcagcggctgagggcggcgggcggcggaggcgacaccggcggcgggcggcgggcgggggcggaagcggctgggggcgg

SEQ ID NO: 21169 - DNA, 737 bp, Oryza sativa
tcctgcagcccccaatgagcaattaaagctatttgaggaataacaattcaacaaagcatatatatatagagcatttataaatcaaaccatatgctagcatcaacattgcatattttcttaattcaagtatagaatttaagtgtcatgcatcatctcccttaaaagcaaaatctaaatctcatgaaagactagaatacatacaagctatgctagagacaaataaaccttcaaagtattgctagcatgcacaagaaaataccatttgcataaacaaagctctattttctcaatttttctcattgtcatattatcgcttgataaaaccatgaggtacaaactccccctcaaaccatgccaaaaggatgaactatgcccaattcaccacgaagaaaagcaaagcgattagaatccaaaggcttagtgaaaatatcagcaagttgcaactttgtgtccaaaaactgcaattcaacatatcccttctcaacatgatctctcaaaaagtgaaagcgaatatcaatgtgctttgtgcgtgagtgttgaacaggattcttagcaatgttagtagcacttgtgttataaaaaaagagaggtactttctcaaaagtaagaccataatatttcaaagtagataaaagccaaagaatctgtgaacaacaactagcagcagcaacacattcaaattcagcagttgattgagcaacactagattgtttcctagaagaccatgcatcaatgat

SEQ ID NO: 21170 - DNA, 682 bp, Oryza sativa
gtatgtgcggggtaaccaagaaacaatccgtcggtagaacgtgcctcaaacttatccaaatttccagatttcaagacaaagcatttgcaaccaaaaacacgcaaatgttaaactttgggttgatgaccaaatcgaagttcataagaagtttttccaagtttagatcgcaagaaaactcgatttgaaatataacatgcagtgttaatagcctcagcccaaaattttctaggagttttatatcatccaacatcgttctagctatctcaaccaaaacacggtttttcctttcaacaacaccgttttgttgaggaacacgaggagaagaaaattcatgttcaagacctctttcattgcaaaattgtttaaaagaagcatttttaaattcaccaccattatcacttcgaattcttttcaaagaaccaggaaattcaagatccgatcgaagaaacaaaccacgaaagcgttgaaaagtttcgtccttagttgccataaagaaaacccaagaattgcacatgttcagtaccacagatatctctggctgacaccaggcaagctctgacagagactaggaatgactggaatgactaggatagctgctgagtgagttaccgagacataaagaggatagctaatgactgttcttgattaatgcctggtaaagggtgtccaaggtactgcttct

SEQ ID NO: 21171 - DNA, 736 bp, Oryza sativa
ttcctgcagcccgtttatgtgtgtgaaagtctggtttgcacttgaaagtgaggaacccgaaagaataagaacctcaagggatggaattgtgttcaccacaagaggtgatcaatatatcatttactgcgcttaggtttacgctgctcatgtcaaggtacttaagttgatgtagattggttaaccatgaatatctactgagtacatatcagtatccatgaaaccgaggttaaggtgttgtagatttgaaaggttaccaagctgaggaggcactctaccaaacaatatggatgtttcagacacatcaagatatcttatgttcttcattgaaccaaagtactctgggacatggctggcttcaactggatagccaaacttgttaatagagacatcaagctccacaagttttgcgaggtttcgttgtgtcaatgactgagttttgcctggaagcgaggagcaagaaatatggagggccaccaaagatacccaagtatcacaatggtggagcgacaaggaatcagggtagtacaacctacacgaattagtgcgactactgggtaggtccgtcggtttggcacgcaaaccgaggccaagcaagttaacgtgtgattctaataaagcaagttgcaaacaaaataataatgattttctaattataggggcaattggtcaaagggtgacttgccttgctcaaggtcttcacgaagcttcacgaatcttcgagaaatccacgattgac

SEQ ID NO: 21172 - DNA, 1027 bp, Oryza sativa
aagggagcacactggtgtgaagagggatacgagaggaatcaatccgaaggctctaattcgccggaaggagtttgacggcggaggatttcgacggtgatcgtcggcggtgagcaaaggggatacagcggaggggagacgaggattcaatccaaggcgacgaaagcatctccagggttcgagggactcgttcccgggctcggatggagcgaggggactacgagggaggctggcgaccagcggcgacctccgggagcgggcggcgacggcggccatgccgatcggtggcgccgctaggaattagctcctacgcgatcggggcgacaatgccgagctatctagcgagctaggagaggtcaagggatgggaacggagggactaccgtgtcgggaagaggcgccggaagatggccgacggcacggggcgtcggcctcaggccggggaagaggaaggagatcgagggcgcccggagtcctcgtctcgcattcacgcatgcaccggcctccgacgcgtgcgacgggcgaagagacgaagacaagaggtgggagcggcggcaaggcgtcaacaatggcgcgacgggtgtgaggcgagcgaaaacgagagaggaaggggtttggggtggcctgggttttacactgtttcaattaagagcgaaatgcaaaagttctatcttgttagtattgcaagtttatgcagcagatgttgcagtcatggcatagaacaaataaatgtatatatgactatatgagcacagagctcttctagacttatggtaatatacactgttagcctcttgcctttagttcaggaagctcagaaaaaacaaatcaagaggataccttatctggaacaagaaaacaatatatgctagctctgatcacggctgattattacaaattatccagtaatattgcgtgcattacagctgggttcttttttagggaaaacaacaacatcatgagcaggttcaaaggagccctgacaagaaatcctatcttactactataaagttatcctcactaactcctta

SEQ ID NO: 21173 - DNA, 714 bp, Oryza sativa
agccgtatagcgtattagctaaaaaattaataatttataggtaaaacttttatatatatgtcattagtgatgtaaaagtatatctaaaaataaaaattaataaaaaaacttcaaaatcaatttcaaaatctagttttaaaatttgaattttaacggcggctaattttatataggcaaacgataagaaccttattggttggcaagatgtactgataattaatctaacatacataccgacagacatatctttccccattgcggaacaagggtggcgccaccatgtgatatgatccaggcgtgtcctctagctaattgctcattgcttggctcctcgccgataagtctcagggtgacatagtttaagcatgtggcaaacatcgtgcttgatcccaagattagcatgccccatcccccgtcctcgttctgcacatgtaaatataaaaaatgcaatgtttctgtacaacaatatttaattattactccttccaattataaatatttaatattaataagatctggtcgaactgactacaataatttctcaaatacttagtttaaaaaaaattatatgagtagattgacctagaaaattataccacaatatcataaatttattatattttataaactcattttaacataaaactggtagtcaaattaagtttcaaaagtttttgatcgaaacttgtcctatgcgtcaaacatttatgccta

SEQ ID NO: 21174 - DNA, 604 bp, Oryza sativa
ggtcgaatcggatcggcttttctctctccgagcccgacctttccttctcgtcgccggtcgtcgtgggccttcgccgccgcctccgagcccctttaaaagcttccccggtgtctcctctacccgccgccaccctcgccttcgcctttcgtcgccggaagagccctagcgccgtgtgccctagcgccgccgtgccgccgtcgctccagccgtgcgccgccgccgttccaaacgtcgccgtcgctcgggaagaccgccgtcgtggtcgccaagtcaccgccgtcctcgtccgccccttcgccgtcgccgaagatcaccggagcaccgtcgccgccgtcgacccgatctccgccgccgtttcaatctcgtcgccgtcgccgtccgttcctcttccgccgtcgctttggtcaccggtgagttcgccgcgtcgcgctctacccgatggtgccttccgttcgcgccgccgtgccgtcgttcgccggcgagcatgcaagcccgagccgcccgagccgccgccgccggtgatgacgtcaccgctgacgtcatcgtcgccctctcccgtgagccggtcgtggaccgatcgatctcggccggccgttttggatgg

SEQ ID NO: 21175 - DNA, 666 bp, Oryza sativa
ttcctgcagcccaaacaatcgaaatcctaaacaaaagagcaaaagaaagatcctatttagactaattaatagttccattggatagatctcaattttacggaattattggaagtggaacggagtcaatcggtgttacgaatcgggagacatgaattttctaaggattatttgattttctgtctaaaggaaaggaattattaattcccttgaaaaagataatggaggagggaccggaatcagacttttaggccaagcgtgaggcgcagcccaaggaatttgcgtgcgcggtcgaggcgagtgggtcggcgcgcgggagtgacggcccacggccgagcgaggcgcggcccaaacggacaagacgcgcggcaggaagccagtggacctcggtccacgacgcggggtcccaggatggggcccacctgtcggtggccaggttcaccgaggagaggttttatgcggcgctgcgctagggttttggtgggtgcggtttgcgcgaggtgcaccgagaaggccaaatggcggtgggcccacttgcagccgcacggctcttgtggaccgcgtgcaccaaagaaaagggacggagggggcgctgaccaatcttgctgacccggttgcgaccaatgtggcgccgacgtggcacctatgtggcagctacgtggactggcg

SEQ ID NO: 21176 - DNA, 2130 bp, Oryza sativa
ctgcagccccagctaactgcatgtcctgatcattgtctgaactaaacaagatttgccacaaaactgcagctgcacataactgcatctcctaatcatatctgaaattctgaactaaaaacgagatttaatctaatttgcaacactgagtccagcaacaaatctgcagctgcacaaaaagtgcatctcctgaccacgtctgaattaaataagattttgctttgtcactctgaaccagggaactgacatcgtgtacgacaccttcctgcggccgctggtgatgcagtaccagcccaacatcgaggagcggctgcgctacctgcgtgccaatgccggcgacattctcatcttctacctcaagaacttcaccgataggggctacgatctcttcctccgggggatggagtacatccggtcccagacgtcacgaggctcaagaacgagggtatgttaccagttactctctgtcccatatcgtaaggtgttttagttttgttctaagttaaaattctctaactttgatcaaatctataagaaaatatattaacatctactctaccaaagaacactatcaagacatatttcatagtgtattttaatgaaactaatatgatattgtagatgttagcactttttcttttacaatcttggtaaagttagaaaagtttacctagcacaaaagtaaaacaccttacaatatgaaaacagaggaagtagtagtacacatgttgggaaccatggtcatcacaggattccggaaatgtaacagtgcagtcaaagaattcaagatatgtaacagtgcagtgtgtaactatgttggcaatggtttgtttctgctgtgcagcggtggttctcgttcggaggcgaccgggcagagaggtcgagctacgttgatgattatgtcgccggcggtggcgatcggaggagcacggcgaggcaccggcgaccccgcgacgattactaacgggctggaccggcgccatagggattcagtagagagaggtgcacaggattggaaactagttgattaggagtgacaaaatttaaaaggcccaaagcaaaacttctcaaaaacatgatgtgtatatatatatagacaggtgatcactgatccatactctggtatatatagctcctcacaatttggcgttgcaggttggctagtttgttggttttcctgttgtgatttgtgcacccgtcttcgatagactacatgattcattttttgaaacctaaggcgaaactttgttccacttttatatttagaagaagagaattaacccagtttataaggaaaaccgggcccaaaaaccacacaattgcacggttaattataggaaaaccggctgaaacccaccgctacacaactgacaacgacggcggagcccaaaagcaggatgtcaccgccaagctaaacacaaaagcgatataacagctcccacatcgcagaagaggtgttatcgttgccgagctagccgcccaagcgacccaacagcgccgacttcacaactgcagcgacactgaagacacgaaagtcgccaaagcgaaaagcagctccgacatccaacaatatacatcagccaagccatcgagaagccacttccttcacgcggccagcaccccaccagaaggaacgaagtggacccaagaagacaaaggcctcaccgagcacaaggtatgaaagcttttgaaccgaaaaagaccatcaacggtcgtcgatgcattggaacttctccgaagcgacgcccccaaggaggacacgacgtgtaacgccgccgtcgctcgtctgaaagccggaacaaggttttcatctggagattgtgggggatatgaaagaatgccatgacaatgcctccaagaagggaaatgacgcccacgagcgccgccgtcgtcgaaccggccaaaggcacggcaaggctttcgccagcatcttcacatcacccacacaagcacccccacattgacggccacagaatagtccatgacgtctcacaagcacccatacctcaaccgtaaccaacggcaaagacggacccttggccaccaactcctacagcaagccgaagcctccgccctccccctagcgttccccacgaccagaacaaggtccggccaaagaagggagggaaaccg

SEQ ID NO: 21177 - DNA, 689 bp, Oryza sativa
agaaatgtcagtgtgagattgagattgaggtggaggaggagggaggcctctttgctatagtaaaagagaagaggctttggctattctgaggctgcttattaattagcacccgcttaggcctttgctttctcccataggtccagtagacataaataagttatcatggagttgggcattttttttttctgcattgttgtagccttggtttaaaatttggcaaggcaatttaaggattatattgtagaacagcagggaggtggtgtcttgtaacttttgttgttacattgtaaccccccgaatcaggccacatgggccggaggagtttgtgggggagcaccggagcactcttgtgcttttgggaccatgaactatgctagtttatgggtctatgtatatgatatgtttgtgatttgattatactttcttttgtcgccttatcaagtaccaatcattattaagtactgtacgtagtctctgagtgataattttgaaatctttgtgagcgcatattttaatcgaagttgaaggctatttttgttcgccattttttgttggattgtcaggatgatttgtaggcaaaagttcacaagagaatttatatgttgcttcttcaaagttcaaaacgattcatgagtgagaagaaaatgatttgtgacaaagctttgtgcctttgtctgttttcagttcga

SEQ ID NO: 21178 - DNA, 1668 bp, Oryza sativa
tgtgcaagggattagttcccaactcattccaacgaacgcaacctcgcattctcatcttttcgattatacttatcaaccaaaatttaaatttttcaaccttaaatttgaagttgattttgggaatttttcatcatagtttattttccagcctttgcttttggattgttgaaaacatgtatataaaagttttattcacaattattttttatttgcaaatatgccgttccgttttttcctcaagtatgccaaacgatggggctgcccttgatttcaaggggttttagtttggtatttttatcgctattatttatcaaaagcaaaagaagtctatcaaatcaacccacccaatagcattggaaaataatgcctctatcaggtaatctaatacggtataaattcgatgtagataagattgtatatgtggaatttttttcaccaaatccaacgaaattcattagagatggctcatgtaaattttagagaaaagttagcaacagcttcaatatttttggacacatgaaacaaataatccacaaacaatatctagtgaaatagctgaaaagaacatggaccttaatattcgatgatagccagcaacaaaatttagaattcaatagtccattgggacgaggaatcaaatgcaagcataaaaaatttgcttaaggacaagcattgcccagaggcacttataaacattactatgaaaatagtaaataataatgttaagaaactaatcctttgttttccaaaaaataaagaagttaagctttcatttaacctattttcatctctctattttgatatactctgcttccgactaaaaataaacaacaaaacaaaaatctccggtaggtcaaaccaaaataaaccagcctacttatgtcaactactataaacaatactattatagcagatccccaagtcttgctactgattacagcaaaattccgttgtcagctcggcattgagcgtctgctcacacaaaaacttgcttctgcaacaaaattgtctaaagcctgcatgaaaaacagaatacctgatatcaaagcatgacgagcttaatttgaagcaagggatagatgcaacggtgaatcacaaacctataaagaattccagaaataccaccgggccagtggtatctgcactcaaaggaaactatctacatatcagcatgcccaaatggtgcacgaacaaatagttggccatgaagcgtgacaacggcggatgtttgatgaggatcgatcctcaatggcagattgaccacctgagaaagagtaatcacttcatgttatctgaagagaatgcaaacgtgctcaaattagtattcaaattgctgctatcaccttcttgaatggagtgatcccccaaggattatcaggctgctctgggtccccagttataaccagacgcccagcaggatctgactgaacatgcacctgcaccatttagaacaaaattcaacaattcatttcttctcgcaggtagtgcctcagttcaagaagtggaagctttttgtttgttacgcacaaattaagtcaggtatttattttaggaaaatggaacagtttgaagtgatgcgttcaacattaaagatattttttcacctcttcgcgtagaagtccaggaaccccagcatagatttcgaaacaatctttctgcaggaaagaa

SEQ ID NO: 21179 - DNA, 1640 bp, Oryza sativa
aataaaggagacaagagacaaggaattttcaccgaggttcataaacttgccggtagcctagtccccgttgaggcgagcccaactccaccgctcaaccacgaagccatcgcacgcccccttcatcaaagggtggcaaggcgggagccggcccacggagaggactaccaaagcctcgatcactagggtagttcttccttcactccgaaggtggtgaactccaaaccactcacaactggcgccaggcctcctccacaatctcctcggagaggtcaccgggcaacacctccacaagccgtctaggaggcggcaacctccaagagtaacaagtctaggatgcttgccgcggatgatcaagtaccacactagctataacaatgaaacaatgcacttggattggcttaactcactctctaacacctcactagataaactaagtgcccaagggtgtgagagctcttgcaagggttcaagataatgtaatggagtgccaaaacctcgcccttgctgctggggagtgggtatatatacccccaaccaccaaaactagccgttggaaccgaaatccccaactctgtgctccgccgatcagaccgctgttgtgaggccggtcagaccggactactttgtaacggctagaaaactagtcattgagcccactcaacctggccggtctgaccgcagtgtagtggccggtcagaccgtccacggctcggtcagaccgtcatcggctcggactgaccggttgcggctctggtggctctgtatcaccaccataaaccagaccagtgcaacagaccattgaagccggtcagaccggccttatcacgccggtcagaccggctaacaggcccggtcagaccgtcctaaggcccacggtcagaccgcaggtcacttttcagcacaaccaaccgttagtaaaacggcgatatttcttgacacgggtttcggaatttggcgttcttggactctatggaaagcttattcaaagggatatccaatccatgaacaatccatccaagaaacacaacttttctcagggagaaagggctcacactccaaaggatactccaccggacataaccacatgaggctacccaaacctataggatttgcccacatatctctttgtttaggacttgataatactcaccacacttggctagacaagcccaccaaatacacctacatgcatatgaactaatatggcgcaagatcatccacatgctcgcttcatagacccctcttaatagtacgacgtctatctagcaaatccggtctacaccaaacaccaagaccgggaaaagactaagaaaacattcgtagctccattatacctttgccttgcgccatccaacttggggtcaatgcttaagccaaaatcaacacttgtgaccatccggttgaaccatgtttatgccgaggtctttaccatcctttgtcaagactttattcccatcacaagtttgacttcattcttgccaacatgacgatgtccttggcttggtgaccattaacccatggtgtcattcaatagccttatcgtagtgggacctattccttttcacatctcaacaaatcggatgtagtataagatattttagataactgtgtgtccagattcatagcaaaaagttgctata

SEQ ID NO: 21180 - DNA, 784 bp, Oryza sativa
aggaaggaaatctgggaagtgggaacctcaccgcactgcttgcaagaacctttatctttggtaatggcatgaatccaacaagctccaaaaggaccccaagggcaatgggcaaaacagaatgcggctcataaccaaacactgcaagcacagcacaatataatcaccaacccagtggacagtgccctctatataaaagactccatacttttctatatattactactcctttacttagcttttagaaataggccaaaagggtttgatactttaaagattaaaaagattcaagtatcacaatatcatctttagtagttgtttctgtttagctttaggaatcaactgaaaagcctcggtatcaatcatcaatgtgattcaagaattaatcaagattccagagatggaatgagataaagaggaagctcaccgtaagctctattgggatcaaaagccttgtagtcctcgacatgtaatgtgacggggaagtacccaatcacgcacttgctgatgaacctgaggatgcgtcgtcctccaaaatgtaagatccaacaatgcggtcaggtaaaaaaacgttggcagccgaggaaatcgaggagacgaacctggcgatcttgcgccccaacctgctcatatcattgaccggcgcgaacatgaagaagagctgcgtggcgagcaccctggataatacagcgcggagaggcgagagtgagacccaagtacccaacccgtcaacggcgagcagagcgcgaggtagggaaaagaagctggaggagagatttgggtaaga

SEQ ID NO: 21181 - DNA, 2068 bp, Oryza sativa
gcttcctgcgctcactctcttctggaagagcttattcccggcgcgaccatggcgatggcggcgctgcgtgaggcctcccgccgtctggtctccaggagggagtccccggcggcctacgcgcgccccttcctcctcacgcactcccggggcatcacctacaggctcttcatcggaggtaaacctcaccccccgtctccgtctcctcccgtttcctgactcgcgcatgccgcttgtgtaacatctccaccatggcgtcatcacagcgctgcagatctttgctcgctcgccgtctctcgtgcgtgcagatctgtgtgattggcggctcggcaagtcggcaagcctgtgcatgcatagtgttcgacgaaatgcccgagagacgcattcaccctgagtttctatccttttacagggctgtcccaattcgcgaccgaggatagcctggcagaagctttctctcagtatggccaggtactagaaggtacatttacttgtaacttaccagagccgagcctagagcacactttggtttatacttcttgtcattactagtaagttggaaactgttcttgttcaaatgcagcaacaattgtcaccgataagatgaccaacagaccaaaaggattcggctttgtgaaatttgcctccgaagaagccgccaataaagcaaaggaagagatgaacggcaaggcaagctttttgaaacagtgtatttttagttcagcctaggccttgtttggaatgttggattaccacatgaacttcacaggaaaccccaaaatccagtttaagggttggttgtttctttcctagcaagttcatgtagaatatcagtcttgcaaacaaggccttagaagttagaagcacactctgtttttcctacttgatttgattaacgcaaacttgcaacaggtattgaacggccgagttatctatgtcgacattgcgaaggccaaaatgaatcgtactacagattccagtccaagagcgacaggtcctcctaagccacctgaccgctgttgatagcatgcgtgtcatcttcatactttcctttttatctgctgcacgagtagtctattgttagattgggagtacctaaaaccatagagagtaatatgaacgatattacaaagcttagaatgttgaatgtccagttttaaagttcaggtgctaatggattttcatccaaagtttatggggaggttattgggacttcttcctattattattgagaagttcatgcgtaataatactggatttccagttttgcaataaaagaagatgtgcccgatcaacagctcagattatgatataacatcacatgctcttgccgatcaaatactgtgccctttccttctttgtcatggacagtatctataatgctgtcgccatgaaatgatctgaaaagtgctgttcatatagttgcatatgctcttgatgaagctgtggtagaacagtgtccttcctccatgtctgtccagtgttctgtatggaactaataatgaattggtgttttcaagtactcctaacttaaacttcatttgatttccctaaaactgtggaacagtaccttgattatacggaaaacatgaattgtaatgcgatggacagacggcacatttttttctgcattcttgtattatttgaagggaaaacattactctttctttttcaaattgaaacgtaaaaaagcactactacatgagattggaacatgcgaacaatgtcaattctactaggcttaatgtcacatcctaggatcagctcaggtgttttatctcctattttaaatggatgataagcacctggccaatttttatagtttaagaataatgtaactgcggtggaagaaaaatacacgcgagttctctgctcgatttgtacactgatgaagagaaggccacattttgtcctctctttttcctaaccgcagccgccgatcaccggagcaccacggcgacgacgaagctcagcacggccatggcgctgccggcgaagcagcacaggtcgatgagcgcctcgcgtcgcgccttgctctccttcctccccttcctgctcttcacgaactcgt

SEQ ID NO: 21182 - DNA, 878 bp, Oryza sativa
cagtggaagacgatgtcatgatcgccaatgtctcggtcacagatgacatagcgctcagcgctgccttgagaacatcctgcgagcacccaggcttcacgatgcttttcacctgcgcagcaacaacagttagaatagacaccaacatgtgccatttgtccacaggaattcagattgttcgatacgaagatcgatcaattattgggattatggaaagtaccttctccaagtattcctggagtttcttgatcctgcccatatagtcttgatcttccacgcacagtgaaataggctttgaatcagcacctgctccttcgaattggagtggtcctgggtttctgtagatgtcgtcgattaagaagctggtagaattgttcctcaatagcctgtaaacacaagtttgttattgtcaatgagattatgcatcttctttagaccaatgacagcaactgtacagcgatcgaatataagatgggattaatagattgtgtacacacttactcgaatgctttgcctttcaagtcgacagtagccatatggacagcaggtttccctatttgagtagccgcaggaccacgtgaccatctcttcacggtcatcatagactaaagggaaaagaattgtgggttaggtgttcccttcattcatatcatactcatctaattttgccaaaagggggtgcacagtagtaatctcaccgaaatcggagccgcaccacatcgccatttgttcgcaggactcttaagatttgtcacagtagccatgtaaccattcaaaccagcagctaagatgtggtagcacacgtgcccaagaacctgaagccaaacaacatacatataattaatcaacagcaaaataaaattgctttgtccaagtagaaa

SEQ ID NO: 21183 - DNA, 1185 bp, Oryza sativa
tttgggctgcactactgtgccatgcaaattacttcgagattctttacaaggggcttaatctcgctttgtcttggcaggttgtggtggtgatggtgaggagcgagttgtagaggaggaggggcaccgatcaaccgggaagctggcggccgggaagtggtgggagcggccagatgacacggccatggccgggatggaccctggcgggggcggcgccggcgccggcagctcacggtacttccaccatctgctccgaccgcagcagccgtcgccgctgtcaccgctgtcgccgacatcccatgtcaagatggagcactccaagatgtcacccgacaagagccccgtgggcgagggagatcacgcgggagggagtggaagcggcggcgtcggcggtgaccaccagccgtcgtcgtcggccatggtgcccgtcgagggtggcagcggcagcgccggcggtagtggctcgggtgggccgacgcggcgcccgcgcgggcgcccgcccgggtccaagaacaagccgaagccgcccatcatcgtgacgcgcgacagcccgaacgcgctgcactcgcacgtgctcgaggtcgccggcggcgccgacgtcgtcgactgcgtggccgagtacgcccgccgccgagggcgcggcgtgtgcgtgctgagcggcggcggcgccgtcgtcaacgtggcgctgcggcagccgggcgcgtcgccgccgggcagcatggtggccacgctgcggggccggttcgagatcctatctctcacgggcacggtcctgccgcctcccgcgccacccggcgcgagcggcctcaccgtgttcctctccggcggccagggccaggtgatcggcggcagcgtggtgggcccgctggtcgccgcggggcccgtcgtcctgatggcggcctcattcgcgaacgccgtgtacgagcggctgccgctggagggcgaggaagaggaggtcgccgcgcccgccgccggaggcgaagcacaagatcaagtggcacaatcagctggaccccagggcagcaaccggcggcgtcacagtcctccggcgtgacaggaggcgacggcaccggcggcgccggtggcatgtcgctctacaacctcgccgggaatgtgggaggctatcagctccccggagacaacttcggaggttggagcggcgccggcgccggcggagtcaggccaccg

SEQ ID NO: 21184 - DNA, 1047 bp, Oryza sativa
  unsure (1)..(1047): unsure at all n locations
ttttttttttacataagacaaggcaaaatttggatcagacctgaatgttttcctgaacaatatagtctccaaagatacagtgcatggaattattgccagcttggttacctgatgcatttgatagagtgagatagcttagacaaagcagtagactaattacacaagcacagttaggtctgtagacaaagaacatgaattggctgaaactagagactgttgaattgtgtcattccatccccaataaaatcagggcaacatattgtgtgcatgttgattttcagattgggcatgaatcaaggtcaactactaaatttccagcaagaatttaagttttaaagtttccaacaggtgtcgtttgctgaagatgaatatgttcatctcaaaataggaaaaataaacaaatgcaagattggcctgatttctgaagagtaaaccaacctgataaaagccaatagagttgaatccaaggctcagattaagcaacccaatagatatgccatttagtattccaaatccaatgattgtcttggggtctaaatctttgttctcgaaaagcttcatctgaagagccacatgaagggaacaaaatgtcaccaggagatgccagcttgtcagcgtagtagctgaaagaaattaggagagtgctgtgatttttgcatggttatatagcttaggaaacagttagttttctcaggtggtattgttcgtcatattgtactcataaagtagtatagaatttgtgtgccttattaatgaaccgtgtccatcaggcaacttgtgtttcctgaattttcgaaggatgtcatttttgttcaacaaatacatgaataggatagcagtaacgttgtgcaatttccaattgtcccatggagccatgaatttgactcacatatgcagcagagcagagatgttcagaaaatggtcatcaagtctgcactgaggcaattcanagaacacctagagtgcatacttatctagtcatttgcgttgctctaagctcgtattgccgcaatccaatgtatgcggacagagtgctagatgctagca

SEQ ID NO: 21185 - DNA, 1070 bp, Oryza sativa
ttatctttacttttcgaattaaaaaatggttcattataagatttcagaatcaataatttcgaattaaaaaatggttcattataagatttcagaagcaatctgttgaagaaagaggtgcaatactttttatttttcagcaatgggatgtgcatggtaatatgatttgacacgagggaaggaaagtagacttattctaggatgggcccatagacatagtgccagcaataataggtgaaaaaatgcgggagatttgacacgagggagggaaagtagacttattctaggaggggcccattagcccataggcatagtgctagcaataataggggaaaaaatgcgggagaggaaggtgggaatcgaaccctgctcgccgggatgaaaactttcgatgttaaccatgtaggcagattactatatgtgctacgagattacatggaacttacatatagtatataaacctcggttttggagtagattgaaaactgtccgatccgtctattaatcagattaaaacggatttagctacacgtgtgggacagacgaaaaaaacgcccagaatccttacatattttttaattaggtatatagattttataaggatataacaaataatggcggtaggagtttgattgctaattttaagttgttgaaagaatagctcaatccgatcttggatatcttgaaggcaactccaaaagcttgctgcttcttcgttatcagctacaagataacaattataagaattattttgcatccattgcattgtaaaatctatgctaagcatgatgtatgaataaaacagcatatgtacctcgatacttgttttgcagccaatcttgtgagcacattaaggcctccaagagttctgaagtaagccggctacgatgctcactaagaacccttccacttgtgctaaatgcagattcagatgcaacagtgctaacaggaatagcaaatatatctcgtgctaccttcctcaatgtaggaaagcttgtcccaaccactttccaccaatcaagaatcttaaagttttctgtattaattgaaaccaactcatcctctaggtacct

SEQ ID NO: 21186 - DNA, 644 bp, Oryza sativa
attttgggcctaattttgcctaggcctatgcgtttagcctaggggcgtttcctgccacgtcgacggcgaaggtagggtgatctttgtggcagaagagaaggaccttgtttcagatgatgccctgtgggccttgtataagcagtggtgcaaggctttcaaccaggagcgtgaccatgccgagatggttcagcgcttcgaaaccttcaagagacgtgtgcagtgtgctccttgtggacagagctaacaaggaagctatcagagatggtctgtcccgcagacttggaataatcaagttcactgaggcctctcacattgcaagctatgggtcccgtacccttagcctaaaaagttggcccaaaaacactcaccccagagtgtaagcacccatatatgtgtggcttaagccctgtttgattcagtttaggattattataatctaacttattaggagtaagcttaaacaaacaagtagattattatagcagattattataatctataagtcagattattataatctgataagctgctctagaggagcttttttcagattattgagtggcttaagacccactacctctacatacttgagaaaaattacccacctatatcattaactgaacagatagctgagggcattatag

SEQ ID NO: 21187 - DNA, 4649 bp, Oryza sativa
tgaaagaattatgggaataatagatttcgcatgcaaatctattcaagaattatgagaatcagtaactaactagtgctatttatagatttcgcatgcgaatctatgcaagaactcataggaatatttgactaactaattaataagttaacgctggatattcctcctcgacctgatcaacctgtttcacgccgatgatgccggccacgaaccctaggcaagggcagacgtacctcttgacgaagcggtataccgcgccgccgcgccgggtcccgagcggccccggcgatcgccggcggtggagcgcggggtggggcctcgcgtacagccgcgacgtcgcgcgcaggagcgggtcgctgatgccggccttcggcggccggcgggagctctcctcgaactcctgcgagccgatcacgtcctcgaagctcacgtagccgggcgtcgtgtggcaccgcttgaagtaggcgtcgtgcgcggcggcggcggcggcgtgcaccaggtcgtcgtaggagtgcagccgccgcgagatgggcggcaaccgcgcctccgcccccgccggcgcggccccggaggaggagaagttgtcgctgccattgctgtcgctggtggcggcggcgctggtggagtggtgggagaggaggggctgcgagtaggatgcgcgcatggagaaaactggggcgacgtacgagacttacgagtagccgatcgagggagagattataagaaagaaagtggttaaaagatggagggcggtattagggtttgattatgagagagcatcacacccaactcgtattcggtgaagggggcgtagaaacgtattcggtaaaggggccgtagaaatagtgtatacagttatacgcacccggtttgccgcgcgccgtccagagaagattgaaactcaaaatcgattgaactcactcaactcaacccaaaagatgattgtaaatagatgtcaaatcgaaatagctaggtttcaccaatcatccgcggacggtttgaggaagcatcgatctccatcgaggactcgtgcggagctcgccgccgtcgagccgtccaggtgctcagtttgctgctgccgcggttgacgaggtcgcgctaggattgggagtttgagaggctggctggagagcccggatggccggatctaactaatgaattgttatgggctttggggctgagagatacatgggctgcaggccgaaccaacctgtgggctgagcagctagcggaggcgcttccgcttcggttcgtttgcggcctggaaaccgcgccgaacaggctactgggcgaagtggccaacacctaaaactggatttaaaagaaaaataaagccaagcataacaatactagtatttagattcggtgtaatggatcaatttacggtgaattttggatttttactctgttcggtagaaactggtagtaatataccttaggatttaatttgtcaaatacttttacttatgttatggtgggtttacactcgtcccttgctaatatcttccatagttggcttggtggtttacaacgtagaataaatgttaactttttataggtgccgtagctttgtgttggacggtaagactttgtagtaatgatataatcttcaatggcttaagtactaactcccctctttgtaggtaattttcaggtgaacccactgcgctagtggtcattgttgcttaacgaggagaatagcgatgtggttaaacacatgcacaagttaccggaggctagagtttgggatttcttttccagatttgcgtggaacttgagtaagcggttggagacctagtatccacttttgtcatcttttgttagttggcttctattcacgagacgacttcgttgtgaggtgttgtagtctaagtacccttgttttatttggtcggtggtgttgatcttatgcaaggtgtgatgctaagtactattgacaatgtatgtttggctatgtacgtatagtttggatgtagaggataggtttttaatcatttttttaaaaataaattgacattttctccctctacatgtttatctatgttttgttagtattgttgtattgctctcactaagcctagatgctcgctagatataatgtatttttgcttacttgtactcccctccgtacgttcaaattttttttatgagatagaacacaacctatatacaataggatgtgttccatccaatcgaacaattatattttgaaacggagaaattgtaagaattacaagttgtcctagcatatctgcactcttccatccatcccaaaataaataaaagaaaacttttgcaaaaccataaacagagtaaaacggaccgagacgagaataagccagcggagcacacgcgcaacaagacaatttttttgtttggcattcctatcaaaatattcccaacatagcatagcttctagtggaaactgtgaaccactgaaccaccaccatagacgatagcgtttgtagcttgcttgcaacggacaaaccaattaaataccccctccgtaaccgcgagattctaagttttcaacgaaggctgtatttagttccatgtcaaaattaaaagtttgaaaaaattagaacgatgtgacagaaaagttggaagtttgtgtgtagaaaagttcgatgtgacgaaaaagttaaaaattcgaagaaaaaagttagaatctaaatagggccaaagcgagaaagcttccttgcaaatcctggctgtgtgcatatgtatcagtacttccttcgtctcagtaagttaatttttttttattttttttatttattccaaaataaatttattttaaaagtaataattgtatcaaaattgatgaaagtagaaaataattatattgaaaatagataaatgagaaatagttgcattgacattgataaaacaaaggtattttagttttttattgatgatatgtgaaagaagatactttctccgttaaaaaaataaatctaaaacgggatgtgacacattctgtacaataaatatgaacaaagatatatatttagatttatactagcacactgcacacgacacacacaccagcaacgggggcacacgacacacacacaccagcaacggggattagaagttgacacgactgtctatctggaatcctagctgtgctgcggtagcaactgtcctcagatgctgatactccctgatagccatagccacgacgcgatggggtccccatccatcctcccctcctgctcggttgttttcgcttcaggttcagtgcagtcacgagcgcggacgcccccaaaaaactcgccacgctgtgtgcgcgcgcgcccaccgcgatccccctgatcccattaacgtttcacccgcgcgcgcccacctgccgctgcaatatatttcgccgcgccccgcgccacgccacgccacgccaccttgcgcgcgcgcgcgcacacacaccccagcagcagagatgagggggatgggcgacgacgggatggggccgatggcgatggcgccgccgcgttccggccacgccacggcggcggcaccgccgccgccgcagcacaagatggcgatgatgatgcacatgaccttcttctggagcgaccgcgcggtggtcctgatccggggctggcccggggagcgcggcgccgggatgtacgccctctgcctcctcttcgtgctcgcgctcgccgcgctcaccgaggggctctccgtgctctcgcgccgcctcgcccgccgcggcggcggcgccgcctcctcggatggcggccgcccggcgccggcgccggcgtcgtccgcggcgctgctgaccgcggtgcacgcggccaggatggggatggcgtacctggtgatgctggccgtcatgtcgttcaacgtcggggtgctcctcgccgctgtcgccggccacgccctcgggttcctcctcgcgcggagcagggtgcggccggccgcccgtgacggcggcggcggcgtggcctgtgagcacggtggcctccctcccgcggatggatccaagacttagtccccatcgattccgttaaacgagtatgtccaagcgccttagccagtagacactatgcactgtatcggatccaatgtgaaaatttaccttggatatctcgctaaaataattgtattttgtcgacttgcttgatatctgttcccgtgcagtcttctctagtcgtttttcgtttgtactcctatgtttcaagatggaatgatactactactagctagtattgatgtgagttctctactatgctaactttagatgaaccaatgatttgttagtactctccttccaaaaatatcctttttttaaatggaatccttccaaaaatattagatttatttcatattttgaattagctacatttgtagttttcatgtatttaaaacttaaatgaatagataaattaaatgattaatcggaacccgatgagtcatcttaatattcattggctgcgtacatgcatacactaattgatctttgttacaccttatctccacttaaattattattatttaaatccttcacccttaagatttctaattgtattgggtgcatatattgtatttattagagtgataaagatgataataattgtttttgttctttcgattaaatgtagctgtgtcttatattcgtttcatatgttgatgaaaccaaccctctagta

SEQ ID NO: 21188 - DNA, 886 bp, Oryza sativa
gagatgtctcctgaatcaacaaatattgattaaaggcccgtaataggatgttgtatgcattgtctttttccctatatgctaaaatcttataagcactacagaccacacaatattacaggaaagaggagacagttcacttgctgaaatgccaaactgtaccatttgattatatagttttcagtgaactacatgtgtggaacatagaggtttcaatgaattgtatcattttagcctttattagatgcaagaagagacagttcgcttgctgttgctgaaatgccaaactgcatcatgtgataatagagcccacaatgaactgtacgatgtacagaacatttgctttgtgagctctacattgtgcttctcaacaatgggtgtgtttagttcgcgctaaaattgaaagtttggttgaaattggaacgatgcgacggaaaagttggaagtttatgtgtgtaggaaagttttgatgtgatggaaaagttggaagtttgaagaaaaagtttggaactaaacaaggccaatataagaaactaaagcctaaagcctaacaattaaaaatgattgtcccatagtccataagagaatttctggagatgtaaatcctagcaagtttcttgtgctacattgctcattatatgatagttcacaatatcaactaggaaagaggttaatctagtttttacgtaaccttttcgccgctgtcattgccgacaacccggatttccagaccaacagatgctgcttcaggtgctagcgggatctcatcatacttaaggaacttgatagcacctggatcatagcgaaaaaaaccaaaatcatgtacctgtttcgagaagagggggaaaaattttggattaacattatgccattagcacagggagaacaa

SEQ ID NO: 21189 - DNA, 1932 bp, Oryza sativa
ttgatggtactaatgacattttattctcctctcgtacgggaggcgcgggcacacacgtacgcatcaggccggccgccctagtttatcctgcacaaagaaagaaattaaatttgtctgtaaaaattttctacttcgtttaatgagagtatgagagtgtttatgcgtgcacgtacgcgttgcagttgacgctggtgctgatcttgtaagggagggagacgttgcacttggaggggagcgcggcggcgcgggtgatgtaggggcccccggaggcgccgttggcgacgttcttgaggcagccgcagatggtgcggcgatcgggggtgttgttggcggcggcgagcaggctctgaatgccgccgcagcacgccctgggcaccgtgccccccgcctgcacgtacggcaggcacggcatcagcgtgttgtacaccgccgagcacgagatagccgcgcgcaccgccgtcggcggcgccaccacggccgccaccagcaccaccaccaccgccagcgtcgcgcaccttggagccatgtcagctaagctagctagtctcagtctttgctgctgtgtacgtacgttgttgtgctctctacaacctacgtgaacactgaagacagctgaaacgtgtggatggaatggggcttcctgggggtgtttatatagcggaggaagcttagcttggatttactaaggttgttgagtgcatttaggggaggagttaagaacgcgagctggtagcagatggccgtgtgtgtggtcagaatttgactgaaataggaggagggttttttgggggatgcatttttaccagacgtttgatcgttctgataattctggactctgtgatggtgtagtctgcaagatgcacttgctgtttgagctttttaacgtatgccatgctcgatttgacaattcggtaggattaaccatacaacttttgacggtgaagcgatgattaattcattttttttatgaatgtgacaaggaattacacgtcattctattagaataagcaaaagcaagtttttacacgacacggcagccggacaaccatcgcccgggattcgggaacaggaaaagaaagagaaactagaaacgctggctaagaaaccaataagctccagcaaaaggaagagaagcaaaaacagcaagcgagaactcactatatgtaagattaaatcacaagaactaaaccaaccagagaggagtgaatggttggtatacccaaaaacaaaaaaaatttagcgaaaataaaagttatcctcgaaatcgatggatcgcggtctgaccgaagtagtagcgccggtctgaccgcctggatatcgtcggtctgaccgaggttgtaacaccggtcgaaccgccgagatcaatcgccagctcctgtcgccgccgccggtctgaccgcctcgccttagccggtctgaccgccagtaggtcgccggtctgaccgccggtgagatgccggttagaccgccgaaacctggtgaaacacaaatcgaagaactctcaaagtagatgacaactttattgcttctctctgtgtttacaaagtgcaacaacagcattccttacaaaaatcttgactaaactcgaaaccctaactaaactatcaactccacgctttgaaaagcgataaaaaagcgataccggaaagcctcacgctccccctctatttatacatgaggtaggcagcctaaagccacgaaccaaactcatactaagagtcctaaacaccttacgaaaccctctagtacaagaaagaaactcaacataaccaatcgtaccaaatttggactccttccaaattcgactccgcatcccatacgcacacaatacctccatcgtatgccatatggaatcttcaccaaccacgtgcatcaactctagtcttagtatctcgtatgatatctaaccaccacggatatcgtcttaccact

SEQ ID NO: 21190 - DNA, 1412 bp, Oryza sativa
gagctcatgttaagtttgacatccgctagtttgaacagctcctgctagaaagcactagtaaaaatcctgtctctgacagaaatgataacctgaggcatcccaaagacatcatacacctgctggataaatgcctaagcaactgtataagcagtaaaagggtgtgcaagagggataaatttagcaaacttggaaaatttgtccacgactaccatgattgtgtcatatttgcctgacttaggcagtccctctatgaagtccatactgacagtcatccaagcttgcatagggactggcaatggttgcaacagacctggagacttgcagtgttcaactttggcctgctgacaagtagtacactgagcaacatattgctgcacatccttttgcaaccctgtccatgcaaacagatttttgattctctgataggtagctgtaacaccagaatgcccaccaaccccactgttgtgtaatgcaagcaaaactgcctgttgtgcttccttatgatgcccaagccatattcttcctttgtatcgaattaccccattaaccaactggaagtggtcacatcctttaggctgaaggggcagaatttccaagagctgtttagtttttggatcatgctcattgacggagcgtggggctcctcaccgggagaccgcgctggcccccctttgccggttcggccggggactctgggtgagactctaagctcccaatctgtggaaggttcgcgagacaggaagcacacaagacgccggcgatgtatacaggttcgggccgctcagaagcgtaataccctactcctgtgttttggtggatttgtgtatgaaggaactacaaagtatgagccagcctctccctcgttctaggttcccaatctggaaaagtctcctcctccctctaagtggggaagatcctccttttttatcttaaggggataccacatgcacccttttcataaatggacggagatttgtatagttgccatccgagtcaccttctgatgggacggtccacaactacctccactttcgccgggagcagatgcgacgtggaatcgtggctgtctactgacgacatgaccggtgtcagaccagtcacgtcggtcattcttgtccaccacgtgtcagcttagcaatctatatgttcgtccttcttcacacaacatcttgcctgtaatggttaggatgaagcctggcatatatctgaccagggctaacgtgccatctctgggaggtaacacgctagctccagctggggacaagcgcctagaagccctcgtcctgacgggatggggcgaggcgtgcgtcagatcgcctgtcgccacctaacccgcgatctgaccggtctgtgactggtcacagaccggataaatgagtgcactgcactgcgttacatgcagcgtgacacgc

SEQ ID NO: 21191 - DNA, 1205 bp, Oryza sativa
aggccatcctggggcaatgctgcgagatgcccgtcgggtacgtgcagctccccgtgggggtcgccggcccgctgctcctggacggccgcgagtaccatgtccccatggctaccaccgagggatgcctcgtcgccagcgtcaaccgcgggtgcagggccatctccgcttccggcggcgccttcagcgttctgctccgggacgccatgtcccgcgctcctgctgtcaagctgccttccgcaatgcgggcagcggagctcaaggcgtttgctgaggcgcctgcgaattttgagttgctggctgctgtcttcaataggtacactccacatcatccactaatctagtttgttgatttgtgtgcttgctcaaagtgttataagactttgcgctccattggcaggcccagagttcattaatgggggaacaatgtgctctttcagtgcatcttagggtagtcgtcttatgtctgagtaaatggactgatgttcatagctagctctgaatggtattttaagatcaaggtgatttcccacaacggaaagcccttctatcatgtgattgctgacagggtagagcccacagtgtgtaagctagcacatgcactggaggtactggacaatgcattatcaatactatgtttacttgttctaagagctaccagctaaatgcagataatgccagctcatagataatacctttctgaagtgttcaccttgaattgcctttttatgttcgcttaaataataccgaatgtgaatgaatcattggtttgtgctctccaaacttgagaatatgtggatttaagatctcaacctctagtgtgtatctttgcaccttcagatgttcagggactcagggtacacacatctactgacagtttacggtgttagaattttcagattaatgtcatttgtcttttggagtttttctgtgttactgactagtaactgtcgctctgtagtcagtatccttagaggatctattgtctctctctttttttttaaatgtacgatatgttgttttgttttattttgttgtctggaacctttacgtaattgtaggctcatgttcaaaagctttggttactgtcattaagtacactttagataacagtaggcttgtgttccaataagttattgttggttttcatgtttctaattaatgtatctttcttacattgttttctgtcatttgagagtactgagaaa

SEQ ID NO: 21192 - DNA, 4135 bp, Oryza sativa
ttcctgcagccccacctgcatgacgtaagtagcagtagtaggatcacctgcaagaagaattctgagagcagcaagcgtacgtggcgtgagattctgacggtgcgtacgtggtgttgtgtgttgggcctgcaggtttccgcaggactggcttaggagggacctgaacgtgatcgggttcgggctgatcgggtggatcgcgccgtcgagcgtcccggcgatcaacggcaacagcctcacggggctcttcttctccagcatcggccaggagctctcccacttcccctcgccgccggcgctcgactcgccgttctggtcagtacctctatcttcttcaggcacgcagtatagtactcctatataattagtagcaaaagcgttcagtggctacgtgtctaattgttcatgtgggttttgtgattaatttgcaggctgtggttggtgacgtggcaccttgggctgttcctggcgctcaccttcggccagatcgggttcaagggcaggaccgagggctacttcgacaagtgaatgaatccacagtggcttttggttagcttgactgtacggacggatgtgtgcgctgcatatccttccttttgtatagggctctgatttgatcctcttgcggatgtacgctgttgtaattctcctcaactccttaaaactttaaaggacaaatatatgtgttgtggctaaatctttttcgcaattagacacagacgcacgcacaaacgacactgcatgtacagttgtacacaattacacactcgcacagaccaccaaaattactggaccaccaaaattttgtagtatcacaaaaccaacccatgtttaacggtatcgaccaataaataccataatatctgatatcatgtagcaaattttgccatttaacaaatatttaagaacacaaaattgattggtttgtaatataacctttctctttacataattcattgattatacaattgtcaaatattttagaatttgttaaatagcattattgaggagtaagatcctggctatagtatttgtggatgtagcgtataagatcggtataaggatatgcacgtagatgtcataagaagaaatgcaattagatttttacaagttcgaaccctcaatgtgagtaatagttctattcatgtttatatctattgaccgaaagtatcacactgagtatgatgtctgaggtgggatctctaatctagcatactcaactaaccttgactaagagcaggtacaatagcaggctataagccaactataaacatattttaaaaagataaagaaatagagagaatagcagtgggctacagatctgtagccagttgcagcacggactccaaaacataatgtgtgtatgatatataggatcagatattaatagtatagtaagcaactattgtatgaattggttattacattggctatagataatttagagctagtagtgggctatactattacaactctaaagatgcggcaacaatgcaattggcggctagctctgggcttcccctaaatggatttggcatgaaggctgtggcttgagatttgacgccctattctcctaggacgtggtgtgtctttataccggaatacgaccctggttcaagtagatcttgatcccaagtaggacactagatcttgtccatgaagccataacgtctatgacttgaactatgcaatctttccttgtgtgacgcgtattcactcctagtatacccctattcatagatatctttttgtgtacaattactccctccgtctaaaaaaaaagacaaaccctggtttccgtgtctaatgtttgaccgttcatcttatttgaaaaaattatgaaaaaaattaaaaagataagtcacgcataaaatattaatcatattgtatcatctaactacaatgaaaatactaattataaaaaaaattcatataagatagacagtcaaacgttggcacgggaacccaggtttgccttttttttttgggacggagggagtagataactacattccccgtaaagtaagtatgagtgtatgggatacctcatatctactacttcctccgttttatattataagattttctagcattttcaaaagactggaccgacatatcttaagattgatgaagtcaacacgaacatcttgctgtcgataggtatctcgtctaccactgaaagaataattagccataattacaaacacctgtgatatactctcttatttcctaaatatttgacgccgttgactttttaaaacatgtttgaccgttcatcttattcaaaaacttttatgaaatatgcaaaactatatgtatatataaaagtatatttaagaatgaatcaaatgataagaaaataattaataattgcttaaattttttaataagaacgaacggtcaaacatatttaaaaaggtcaacgacgtcaaatatttagggacggagtgagtaggacttaaggtctgttcagattatagccaaaataaacctagacatagacttattcaaaaattttggcaatattgtcaaaattttggcaggattttttatgtatttaccaaatttaacaacaaactaaacatagacatttctttggcaactttactcaaaaatagtatggttgaaaatgacatcaatctgaatagccctaaatcaggctggcctgggtcaaatacaagaaacataaccggtgagctattcttgaacgaacgtaattcaggatacaacatattgttttgattctacataatttataagttgaatttccaaaactcaatcaaaccatcaatcttcaaatatttcaattggatatatgaaaaccatgtgtagattttcttttaaaaaaatcgtaaacatgtacaaaaaaattctgaatttttacattagttgctcgtttgctactgggctagctagcagtctagcaccacaccaacatggctaggcccaagcccaactcgtgatccagtcatccatagtcgactcgactttgggttcgagcgatcgaaactcggtaacccaggcgaggcgaatccaaatgcgaccacccgctggccggcctccccgctcgccgccgccgccgccgcatgaccaccgccgtcctccggccatccccaccggtcgccaccctcctcggccgctgccgcaccgcgcgctgcctcgcccagctccacgcccgcatcgtccgcctcggcctccacaaccaccacgcgctcctcgcccgcttcgccgccgcctgcgacgccctctcctgcccctccgtcgccgcctccctcctctccgtcgccgtcccggtacgcctgcggaacgccgtgctcgcctccctcgcccgccacgccccgctgcgggacgcgctcgcgcagttcaacctcctccgcgggggcgcgtcccgcccggacgccttctccttccctcccctcctctgcgcctgcgcgcgcgcctcctccctccccaccggcgcttccttgcacgccgcggccatccgcctcggagtcgacgccgacctcttcgtccgcacggcgctcatccagttctatgggaggtgcggcgccgctgccgccgcccgggctctgttcgattcactgacaaaccccagcgaggtctcttggacggccattgtcactgcctatgtcaactctggtgatattttgactgccagggagttgttcgaccaaattccacaccgaaatgtggtgcattggaatgccatggttgatgggtatgtgaagtgcggtgacttggagggtgcaaggaagctgtttgatgaaatgcctgagagaactcctgcagcgtacacatcattgattggcgggtatttaaatgcagggaacatgggagctgcgagaacattgtttgataagctagaggaccgtgatttgttcgcatggtcaacaatgatatcagggtgtgcacagaacggttaccctggagaggctttgaggatttttaacgagttccaaaagcaagaaatatgtccagatgagcttgttattgttggtttgatgtcagcatgctcccaacttggtaacatcacattggcaagatggattgaaggttacatcatgatttatccaatagacatgaacaatgtccatgtgatggcgggtctcattaacatgaatgcaaagtgggctgcagg

SEQ ID NO: 21193 - DNA, 889 bp, Oryza sativa
tgaaatgggatgcgtaaagtaattccgggacagcgaagtcaagtccacgtcggtgtcaagtcgtgcgtgcatggctttgcctacagccgacacggacagatcgtggacaaaccaaatctgccgggtggcccacctacacatggcctgatcagccgattggggatcggcccatcgaagccgacacaccgcacggggggcccatggcttcaagttgcaaacagtttgccactcactcgtgacccattgacccaagtagagctcaccttctgtaggagacgggcacgatgccggcgcggtacacgccgatctggaggaaggccggctcggccatgtcgaagtgggggcgcggcgggttgcaccagccgccgtcgtcgttggggagcgcgtagttcggcgggcacaggttggtggcggtgacggtgacgctgcccggcaggcaccactgcccatcgttgtcgcaccgcagctcgtagcacgacccgcacgccgcgccgtcgttgaacagcaccgtgctcagcgccgccgtgttggtgccgtacccggtgctgtacaggttcccatacccacacgccccgccttttcatgtacacaaacaacacgacacgagtcagattactcccggttttgtcaatgcgtccaaaaaaaaaaaaacaaagtgttacgaggagcagtgcacacgtacccatcgtgccggacgcatcgccgccgccgtagaacgtggcgtgggcgctctgccaggagccgtagtcggcggcggctcgccgggcgaggaagcagaaggccgagaagaggaggagcagggcactactgcgtgaggccattgttgcaaaacagggagaagatcacactaccaacaatgtcctgctagctacttcactcggcttaagct

SEQ ID NO: 21194 - DNA, 4218 bp, Oryza sativa
acactttatcttgtcttccaccaccatcatgtcaggcatcaatagacccccccttaggaacctctgtgcttggttcaccactgtacttgagatcaacatttccaatctgtcccccctcaatgactatctgctttccctccctctgattactcttttctggaaaatctgattgcatctatgttttcccctgtagatcatccaaaacctgatcactaaaccaaccttgttcagtgtaacgccctgattttcgttcgggaataaaaatcaattaataatacattttctagaaattaaataaaagttaaatcaacttaatcaagtgaattatagaggaaattaaaatttcctttaaaaattattggccgggaatattttgtaatattctttgtgccctaatgtactctccggaattttccgtgaattttcggagcttgagaaatagttttaatagcacaaagatcattgcatcaattaaaataaaaagaaaacaaataaaatcctccttcctctctttgggcccttttcggcccaagtcttccttccctcccacggcctgcgcgccccttttctctccctctcgggccagcctcctccctcggcccgctcggctctctctctccctcaagtctgctttacctccctcgcccgttttcccttctctctctccccgacaggtgggacccgaggccccacctgtcatcttcttccccaacctcccgtcgccccaaccgccgccatggccaccccgtgctccccacgtcgccgccttcctcgcgtggttccctctcccgcgcatgcgtggacgcggtcgccgcccacgtccgcgccgtttcccccacgccctgcgaaaaccgttgccatcccgagctccacttcgccaccccacgtcgccagccgatcccgcctctcccgggcacgatctccatccccgagccctatataaagcaccctcgtgctcccctctttcgtttcccactccatcccgagctccctgcgcttttccccgctctccccacgccggtccccattgccgccgctcgccagcgttctccagccgcgtgcctcagccaccaccgccgtctccgcgctgcgccgccgccaccgccagctttgccgccgcccgggcaagctcggccaccgctccatttcccctctccacctccgtagcgccgtagccacgcgaaccacctctctccgccgccgccgccgactccagccgcgtcgcgccgccgcttcggtcgacgctgacccgcgccgttgcctccctcagctccgcaaggacgaggaggacctcggtcgccgcccctctttgccggaaatccgccggagctcctccttcctcggtcgtcggtgagatccttctcatattgtcgcggtcggccgtcgttaccggtcaccccgcatcggtcctcccctcccgaactccctcttctccttctgaaggtcaagggcgaccccgtccgccctccgtcctcgcaagccgccatcgggcaatcgtcgtcgccgtcatcttcctccgcgccggccgccgcttccggtgaggacctctcctcccttcctttttttttcccgtccccctttcttgccgatctccgcctcttggggtgcgtcgccgtccccgtgcgcgccgctgtcctccggccgcccgccgccgttccacgtcgccggctgctgccgccggtggccgcatgccgccgccgccgcgccttggctcggccgggccggcttcgtgccgcgcctgtgcccctggctgccgctcccctcggccgcccgatcggctcaggtcgatctgggccgtccacgtggtggaggcgcacccgaggccacgtgtggaccatgtccaccgtgcgccctccccctttgactcgctgacgtgtggggcccgcatgtcggcgccggccgccccttgctgacgtcagcgaggtccttttcctttgtaaaaataaataataattgcgcaataattcgtgaataattctagaaattcatataaatggctcaaaacttctaaaattcatatctaattcattcgaactccgaattgagccattcaacttgcaaaattcatctaaaattgagctctacatgtttgtttactttttatatactgtttccttggtttttattagattttttcctcgttttgcgtgcctacgtgtagaatccgtcgtttcggaagatcacggtcgcaaggataggagttcggaagattgtttgaagaagcaaggcaagtcacacattccctttgagcatgttgatcccaatttacaaatgttttactgtttgcaaataaatatgcatgttttgctaatcacatggggtcagggttttacctatctgctcgcttgtgccatgtttacttgatatctgtcctttgtcaaccatgggtaataaatcgcctagcttgtgttactttgatgacttagctagaactatatgcttagccatgcttaattaccactagctcagttgatgggataattacagtattagacctttttagtatcagagtgagctgcgtgctcgagacatctggccatgcttcatggtcgtaattattcaactaaaatgcgactgaatggtgggctatgggtgcatggttttgctggtcgcacccatggcagttaaggaccggttcgcgagatgccctggaagaacttatcgtacttaccacaagccagcgtgggcaacggctgggcttgtagtgtagctttcctctagtcgacgcatccaggcaagggtgggcgtgatggagcggggcgggccctgcgacggcctctgtcgcttccggattcacctaggcacgagaggggactgcccgttgcccgctggggacgagggtgaaacctgaggtgtggtgtgcttggctagagggggttatgcgaagggtcctgtcacggcctctttccggtatgtcgtggtggcatgtcggcgtacggaaacgtgtcgtggggctgtgtctcgtgggtacagttgtacacctctgatcagagtaaaactattcgaatagccgtgcccgcggttatgggcggtcgaccagattcaccgtgattagtcccatcttaataaatcgacccaatacactgtagttcaggtgggttggttgggcctgttcaacgtggtgtagcgttgatcagtggagatttaatgttactttaattactcaacagttttactgttttgctcaataaaatgttttacaactgcctttatgcaaatagccacaaacccctccttgtatccccttgcacatctgcatcgttggagtaagagtaagagtccggtcaaaaaaaaaaagtaagaaagcgaggcaagcaatattttcatggatcctgcaccgcctacttatgtggttctcattcttcgccaccatcttcagcaagctcttcgtctacgtatgtaaaatgaagtagtgacttagattttatgtgttaataatattggtggtttgtgatattatatgtgtgaaagattagtttcttgttatgagatttcggagtataatagatgattggttttgtgaaataacggttgttgtttaccggccgggtgtggctggttagactgtgggttatgtggcagtcagaccggccagcgatgtaggatctcttattatgatcgagttttttgttgcaagatttaatttcatcctcatgtgaattcacgcgtgttttatggttttggtgcagcgaatctgatcattcatgtacttcacacgattctctagctagatatttgcattcactgaattagttgtatgtgcagaggaattcatggcaaccttatcttctgctgcttgcaaattaatccatgaacacttctaacgccaaaccgttgagaattctttagaattgtgcgctgggttagttcatcgatttcgctatgatgaagtggacgaatagggaaataggcacgatcagaaagtttgattttctgtttcatgttattctgacgaaatgtttttgaatctagctaaatgtttgcttagctttattgagcacaatgcattggattaacggggacgctactgagccttgattaagaatagtctgagttttggatcacgttaggagtttatttaggatcatcaatttttgacagtatagcttctgtaaccacaccttagaacataccgtatgagtatgtgatttgaaaccaattgtttcagcacataaacttgtagtatccattagaattatgacatgttgtcatgctgat

SEQ ID NO: 21195 - DNA, 1223 bp, Oryza sativa
tcctcctcttccggatgtacagcgcggcgaacagcccgagcaccacggcgacggcgcaggatgacacgccgacgaccaccccgagcttccatccgggcagggccgccttcttcttggtggcgccctcgtcggggagcatctcgacggtcatgttccacatgagcacgcagttgagctcgtacgtctcgccggtggacgccgagaagccgaagtagcccttgttgccgcggaggacggtggagaggtccagcggcgcgtcgagcaccggggtcgagggctttctggtgtcgttcttggccatgtacacccacacgtgccgcgacgtgccattgtagtcgacccagacgaagtagttgccgtcgtcagtggtggtgttgctgggcgcgagctggatgccgaatggggtgagggaggcggaggcgttggagcggacgccgttgatgtcgaggccgacgtggttgtcgtcgatgtcgtagggctgcttcacgctgtccagctccacggccgcgaacccgttggtggcgttgccgtcggtggaggcgttggtgagaccaaggaactcgccgtggctaccgaccggcggcccgcgggcgttgctggacgcgacgacgaacgcgagcccctcgcccttgaccgttttgttcaggttcgagcggaacaggttaaccttgaacacggtggagaacgaggcgacgtactttccatcggcggcagcggcggcggagttggacgacgacgacgacgacttggattcccagacgacgaacggggcggtgaagaaggcgtggccggcctggttgacgaggaatatctcgggcctgttgccgctgtccggggtgagctgcaacccgtcctgggcgatggtggcgttgcctgagaaggtcaggttgtcggggagctgcaacaggggcttgtcgaacttggggaaggagaatgtggtgaactccttgccgtcgacgttgctggtgaaggtggtggcctgcgcggtggcagatgggaggagcaagaaaacggacacgcaccacactagcatgagcacggccatggcggcacggcggagacggcgcagaagcaacatggagcagtggagttggcgatgcataagtaaagggagatggagttggtgatgtactgatgtacagtcaagggggtattcgcgggaaggaattggtccagtggttgtcgacttctcccacttgcggacttgccaatcgtgccacctg

SEQ ID NO: 21196 - DNA, 3528 bp, Oryza sativa
cgcacatccgatgttgtgtatgttcaatattgtgattcgggtaaaatcattggctcattgtgcatgtggcgcacatccgacgttgtcaattggagcgatcgttggctcataacaaggatcacacgtgtgaacgtacctagtaggctagtaccgtggctgcgccccttgctaagcttgcaagcactagtatcagcctgcaggcgagcagcatgcacaaccgtcgatgatgctccactaatatagtcagagagagaagtgcgcctcttacatgtgagagtgcgcttcttacatgtgggtctatggagagatcttctgacgttaaatcagagaggcatggtggctgatatatgggtccataaatgatgagtctcatatatcagtgaccatgtgcgcgctgtacactaatgtgagaggatttggtttcgtttaagcagagcacacaacctctgaatttcttcactgttactagttgcatgtttcctctgtttctcctctgcgggcataaggcataagcgagcatacaagatgtaaaaatgtatagcaagttttttgaactaaaagtgtgaatcgatgaacaaaccaagttgtactattattcagagaattcaggggagcgtctctgcatccctccgagataatatgatcaagtacacactatcctggacttggagaaacaactctacggactgaaatcacgaagtcccacggaagatggaacccttttatttggtgtttgacactgacactaaactgcacgaacgcacaacagcatacagctttagtaagtaacacgacataaactcgataaattaagcggatgacagacacggcaccggcactgcatgcagtactctttgttgctcatggcagagtgtaatctgtgaaagagaattgagaaggaatcgatcatgttagattgttagcgccaaccaactgaaaatgatgaaataatcatagattgttcgtggcaagagttgacagtttgacatgttgattaggctgtcttcttcccttttttttttcaactctattcctccttttcaaattattaaatgatgtgattttttataaaaactgttactattttttaagtttttttaattaatacttaattaccatgcgttaatgactaacaccgttttctttgctgctcccgatctcagcttacctccgcacttgtagccgacggggcggtcggcgatgttgcagcgcttggggatggtgatggcgacctcgggcttgatcccggcgttcctggtcgtgctggacagcatgacggcgcagaggcacttggggctctgcttcccgatggtgtgcaccgccgtgcagcacccgctcgacggcgtcgacttggggtccttggccgccgacgcgcacggcgccagcttcagcgccatcttgtccggcggcgtcgccccgcactcccctgcaccgtccgccgccgccgccgccaccaccaccagcgcgagcaccaccaccacgacacccctgatcaccgccatgtcgatctcgatcaatcgatcgctcacacacacacacgcacgcactgcgaataactagtaattaactaccccctgtgtcacgctgtcacgtagtttttcgttgatgggcttcatggctgctggtgctttatatatatacaggcgtagcaggtgaggtgacacccccatgatggtcggggagagtggtggagcgagcactatcgcctcaccggctcgcgtcggccaatggcgccgtgcaagctcggccacccgcgcgcgcggcgatcgaccgagaccgagcggagagatagctcgctcggtgcgcgcgctagtgggtgggtggttgtctcggcctctcgtcgacgcgcgccgcgtttgtgacgacctacctgatcaagttcgcatacgtgccgtgctctcaagtctcaacaacgcaagcatccaagcatggctgcatgagcctgagaaaaagcatcgtaagatggttcaatcaaatgttgttgcgcagcggtagagaaaaagagatctcgactagtttagcgagtactagttttgaacgtccactccttacttccactccttacttgcatactactcaaatagttataaaaagcttttaaaaaatatattaacatgtgatatatcactctacaaacatacaacttaaaatttaacttctgtatatgacaacaaaaaataaattaaacttacaagtagaaattaaatgttaagttacgtgtttatgaagtgatatatcacatattaatatatcttctagtttttattaatttatttgtaactatttaaatgatatgcaaacaacagaaaaacatccatacaagagttttggtggtgtgtcggtggtgttggtcatcatttcgttcatcggctaagcacttagtactaattataacctactaggattgtcaaaagcacaaatgtaaacgtgtaagtattctgatgactgatgagaaaaaagagtgtaggcgtgttaggtgtagccgtgtaagcgcgcccggccggcacctgtgcacagcaacggtgcattgccatttgccacaatcccaaattcgatgctccgttcataagggagtgtctctagaaggagagtgccctcaaaattgaaaaagaaattcagatcgacgcttcatcctggccgtgttgggcagtattattacaaacttaaaaattaaaaaatagagttggacgaagattaagatagtctacctaaaataaaaaagccattaacatataattaaaatagagttggatatagattaagttagcatacgtaaaatgaaaaagtcacatgattaattaagttttaattgttacaaacttaaaaataaatttatttgatattttaaaattatttttatataattttttgaaaaacatattgtttagcggtttagaaaacatactaataaaatccttggtaaaatccacgtcttaataaaaaaaacaacataagatatgtaagcgagaatgctgggctaagtcatgtgcccatcagcccatgtgtgtctagtgcccctgtgcagcgggcggtaggcgattcgcgccgccgccggccgtggggcgtcgcgtcgcgtgatggtagtatcaggtgggtgggacaattgggatggaaaaatatactttgactccctcaactatagctccgagtatgattcatatcctttaaccacaaaaccaggtaaattgactcctccaactatcaaaaccggtgcaaattatatccctcggtgattttagctgacgtggcgcctacgtggcggtattgaccaagtctttgttctacgtggcgcttatgtggcattagaataaaaataaaaaaaaggtaggacctacatgtcactcacacaaaaaattatattgtgggatccattgatatgtgagacccacatgtcatcctccctctagctccttcccggcttcccttcttcctcctccctccttccctctctcccccagcgtttctcttcaccccggccggagcggcggtggggagtggcggcggtggcggtggtgacagacgaaggga

SEQ ID NO: 21197 - DNA, 645 bp, Oryza sativa
atatgtgcagataagagatatctcaaatactgtgcaaaatcattacgtctattagtatatcagactttgtttcttaaatctgcagtaacagataaaggaaatcgttccgatcatgatatactaattacactatcaattaagcactagatataatagttaagaggcggggatcaggtaccctgcggcggaagcgttccggaggcctgcggtccctccggttctcacgggagcggacacggacgatgtgagcatggattgcacaggacacacagtgatgcaccttggcgtaaagcttggggagaacgtatcctgcaacgagatagttgtattgtatgccatcaattcaacaatatcaagatagaataaaaatttccagcagtatgcaaatcgccagtgtgttatcggcgatcacaaatccaacctctactacgatttcgcatcacatacaaattcagcaaaagaaaccaaaagcgggggagaggaaacgcaccatcgtgcacgcacgcctcctggacgtccctgatggcggcctgctccacgatgttcctcacctgaaacctcttgatcgccttgtcctgtcccgcacccaaagcaaagattcccaaatcaacacagagatccagtgggtgcctcgcgcgcaacgag

SEQ ID NO: 21198 - DNA, 1163 bp, Oryza sativa
ccctcacctccatctccgccaccgagctgcggtcgcgaagggacgcgatgcggcgggtgatggcgtcgaccttcgggccgacgaagggacgtgaagctatgggacgatgacgccaagagcttcggggacgatgacggacggtcgggccgccgccggatccgtcggcgcagccctccctatcgtcggatccgccgccgccgccttccccaccacaggatccggtgccgccgagcccctcaacgccgccgctgccgagcttgtctccaccgtcgccgccgagcctgccgccgtcgcccgagccgtcttccgtcggcgcagccctccccatcgttggatccgccgccgtggagccttccgccgtcgcccgagccatcttccgccgcccgagccctccccatcgttagatccagcgccgccgatttccccaccacaagatccggtgttaccgagcctgtggcttaccgccgccgtggagcctgccgctgtcacctgagcctgtcgccaccgctgctgccgagcctgttgccgccgccgtcgatgagcccgccgccgtctcctgagggcgagcagggcaagtgcgcgagcagcgtcgtcacgccgttcgctcgtcccagtccgccagttttggccggatgagttggtcccggatctgagagaaatattcctctctagggaccaacccatcccacctcatcccagcaaccaaacactacctaaaattggtctcaatcgttcggatagcgcgtgctctccaggtaagtcaggcgatctctttgttatcccggctgggtttcgttcgaacgctgcaatgctgcgtacctgtcgtccactcgtcccgtgccggtcgccgtggcgtcacgctcggcgcgcatgcggacgcagtcccgatcgtgtcaagcaacagagcgcggcgacgcctggtcggcccgtgcacgcgcgcgtcgcgcgtcgcgagatctctggcacggaccgacggacggtgacagaaactccgcccgtacgcgtaccacccagtaccgttacatcagcatgcggcaagaaccgatctgtcgcgcccaggtgatcgaaacgtgaggctggccaccggccggtcgtcggccaagaccaacccaccgcgggaacatcagcttcgccgtgaatggaactactcgtggaagtgacgg

SEQ ID NO: 21199 - DNA, 660 bp, Oryza sativa
ttatggattgagtgatagctgggtgcaggtaatttcacgttggccttgcctttagtcttttctgaagttgctctgcttggtcggacagctatgattcgtttcctgatggactgtcaacctgaatgttctatgtaattacgcgagtgcaatatttattgttctggagaaatattcatgccattcacttgaagtgttcgctgacagataaatgctgcagtttgtaaggaagaggagtaaaggacctcgcttgattggttttggacttgtctaatatgctagtgttatgagcaagtggagaggttttggatgcatgaaatatttactgttcaatatgattatccttgcaggctctagctaagaaggaccctgtgcgaagacaagttttgcgggtcaaaggttgtttggctggatccaaacagaaaatctccttgaacagggagacatgatccttgctatcaataaggagccaattacatgcttcctagatatcgagaatgcttgccagaaattggacaatctgttgattcagatggagtccttaacatgacaatattccgtcaggtgaggactggttgtaagaaaccaaccatttttttttgacgaaactgtatgaatctaaatatctatgtgttcaaccgtgtcaacatttaacagggaaaa

SEQ ID NO: 21200 - DNA, 717 bp, Oryza sativa
aaactgatttcccaaaatttgatggagacaacccaaagctatggaaaactaatagtgagaagtatttcagtatgtaccaggttccttatgaaacttggtcatcctttgccacactccactttgtagggaatgcagcgttatggttacaaacctatgaggagttgcactgtgtagagagctggccagaattgtgtgtagtagtgcatgggaagtttggtaaggacaagtaccaacaacatttagaggagttagaagggttgagtcaagttgggggagttgatgagtattatactaaatttgaggagttgatgcatagggtcttagtttacaacaagagatatgatgagacattttttgttactagattcatggggggtttaaaaactgagatcaaaacaactataaagttacacaaaccaagaacggttgatctgacattatctttggcaaaaacgcaggaggaattattgctggagagtagcaggaagaactactccaaagaaggatacaaggatgcttacaagccggtgattaaacctgtttatcaaggcaaagggattctgggagcatcaccagaggaggctaagaagcctgaggagaaacccaagtgggaggaaagatttgacacactgaaggcagcaaggagagctaggggagagtgcttcaagtgtggagaaaagtatggcctagggcacaagtgtcctaagtctgtacaat

SEQ ID NO: 21201 - DNA, 4039 bp, Oryza sativa
gtccacacgtgaaagaacctaatgaatatcgaagactgctactgagttgacaccattccaagaattgaattcattccgcaaaccaggacctatatcattaccaactccagacagtcttgcagaaactattaggggatttcaactaatcctcacaatatcggttgtgccccacgcgcccatatgatatcgatataggagatcgttttaaatctaatcggagccacaacttaataagattgactagtcttttaggtaagttatattctactttctccgtttttaatagatgacaccgttaaattttgaacatgaccactcgttttattcaaaaatttatacaaatatataagatatatatcatacttaaaatactttgagtgataaaacaactcacaacaaaataaagtataattacgtaatttttttaataagatgaacgatcaaacgtgtgataaaaaattaacaatgttatctattaaaaaaacagatataatatttttaagttgtgctctccataataagacatcttttgcttgatgtattacaatgacgatgttgctacacgtggacactggtgcaccatcttctagtagatgtatcgttcatcgcagagggcacaaatttctctatcacatataggaggtgcagagcaaaatgatggatccaccaggccccgcgtttgctgcttccgctgaaaaacaccgtgaaaacaaactaaaatggggcgcattgttcacaaaatttcgctgctttggcttcaaacgaaatatagggcgatactcctacaaaatcgcaaacttgttgtgtggtgtacgtataccactcttagaccttgttcggtttagagaggtttaaagaggattggagggggaataatttcaaatcccctcaaattctttcctcatagggattaaccgaataggccttatgattattcttttccccaattccggaggccattttgtactaacattgctaactaatatctccgtaccttatatgtggttaaattatgagaacgttcgactcgcatgcaacaaagtatcatgtgcattagccatttggcctgcaggtcatcacataaggcatacttgttagggtgcacagtacacacgctactaattaagcgaaggtgtgtcacaccctcacacgttccttgtgttaaacatagcacacgccacgacctgccacacttattttgtgcacataaatggcttgtcctaattttaagtcaaattaatgttgtgtttactgttaaactctcgagtattagggactgaactaaaaaacgtgtgattagacgaattgtgaaagctaaaacacaaaatataataaagtttgatttttgaagttcacaaatcctagtgacaaaaaaatagacagtagataatatgtgggaggataaatgacacaatcactaacaagtcggataggagtgctatgactttagagaatatggagactagagtagggagcccctaaatttagggatcttagataggagtttcttgaaacagtgttttagtaactttacatagtgggatagcgagacaattcgtgtaaccattctatccactaaaccaaacatgttataatcgtaagcacatctgacactatgcagagagtatcatctattgtcaggttgagtttgcagaatgacttctgagataatatatttacacatcgttttaagaatcatctctatacatgtatcgtcctgatatttctgcacgtacgtagtgctactttgctagcctattccattaattgaccgggattgccaagtgtccccggtatccatatatgttcatctcgtttttgtgtcataaccgtcataacgtttccgctcctgatcgatcggcttacacacgcccagcactatataaccagctcccaagcgagccgggagtagtagccaacgagcttatagaacacaagtacaagaagctatcagaaatcagaaacgctagctagcagtaggaacaaacaatgaggtcgtccccgatcatcttcctgctcctggccgccgccgccgccatcgccgctccgtggcaggttgcgcacgccgcgggcaagtgcggcaagacgccggcggagaaggtggcgctgaagctggcgccgtgcgcgaaggcggcgcaggaccccggggcccggccgccggccgcgtgctgcgcggccgtgcgcgacatcggcacgcaccagagccacgcgtgcctgtgcgccgtgctgctgtccagcaccgtgaggcgctccggcgtcaagccggaggtggccatcaccatccccaagcgctgcaaactcgccaaccgccccgtcggctacaagtgcggcggtacgtacgtattgcgtgcgaagagctttggttagcttcatattataccgtttcatattacaagtcagactttttaaaagtttgattaaatttatagaaagattacaattatatcattaaattagttttattaaatctaatattgaatatgttttgataatttattcattttatattaaaaatattactatattttttataaactcgatcgaagctaaataaatttgatttttaaaaaaatcaaagtgataacagatgtagtatataatatctctgtcgtagaatataaacatttttgcgtatttttcgaaacatatttggacatctatatatccggatacagttcaagaaacacatagaaatgattatattttaaaaccaagtatatgacaagtgtgatggttctctgccttttgtagcttacacgctgcccagcctgcagggctgatgacgacgtacgacggccttgtttaggctctggcgccactaaaagctacctacagatcgcttacagcatactactcctataatactgttgcttaagtgtgctagctataccctgcactgctgatgaataagtatgatcgagctagcaaagcaactctacatggttgggacgtcaacactggttaatctcgtgcgctgcaaatggtctgctagtgtaatcctgtccgcatatgctgcttgaggttgtaatgagaatggacaaagtttactatccgcccgactgatacgtataccgaacatttacgtagcaatgagcgtatgcagatacgccacacaaaactatagactggcatggcatggcatgttgtctgtgttgttgtcacactgttgcgtgtgtcagatgcaggaaaatacatagtgaaaacctaaaaattactaattgaaaactaaaagtccaagatttattacgtcaccatagagtgaaattttctctcaataaaagttttactcatgagtaaatctacgagtgaaattcttactcgtgatgatgtgtacgaatctcaaacattcatttttcaattcaacggtagttctctagtttctgccgtatattttcccatcagacgccggtgctccctgctccgtggcgccgcaacgggctacttgtcacgtgctcccgcctcacgtttgccacctcatgggctgggcttcctcccgcaaccaagcccagaaactcaccaacgccgtggcaaacgctcaatctcagccgtccatcacgagcatatcgcccgtgaataccaccaccaccagcaaaccaggcggctcgatctccctatcccctgattcccctccagcctctgcgtccccattcacctctcctcctcctcttcttctacctcgcgctcgctcgcttccctcgtaaaccatccgcgcgcgtggtccttccatggcggccggggctctcctcctcgccaaccccgccgcgcccacggcgaggcaccagcaccggttgctgcagcagcggaggcagccgcggctcctcgcctcctctcggcctccccggtggcggctctccgccgtgcaggagaccaaggagggggaggcccagacggccgaggagatcaccgagaagtacggcctcgagttcggcctctggaaagtaagcacgcggcgcaggcagctatatttgtcgagttggagagcaaatcgatcgtgagcgcaatcgaatttgccgcaggtgttcagctccaaggaagggga

SEQ ID NO: 21202 - DNA, 660 bp, Oryza sativa
ccagcaggcctggagccactgggcggggtccccggagacctgatcggcccggaacatcgcggcgacggcggcgggcactcgggtgcggtgcttgaggagccagtccttcttcaggatcccggcgggggcctgcggcggcgcgagcgggtcgcgggccttggcggtgcgagcgaggatggaggccttggagaagtccgggagggcgagcaagttcatgggcggctgcctggagctcagcgccgccgagatcgcggggtgcagctccgggcaccccacgatggacaccagcgacagcggcggcgtccgcagctcctccgggtagtcctccatggccgccccacccgcggcgccgcggcgaggcgaggcgaacggtcgggaggcgctaggtccggtcgccgccggggtggtggccggggaggacggggagctcggatctgtggtgactgtttggttcgtttggaagaactgggtgggggcgaggacgacgacgcgcaaggagtggaaacacgtatcgctatgtgagatgtaataatgaatatagtcagggtgttttctatgaagtctgaaggaccttgttataaaatttcagaattctgacagtcatcaggttaaatgaacaaatcaataaactacgtagtagcttgtactccctccatactc

SEQ ID NO: 21203 - DNA, 672 bp, Oryza sativa
gaggatgatgatgaggaggatgacgatgacgactccacccccgatgcgtcgccgagggcggaggcgaaggcggagggcgagagctccaccgtgatggcgggctgcgccaaccagcccgctgagcccgaccccttcctcgacggtgacgactctggaacggaggaggagcaggcggcgttcatggtggagctggagcgcttccacagggagcacggcctcgagttcaagcctcccaagttctatggcaaaggtctcaactgcctcaagtgcgtgtctttctacacctctcgtttctgttagctcctcaacccgagtacacccatctcttctcgtctaagcttgctctgttccttttccaatccaggttatggaggcaggttgcccacctgggaggccatgagcaggtatggtcctcgactccttgtcactagcttgctcgctgctgctactgtagagtaaaatattttcggtgacatatgtccgggtggatcacgatcaaataagttcaacagtgattagtgagctgcaaggactagttatatttattctagttaaatattttgcttgttcaggtaacaatttgtaaactatggcgtcaagttggagagactttcaggccgccaaagtaagcctctaattttcacagaacatgttattcgcacaaaaaaaaag

SEQ ID NO: 21204 - DNA, 1144 bp, Oryza sativa
taatggtttgatcagtcaccagttcagtttctacctgaggagaatcaatcaccgatctgcagactgcagccatggccatgagggcaatcacgctgtcccactcgcagagcgcctcgtttgggcaccaccaccaccaaaccatgccgtcctccttcaggccaagcactgcctccaccagatcagtaaggtctacgcaaaggaagatgaggagaagggcagcaagcagtcattgttcgggagcatcaccgaggcgctggacttctcgcaggccggtcggagaaggacgcggagcttctgtatgaagccagagaggccacaaaggatggaggaaggatgacaaaggagcaggtatccattgaactactgatccgcacaaaaaattgtcgatcaatggtgttatttagtttagtagtaacttagtactgactatacacggcatggattttctatggtctgacaagttaatttgatttgcaatgaagtatggagcacttcggaggaagatcggtggcacctacaaggatttcttcaagtcatatgtggatggtactacctcatatatgctttacttgcagaatcctaaaattacttctgatccaaaaagattatactagtaggagtatcgcacagtcctaactgtttctgaattctgcttgcagttgacggggaatacgtagaggaaggttgggtggataagacctgcaaagtttgcaagaaggacactagaggggaacccaggcaggtcgacaagctaggaagatatgcacatgtcgcatgcttggagaacccaaaaccgaccaacatcttcgccaaattgttcgccagatgaacttcaattgtacaatcaaagacatatttttactcatgcttagatacatagatggtgttgtagccccaagaatttgaacaatattatgtgttcagttttgccatataaaatggtatacagggagcatgtcacacattttccttcttcaattgatccatttactcacgaacaaagcaatgacttaacagacctgaacgactgaaaatgttaaatattacatcaagtattacagagcaagttaatacactaatctatctattagcttatgcccctggtctaatataagaggagctcaacagaaactcaagtcaaaag

SEQ ID NO: 21205 - DNA, 657 bp, Oryza sativa
ctgcaccccgcattgtggttttgatctggtccctctcctgaatccatgcaagaaaccctaaaaaccttcttcggccctttccaatttccgccagggaaagactcgatgagatcggcaagaagatcaagcgagagccggacaccgccggcgtcgtagtcgccgccgtcgcaggcaccggcaccggtacagccacgccgatcgagcaccgcgtcccccatcgcctcggcctcggcggcgccgtgaacaccgtgaccccgtgcgccgcgtgcaagctcctccgccggcgctgcgcgcaggagtgccccttcgccccctacttctcgccgcacgagccccacaagttcgccgccgtccacaaggtcttcggcgccagcaacgtctccaagatgctcctggtacgataccattacaggtcaaagcattccttaaattgtacctttcgctagcttgtgcattaatggcttcgtcggtgcaatgcggtttcaggaggtcggcgaggcggagagagccgacgcggcgagcagcctggtgtacgaggcgaatctgcggctgcgcgaccccgtgtacggctgcatgggcgccatctcgatgctgcagcagcaggtgaacgcgctggaggccgagctggaagcggtcagggccgagatcttcaagcgc

SEQ ID NO: 21206 - DNA, 733 bp, Oryza sativa
ctgcaccccagttttggtggatgccacagaccggcacgctcgacgaacaacggcgacgaggtagtcgagcagggcagcagcagccacaccggcacgcgcagcccgctgaaccgctcctggcagagcagcaagcagaggacggcacagccggagcacagcgtccggtccgcgcccgcagccgccgcgcagttatgccgtggtgaactcgagcgccgccgtattccgctacgcgacccacgtctcgccgtcggagttgaagatgccgtcgccgagcaggtcacggaagacggtgtgccagaaggggggtggccgccgccgctcgccgtcaaccgaagcaacccagccgcgcccgccgtcaacctaagcaaccctggggaagtgaggaagaggggtggccgcagccgctcgcctgcgccgccctgccccgccgcttgcctccccgcgttccctgcctccgccgtcgcctcgccttgcctcgccgcctccgctctcctccccgcgctcgctgcctccgccgccgcactcgctacctccgccgttgccgggaggagagagtgtgtgtgagagatagaagagatagaagagagagagagtatgacatctggtcccacattttttaataaacagaacgctgactgactgccacgtgtatgccacgtaatttaaaaccaccgcggattggatcgaggggggtaattcgtccggtttgcatagttggggatgaagaatatcc

SEQ ID NO: 21207 - DNA, 1404 bp, Oryza sativa
aacgaaaaaaggaccagagcgctaatgttattgtccatcggcctcgtgttgcagacgggcttaagaagagtcaaagtaggtaggagtagagcttaatctccgttccaattttgtgcacgtacaaaaaaaagatctccggaagagaaacacaacatggaaacataaaattttgatgttaccctgtgcaaccctgcaacgcggcgctcgacccaggccccccggtcgcacgcatccgcgccccgtgcgcgcggctctcacgccatcgcgccgacgatttcgttccgcgaggcaacgacgtcggcgcggcacaccgggcacgtcgtccccctctgcagccacaggccgatgcactccgcgtggtagacgtgcccacacggccgcagccgccggcacggctgtcccccgccgtccgcgaccgcgaccgcgagcctccccttgcagatcgcgcagagcgccacgtcgtcgcccctcgcctccgtggcggcggcgacgtcgatgatgacgacctcctccttgttcagcaacccttggcgctccccgttgggatcgccggtggcgacctcgaaccgccggccgattaagcatcgcacggtccaggagatggcacagatcgcggcgatgagcgcgacgacggcgaggaatatctcgaggcctgacagatcaaccatcggcgagagttcgttttcgtagctaggtacgtgttgctggctcgatcgtcttggcgagtggtggaaccctgcacgcacgcgtacgtattaacgtataccagtacgtgctccggctccaggtacgtttgttactcctacttgtttcctatactgatttgtatttcgaaaaggtttgtttttttcccagatattactgcggagataattaaacagttcgtatcagaggagaaaatcgttgtggctgatctccacgtctttgttactcccacaaaaatatgaacaaattatggctcgcatggatgctagtagtatttctgcttgctttttgctcatggaaattattaaaggactaggcaactgggcatttaaggagtggcaactgacaagtatgggctaactcaaaggcgcagacataatcaattggaagagtgcttaaccacgagcatcagttagttttacactgaggcattggggacatggcattacttatctccaatcgtgtggtgttcatcagaaagaaactttggttaaagctttgctcatagggggttgtttattgtgcaaacacacaagtaggctatttgatggtgcaaaatattgtaagtgtatgtggatgggcagagctaattattccctccgagaaatctcagttatcattcaagattgaccctgaggaccactagatagcagtagaaacataaaatctgaacaacactgagcgccattcagcactgta

SEQ ID NO: 21208 - DNA, 659 bp, Oryza sativa
aagccgacagctgtaaactggatagaaggccgggggaaatctgttgtttgtgaggctattattaaaggagatgttgtgcagaaagttcttaagacgactgtagaaaaacttgttgagcttaacattatcaaaaatcttgctggatcagctgtagctggggctcttgggggttttaatgcccatgcgagtaatattgttactgcattattcattgctacaggacaggatcctgcacaaaatgttgaaagctcacaatgcatcaccatgttggaagaagtaaatgatggagatgatcttcatatctctgtcaccatgccgtccattgaggtgattatttattcgttttactttccgttcctacctgcattatgtagattatagcataacctgctagccttaaatggagctgcaaaatctatagcatagagatcttcttgtattaactgaagtaatattttgttttagcatgcagtttgatcgtgagagcaatatccgcatcgatttttatttatttaatttcttcatgttagtaaaatggttcattttttctctcaggtaggtacaatcggaggtggtacatgtctggcctcacaggcggcttgtttgaacctgcttggtgtcaagggttcaaatcatggctcacctggtgcaaatgctaa

SEQ ID NO: 21209 - DNA, 2520 bp, Oryza sativa
cttggtgcgaggaggctggtttagcgatgtctgccctgttaaaccaaatgaaggggcttctctggcatatacccatggacaattcagggcatagtgtccttgttctctacaatcgtgacaaaaggggacatcctcttctggcattggaagttcattgacctgggtggcaaatgctcgatcaaacacatactgattttggtcttgacttccaaccaatggtagctgtgaactaagcggcatgcttggaatggaccaagggtgtgccctggttaactctcttgaggccagtggtggattgagttgaaaacttgagttactggagacatacccgctgacattctttcctttttctctgttaaacatctgttacaggaattgaggtgagagaggaaacaagctaggaaagaatagaccagaactagagataggaccttaaaggaactaactcttcttgttgatgtgttgtttgttttgcttattctgcaagttgattaagcaaacaacctagcatggttacatcacaacccaccgatgcaaaccacgcgctacacacacaagcaagaaacacacgactaacgacactaccctagagggtggcttaggttctgcgacgggttctccaagatcttcactgcttccttcactttactagcggatcctgcagccttctggaatttcgacaaacaactgacgatgtcttcttcttcactgacctgaccatctagtactagttgaaatccgaagaaggaagaagggagtaaaccttttgcagatagcacaggggaaaggagaaaaaaggaactttcacaaatagttttatttataaaataggtccttaggttatatccacttggcttatcctacagtcgagatggctcagataccagcttgtcgcgaccgggaaaattgccttttcccgaacgctagtgtattaatccccgtcccaggaaaagccggggtacaccatacaaacatgatataaaagacacatctttattacatcgataatatttacattattacaaaggcacttaaggcctgacaatcaaaaataaacagcagcggactagcgggcctacggctccatcttcacaggcgctcaattggggtataagccaggactccacctaagacatcttctccaaagcttctcttactgaaggggggagaaagatagagcaagaatgagtacaaccacagtactcagcaagacacaccggagaatgcatgattaatgcaagggagtacaaggagataataatacaggggttcagttttgcagtaaacagcatttaaaagtcacttagttgctcaaagccattttgtaaagacgatcctagagctacacagtattattaaacaaggccgtgaaccctcacgaacctgccttaacccaaggcctacgatgatttggaccgaactggcaacccgacctgggttccagctcgtcccaagccaacccaggccaaccattccacattttagttgtttgagcaaattttaagaattagaacactgacttgggtacattgctcggcttgcccatatccgagggctcggctattcgaatagatttactctgatcagaggtgtacatctttacccacaagacacatcttcctcacgtgtaaccacgcgccacataccaccacggtatacggacggaagacgtgacatagtttccaacccatcctagccttagacaagagtaccaacccaatcccacctacggccgggatacccgggacaggcaggcagaactgagcccctagcagcagggcaccaaccctctgccgtatgacatctcgactaccgggccgcagctcgtgtagccttcatttgccctggagaatgtccatcgacgcccgacttcatccatctccaatccgtgtacttttgtttatgactagactgagccacaaactaagccttacccattagacatgtggaagtacggtagtgctttgcaacagaggcccgagcttaatccttatagtggccggggtgctacttcccataactggcatgcacccaaaccccaccgaaaacaggttttaggggttttgaaagaggaagagaggtgtatgtccaattccaccataaaccaacaattccatagtgtccaaatgatatgagaatccccaaagtctaaagttataaaaccacctaatgttgcctaattaatcagcgaagcatctacctaaatttaaactagggataccacgagtagagtgtccactagttgaggttttgtttaatctagggtgaacaaggtaataataataacaataacaataataatatggtcataacaaaggtaaataggcatggctaaataaaacagtgataacgcgggaatttaaataaagcgataatgcaataatttaaatcaacataattttacaaactgggattcaatatgttcaaggatgatgtgacttgccttgctcagagagaacggacttccgatccttcggcgacgaccgcgaaccacgcttcgggaacctccggaacgacaga

SEQ ID NO: 21210 - DNA, 6238 bp, Oryza sativa
cgatgctccggtgaggagggagaggcggctggaggtggccggcaaggaggaatgagaagggcgacggcgggagtgcgcctccggcggtccccgcgcgaaacggagggtaggccggcgaagaggaggcggctgcgatgctagaggaggcgacggcgcgcccgcccggcgcacgggcgaggcggcacaggcggctggaggtcgccgccggcgtgggagagagagggcgacgccggggatggggctagagaccacggggaggctcgggatggggttaaaacggtagaacggagtgcggggatcccattttatatgagagaagagggagccggccacgggggaggtcggaacggcggcggaaaagccggccggcggcaatggaaggcggccgggaatggcgcggccgttcccggcgattgggggcaccatcaaaggggaaattaagggggaaagagagaggagggaaaggggattaattccccctaattaatttggaaggaacggttggattcggggcggatttggaggaggaaacgagctagggttccacgggagtgagaggagccgggcgggaggaagaagacgcgcctggcgcgggggccccacgcggtcgggcggcggcgtcagcgcgcgcacgcgcgcggcacgtgcgggaggggagcggcttgggggctggggcggcttgggccggcggccggcccaggaagagaggattgagaggcggcctgggccgggcaggccgggaggggaggggaagagagaggcagcccgggagggagagggaagagggaggtgggccgaggggaagggggcccaagaggaggagggagagaaaagagggaggagaggaggacttcggactgggcttggcccaaaggaggaagaggagggatttttaggttttctttttattgaactttgataaatgttgttgttgttttataaatatttccggtgctctgaaaattccactaaaatttgagggctccttttagaccaaggagaatttaacaaaaattctccgggccacatttgaatttttcttgtacgtattttagtgtttgccaatttctttccgaattttaattaattctattattccttttagcgaatgatttttaattcgggatgaatttatcaggacgtgacaacagcggcccctagcagaacgtattgacccaccgggcatacataaagatcatatcggctgaacctctagtgcatgtatacttttatgaacccctttgcctcacgatatcgattaagctcgaggctaaatatgtgacatcctctaatagctcaatcattcactcgaacctgtgatagattatataacttatgattgactcctcaatcacctttggcaatttccataatctacaacatcgagagtgtaacatcctcaaattttaaactaaaatttgactgcatcatgctggcttttgattaaatttatttggttcaaaaaatctatttgatgtttatttaaaaattggttcaagtattattagaacccttccaatttactctaacttattccctttattctaaaccctagtgaatttgagcaaattctctcaaattcaaaccatagattatttctttagcctatcctattattagtggagttttgctttactctaaaccctagtgaaacccttccaaactcctagtttgaattcaaatcttttctagggaaatattcaaaaattctgaaattcactgttcattgcacataaggtgttcggtagaatgcctagcccaactagagcagcccaatcccttccaatcttgcacaaagtttagatttggtcctagtagaccacatcccactcaaaaaccgtggtttagttggccttctcctccccttcgcgcgcgctctctggcagtcgactttgccgcgcaccatgtcgccgcgcgtcggctttgaggccgcccgcgcgtggccgaccgccttggcgcgccatcgcccgtccgacgccctcagcccaccgccaccgcaccaatcatgacgacgacaaagctaggacgacgaccgccgcacgaaatcgccgctcgacgccgtgcgctcccatccaagccgccgccgagtgcgatttcgcttctacgcggggtgaatcgcgccaattcttgccacacggttggattgaagatagacggtggtatcccctctcacaattcaaaccattcaccccccaagccggccgttttcaccctcgccgccgccgcgcgtcgcgctcggattggcgccaacacatcgccagccgattcctaccgcggtcaagtcaatccttcgccggtaagtattcgaacgtggcctcccgccactcaaatcgatcttgcccgccctctctcagcctctgccacctttgcctcatccaaaacccgagctcatccatggtgatgacagtgcccgagctcatccgctcctcctagcactataaataagaccccaatcccttccctgtccatcatcgatcatcaacaaccatagccccacaaccccaaagctttgcttcaccaatccatctcatcaaccaccctcgctcgtcggtcgaacaccttgtgcgcgatcgactccacccctctccatccatcctccgccctaaataaccattagaaaacctatatcctaccatgttctagcataataagccctaaccaaagccctgcgtcgagttttacctcgccacaccaagccgagcatcgccgcccccgtgctgctctgttcttcgccgccgcgaagtttttccggccgcaatccgtcgtttcaaccaatctcggtgagttcttccgtttcaaccatctacatactacctagattccattttagcaatccctttgcactaacatgccaccctctgagctgcggacgtgagcacggccgccgcctatggaggcgctcgtcatcaactatgttccgcaccttgccaaaggttggcaagctgccggaatccctctagatacctcatagatgctctagagcccctcccctagccatgtctaactcttatcaccttgatcgccatctcggcctaaccgtgccaccgccgccctagccgctaagccgtccatgcatcaaattaactcctccgccgccgctcgccgtcgccggagatccctagctccctcccctcctcggccgcaaccactttctccctctagcgccgccgcaatcctaaaccctagcaccgccggcctgatttggggaacggccggaggtagaagaagagaagagagagagactgacaggtgggacccgcatacagtgccatttcacttttattcaattttcaattttagaagcccatatcttttaaaatatagatccaatttcaatgaaacttggaccaatattcttctaaaatcattctctatcttttggacccctttttgctatttttgcattttattttattttctctatttttcttatttttagattttatttaaaactcctttttgaatttggattttatatgtctaaccctaggtcttgaggattcctctgacactctagataatatcaatcaatctcaggacatcgagcaaggcaagttaccatatacctgttgatcatttaagcctatattttacaaattatttatttatagccttctattaaatattctattttctatgcgtaaattaatcatagaaacccagataatttagtattgcttattttgcttacaatctggttaaaataccctatacttagattgggacaatacgtaagatttggatgatttccgggtggatagtattgtctcaatcgatataagttttaccaggtacttatgtcgaacgaacgggtacgaccgcagtttctagaatggggacagacctagttattatgttaattagcaatatggcacctctgtatagtggttcttatttttaagtcctcgcacaggaggcaactatagccgcgaagggcaactttaaccattaccatgtacaggtaaatggtttgtgatactcgagtataaactatatggtatatttctaaaccctgatcgagatgacgtggtgtcatacgatcagttccccttaaatacctcgggaacgccagaactcctcttgctgctgttaatattatgttcagagcatatgaggatataagttcatggaacaggtgccataattgttaataacttaatactgggccatgactaaagccgatgtttatcagcaagtcgtggactgcgggtaaagcgtacatctgctgcagtagaatatctttgaaactatttgaatagccgtactcatggagttgagtaccgggactcatatggtaccctggttagaaacctaaagtttatatgttttataaactcttgctataatttttccagattgtccaatactgctttttgcaaagaaccatattatatgtcaatgcataacatatttccgtgataacttgctgagtattgtgaatactcatctttgctcttataacccctttttcagatttgggtcaagaggaggacccatatgactattactacgaagaccccgataatttagaaaatccctaaaggttatacctcactagtcagaatgtatagaaacttccgctgtgtattaatcagataggtgagtacctattattgtaaaacccttagtattgtaagactttaacatatgcaatgaagaaccagttatattgcatgtatcaatttttaatgatccaaggattgatacattaatctcagtcggatccaagttgttaatttgggtcccgacagagaggcccagagatatctctccataggaggggcaaatcccatcttgattattcatatcccactacatgtttcacagcatacccgaaaactacttttataactacccaattatagagtatcgtttagcagtccctaagtaagctactacacatgttgagaaccatgataatctcaggtctaaggatcaacaccaatactaaatgagatcactgatgacacaacacatatggctcttgcaacgtctcatgttgggtctatccaacaacatgttccccaacatgtgtccacattattaatttgttatctctgtactatgatctatgagatatgatcatcaattaatacatgtgctgatcatttaaacatatttgttccacatatgatatttgatcagggatcctttagaaatagtaacaaacaacataaagagtctcatgaaagaattacatattcattaaccaataatgagttatctattttaaggaacaaagtcggataaatatgtaaacatagtatgtgatacaattatctctatgattgtctctagggcatatcactaacagcgtgctggaaaggaatcacggtgtcgtatgagctctatcagcgggaaacatatagttcaactgtatgactattgcaaacataaattttagtgctgcgcatgtcaatactaattgggtgcattgttttgctgtagaaaacagtaaattagggtacttcgaaaaatgatactccctctgttttaatttacttattgaatctcagactaaattagaaggtcctagctgtcacgcccggaatttctatccaaaattccaaacgcttacatgtgtgttaaaccctcgtccaggaatcagccgaggcacacaataacaaattgataatagagtacaaataaataactatttaatattcgcaaataataaattattacagaggtggatagttcctctcaaagaataacattctacgcagcggaaaaaaaaaactaaaacaaattacggaacagctatggcgactccactccacaggcatcttaaccaagaacaagcttaatcctccagatcatcaccttcgctgagatactcctcttctgatgattgaatattgcaagaatgagcatatgacatactcaacaagccacacagcaaatatgcaagtgcacaggataacaaaggatggcataatatagctcatttgcataaacagcatttaataaatatttaagataatagtaaaatagttgaataattaatcaatattaaataacaccatacaacatacccgtgttgtataggcccaacctcatatgaacaaccaaccccggttgaacaaattaaacctccaaaccaggaatataccattccaaaccaggagtccaattaattaacacaattaccattaatgaatagtgtgagactaatcacgaaaaacattgttcaactcacccataaccgcgggtacggctattcgaatagattaaactc

SEQ ID NO: 21211 - DNA, 7408 bp, Oryza sativa
caaacgcttacatgtgtgttaaaccctcgtccaggaatcagccgaggcacacaataacaaattgataatagactatgaatacacagctatttaatattcacaaataataatttattatagaggtggatagttcctctcaaagaataacgttctacgcagcggaaaaataacagcaaactacggaacagctatggcgactccactccacaggcaacttaacccggatcaagcctagtcctccagatcatcaccttcactgaagtactcatcctctgatgaatgaatattgcaagaatgagcatatgacatactcaacaagtcacacagcaaacatgcaagtgcacaggataacaaaggatggcataataaagctcatttgcataaacaacatttaataaatatttaagagaatagtaaaacagttgaataattaagcagtattaaataaacaccatacaaaacacccgtgttgcataggcccaacctcatctgaacaaccaaccccggttgtacaaatcaaacctctataccaggaatataccattccaaaccaggagtcacattaattagcacaattaccattaatgagtagcgtgagactaatcacgaaaaacattgcccaactcacgcataaccgcgggcacggctattctaatagttttactctgatcagaggtgtaccattgtacccacaagatacaatcccacaacatgttaccatgcgccttagtaccaccacggtacctcggaaagaaactgtgacattaccccttgcacaacaccactcaccacagtgcaccgtccctggatcataatctccccctcaaaaccagaggcaatggactccccagcgacccccacggacttctcgccgcttcacagtctggcacactataatgaatcatgctatacaaaagataaagccgttgcccacgctggcttgtggttggcacagtaaatatttcacaacagtagctcgcgaaccggtccttaattgtcatgagcacaaccatcaaaaccatatactcacaacccaccttaaccaggttttaattagcaattaattaccatcacacgattaaccatcgtgagctaccattgaatataaccataattaataataataattatataatataatttatatttaacccctttagttagctaatgtttctaagcatagctaagcgaatatacatatagcatttagctgaaccaatccaatatataaggttcatgctaatcaaattataacccataggaaaataaagtcatcttcggccattaattaacggggaaaggttaaccacccgatgacattcgaaaataatgcatagttgaaataaaacaatagctttaaacgggttcaacatgctcaaagggttgtttgggatctgtgtgacttgccttaggcttccacaaacgcttcggaaccttcctcaacggaaacactctcctccggaacgtcggaaactaacgcaattaaacaaaaatcaacaaaacagtaaaaaataagcataaacagtacatgtggatatttttaacatgtagatctcaatttcagaaaaatttagcaacttgaaccacctgaaacggatctacggttatttagttatgattttccaaagttttaatctattagaaaaacgggaaaaagaaaaaacgatgatgacgtcatgatgacatcatcaatggccggcccgggttggcgacctcgccggagattggatggttggccgggattttggaggacatgtacacgtagaggacgacgagacgaacccaacggtactcaccctcgagccaaacgacgaacgacgacggccggcgacgagatgaacggcggcggcggctccggtcggcggtggcgggtaggctccggtggtcggcggcaacgggggacgggcggccgggcttcccctcaccttggcgcacctattggcggcggcggcaagcggcggcgacgacgaaggcggcggcacggcgctaccggagatggccggcggcggtggcgacgactctacggggcactagagagctcgggaaagggggcaaacgaaagaggaggactaggggatcctatttatagccttggattggagatatcggactcctcccgcaagaaatcgatccgggaaatcaaaaactcggttttggagataaactcgaaaacgagttcgatttggataaaatactcaacgattagctccgatttttggggtaagatagaggaggatgagatgagaaaaccccctcaacaatcggactcggggaggccggattcgatgcggatttggaggggaaatggggcggctcgagcggatgcggatttggaggggaaatggggcggctcgagcggcatggctgggctcggccggccggctgctagaggttagggaagggtccgacatgtggggcccacatgtcggtctcccaagtggagggggcggctggcgggttgggttaggccggctcggtggctttgggccggctcgggcgcgcgggagagagaggagttgggccgaaatcggcccaacaacttagggaagggatttttgaactttttaactaaaataatttgtgaaatgttgttccaattattaaaaatacttcccttgctcaaataattcccagaaaattctagaaaatagagaaacaagtaaagtatttaataaaattttatctagctcatttttatgttgaaaattttcctagattattagagtttaacttgtaggcttttaatttaatttctaaaaaagacttaaacaatgtatttataatttaggcgatttttagggcgtgacactagctagtcgtaatcaccatcctaatattaaagcttccatcatatatttttacaaattataccagtcttggatttaaggagcagcctgtgccaatttgctactttgtaatcattaactcctaattttagaatgaaaatcacaaaatacatagagtagttctactataagattaacatctccaaattcaaaattaagtaattgtaaaatatgtagtctcagttatagtatttttttcatgacttaatagttatgatattcagaattataattaataagtactgagttgtactcaacgttatggccattttttcatttttttaattcaataagtatgaatttataaatttataattatgaaattatatgattttagaaattctaatataattgtgttgtacttacatgtcctcttatttaatctattcaatcgcaattgattttatttttttagatttgagttattttatattgtatatgggatggacttttttttgctctaaatctaagtccatctaccgccaccagaattagcacggatagattattttcaatctagtgtaaatgtgtaactgcacactctctagccaaaaagataacaaggaaaaaaattgcatgtatgtgctcgagcaattaatgtaaacacctagtctgtagtggaatgaaaaatcctatacttatgtattctcataatatatacagcttaagaatacaattaatactatggggcatggttggtccagaagagagattaggtagatagttaatctcgccggaaaaaaaagaaaggtagatagctaatcttttttagacagaaggccaacggcccagcttataatgaaagaggttttacgtcgctaggggttacccagtttaacagcagcacaaaaacaggagggatagttatccttacatattcttttatctaagagccgtgggatcgctgagagattaagagccgtgggatcgctgagagattaaggctgccacgtcagcttgatttggacaaagctaacaacgataaagctaacaacgacaaagccacaaatgaggcctccaatcgttttggttgggcttaatattacctttgccggcccttccttacacatgggatgtttcctttcttatcgctcggcctgctcaaccccctaccttggtgcgatactgctgtttctcctcttcctacacgcagcagcgccgcatcgatttgggcgctcactacgtacggtgctcgccggattggccggcgtccctgccgccgtacacggtagtggaggtcccttgatgaaaactcctctctgctggtccgtagacgcctcctttcgccattctctcctcttcagttttttcggtgaggtcgccgcacagtacccgttcttgctttctcccctttcttcctgtgcaaatctaatccagtggattcttatgtttctcttctttcccagggatttcttcaccgtccggttgtgcattggcttcccctaggaccttcttgcgtcgcctgattgatctgcagggtgtgccgccgtgggagaccctaggcctccacttcccgtgctaaggtagtttaatcatgcttgggtgataccaattttttccttattgtgtgacattgatttcttagcttttttattggtttttcagtttgttcatcatgtttattattactctatttaccgatgccaaccgcacttacctctccactaaccaatctaccgccttgcctacatcggccgcatcactagcttccaccatggaagggggaagcaaaggagatagcaacagcttaggggcacaaccagaagatcaaccggttcttctcccatctactgatctacatgtccataaagctgtggaatcacaagatcaaccgactattctcctatgcactcatccagatctcctacaaaattaggtattttcgtcaaatagatctcctctacatatttgttcgtggtttgtcttagaagcatccaattaatgcttattcttcccctacatacatacacccattcattgagcctgcctttgctcaaaaatacctttcacttgcaggaatcaactaccaatttcgtctagcagatccaaacaagtcaaccaatactgcatattccacccacacatgacgatctgtcacagctattggatctgatgaatctatcctagatccaaccgtacacggcaaccctgctccagagcaatatgtctacctcccaggggtaagtcaaaagaaaagaacactcacaagttttttcccaagcgtgcaatttaaacttaaactacctacaccacattagctcaccctctatctgcttgaaattatgatgcattcactgctttagtcatatagttcaaacatattacaatataattggccattatatatatgcaaagtaaaatatcattgcagtaaacatatagaagaataacaagacatattgcacccatatgaataataattttaacaaacaatactaatatatatatctacatgtacatctttattttttagacaattgtattaaggtatttgtatccacacacaacccaattgtgctcacaaatgtttttttagtcaccttgatataaataggctgcaactaaagtctatatctcaaagcagctcctgctaacgcgattacatccaagcctggcttagtcatacattcgtcatagatcaagttcgaaggaccagatcagtatagggccaatttaaacatggatttaccaagagtaggcattcgggtataaaaaaatgagatacattctatggtgaggtagcagacacatcctacgaagctaaagagagtaccacgcatgcagccattcaatgccttcagagaaagaaaaatattgcaataaaggatctactgagaagaaactccacacaaccaagcaaatgttagacctgtttgcacatagtctagaactccacagaaacgaaggtcacctcctccaacagaaccaacagaaatataacatgttagtgaatgagatcaacatgatctgtgcccaaagtgcattataccttcccaaacatgtcaaatggttgggacaaccagcatggccaaacaaatgatatctctgttgcatacattggccattctccacctgtcacatcaaatgagatacttgcaaagcatctgatagctcttacgcagtacaagcatgattgatcatccttccttcccacataggcaagtattattcaatctcctacattatacatatgagtattttcaatgtaccaacaggtcattactaaacaatgtctattaccgaccaagctatgcatcccaaataatgaattgcatggattttcattttgcaggataaacaaatgtgtatgtcacatggctaggaaatccaaatgtggctaaaccatcaaagtgctgtgtccacattgtgctagcttgcatttgcccctttttgtagcatatgttcaaaccgcttggaccatcataattgatgagcaaaacaatatatccctatatgttatcaccactgttataatgttaaggttgttcaaatattgtaccatgtacatatcgtacctgatgttatctgtataaatttcgtatcctgtacacatagatatcgactccatgtaaaataatctactctatgttactgttgtttcctcttttatgtaaaaatgtctatgcctattatcttcatcaccatcttattcacagttgaataacatgcaacctcctgtttgcatacttcttattaatcttaaggaaaacaatttattatgataactatgacaaacttttttatatatgcaatgaaaaatgcttaactcatggctcatataagatcccttggccaaagctgaataaaaccgcgcgcggcatagcgcgcgtttattgctagtcagctttatagctgagaataaagattgcacgcaggccaaaacacaaaaaaaacaaagccctcagaaccgtgataacatgtcatccaacagtcgatctaagcaactgcacggcagtcattgtgttctcttccagctgctccaactggttggcgccttccttagtctatgccactgtctcaaaaagaaaatcactcgaaagatcagcgtgagagacgtagaagggatcttcttattgaaaatcatgtttttcctggctagccaaagtgcccaggccgtcgcccctaacaagattattaggttattggatttatgtcatggtaagccaacaaactgttcaaaaaataattgatgacataaagagggaggggctccccaatctagtgcatatcttagaatacaccacaggaaagtggccaaaggacaagtgaaaacaatgtgatcagcatcctctgagctgtggcacagggtgcagctatcccctccccctatacgacaacagtgaaagaatcagaagatacaatcaacctgttaaaaggaagggtagaataccgaaagagcatcaacaatgaatcaatctaatattgacggctggcggatgtgattgcttggtcctcaactctatggtcgttgaatattagcacccatcgttgctgctcttggcggagagatataataatgttttcatctacggagaatttgagatcagaacgaagggatcaac

SEQ ID NO: 21212 - DNA, 3695 bp, Oryza sativa
ctgattttgatctctaaatcggctccgctagccggtttagctgtttttctacaaaacccatcttgatttggccctttggctagatcgaggtggttggcgactccatatcaccgcaaggcgtttaggtgttgcgatcgtgcttgtcgacttgtcaaaaaagttgccaacagaaaagattagtaatactagccgttatagcagcaagttatgttgcgatggttcaggcagacagctacatgattcacagtacatctgaaattcggtgaagttcggcaagtttttttgtagagggcctgatgactgtagtccaatttctagtatgaaaaatagagcccaacaaggttttccagcaatttacgactcatatattcctatagcatgtggattctcgtgtgtttctaacatataattccagatgataatcgttaaaaatcacatctaaaagtaataaatagttaaatatctctaattttgtagttaaaacttatcacacaagggtggtaaacgatagctgggttgaaactgaacacaaccacttatccataggagtgcgttgtcattcgcaggggtggatgaaatgttttccatagaccgaaatatttttaccctataaaatatttgaggactaggtaagctcatgaaaaaacccattaccaccaccggtcatccagtgatattatgccatgcataaaacagaaattttgaccactaacccttaagccaaacagcaccatatatacacttttaatagtccctagcagtggcagtgaatctgtcacctatatataactgtttttacaaattggctcctgaatattatggaatagcataaatatttcgttcaaacaattaaaaaagttgtactaacatatttgacaattttttaatattatattatattttatccatagcaaatcattggtatttttctagtgaaccaaaaagctcccaaccacagtagacttcatcatttcacttattgacggaataagcgaaacaccatatttgcaaacggaaaatggtttgtaaataaaacttttatatacatgttcttagccatctaaaagtaaaggttgaaaaataaactacgatgaaaaccctaaaatcaactccaaatttaaggttgaaaatttaaattttgtcttataagaacaagtataatccaaaatataggactagcatagcatggcacaaagggtttggttagccagaaggcacggtgtggtggtacaatgctgccacgtcatagtcaatgggcatagcatcactttactactatggaatgtccagcttcatggactattacaatatgactatttttggaatttcaaaacataaaaacaaaaatcttaaaccagtattaaggcatgtacaacagtgcttaattattaacaggctctctccgttactatgcaagtaaatttggaaacatggaaggcagagagaagaggaaaaagaaacatcgttgtaatgcatgacaacatcttagagtcgactcttagcaattattaaataaaattttgttgcatgtggatggagaaaaggaaacaagagtaataaaaaaatattttggtgcattagttgttaatatgttttcttatgtcaacaattgttgcccctaggatttcttttttgttcttctcgtgacttgccactagcattttcatgtgagttctgactgctttttgatccagataatttgtagggcaggttgtagttttgggctgtcaataccaactcctccttcatattttcacttctatagttatcgtctaaaccttatccctaaattaaactattttgttctggttgatgtgcacctgaagatagttcaagtccgggaactcctgggaagcctggcagctgagatgccggcattcttatcagacaccaccatccgccgtttcctaagggcaaggaactggagcacggaacaagcaaccaagtcgctcaaagaaactgtcaagtggaggcgtcagtacaggccagaaagcatttgctgggtgctctcacaaatcccaaatcaacccctttgttgagtttgtaccaattgttttttctaaagcataattgtttgtaattattatgttttggacgacattgctgacaaggagtatgagggtaggagagcatatatagctgactaccttgatgccaaaggaagatctatactaatcacaaagccgacaattaaggtcagatttttgctgactacaggatatatatatgccggtctgactgtgataacaatccactagtaatttggagcaaatgaaatgattcaagtccccggttgaaaaaactaaagacgttctcgaagaaaatcaatgaatactaacaggatacaatgccaacttaattaggtgactgaaagttaacttttctgtagaattcagaacctcagacttgcatgactacaaaataaagttatatttctgcagttctcttaccaacagattaccatactaggggtggcaaaaagtgctgttcttacagttcaagttgaatacggtttttattatgtatgatgggtttatgggcaataattaataaattttgaagggtttctaatgtggtacgaatttaggcagggggtaggtttcagggaaggagcagataaaacactttgtatatctcctggagagtttggctatgaactctgcagatgaacaagaagaacatgttacttggctgatagacctcagaggctggagtatatcaagtacgccattatcgacatcccgtgaatccatgcacatagttcaaaactactatccagggattattgcagtagcaatactcagcaacactccaaggatttttgaatctttctggaaggtactatgcaatattcaggacttctatttactcttactaaatgatgttctgtgatttagttagtgaatatatgtactacctccgtttcaggttataagactttctagcattgtccacattcatataaatgttaatgaatttagtcacacatatatgcttacattcattaactggtaataattaacatatctatgaatgttgacaatgctagaaagtattataatatgaaacgaaagaagtatgaactagtagttgtcttgtcctcatttgcagattataaagcacttcttggaagcaaagatgagcgagaaggtgaagtttctatatactaacaatccagagagccacaagatagtgtctgaaatgtttgacatggatctgctggagactgcatttgggggcagaaattcaattaccattgatatagacaattatgctgagagaatgaggagatcagatcttgcgagaggagttttaatcatccaaacggacataaatctgattagtcgacatcactgaatctctattctctgtggagaatgcctattgcttaatgacagctaatgaagaacaagaaggtaccgtgcaaaaaagtggaagaaaaagaacaagccatagaaaactacgtgctcaccttagctgttttagatgttatatcaattaatctcaataattatggacgacatgttgcgcatgatcaaaaaaccagttaatccttacagtatgtttatgtaatctaatactacctctgttttatattattaattgttgttgacatttttctaaatccatcttctttttagctttgatcaagatttgtagaaaaatataactatattttcaatgtaaaacaaagg

SEQ ID NO: 21213 - DNA, 6454 bp, Oryza sativa
atcaattttatacatttggtaaaaccatgttactgcatgtataggcccttgttactgcaagttacacattctgttactgcatgtggaggattaaagttcaaaatgccaatttttgaaaagcaatatctcacaaggtatgtattattttttaaaaccgttttcacaatgatactatagtgcatgtgtaggtttaaacttcaaaatgcatttacatattctcctcctcaagaaatcgttcttcctccctcttcttaagaaaaccggtctcctccctccaatatagtgttattgcatgcatgtatatgacattactgcacttttgacagtaatattgttgtgaattacagtaaaccaggaattgaaataaaaatatatgggttcaaagtcttagatgctaaccatatacttgttactgcacaaaaataaaagtgttactgcacggcatatacacgttaccacctgacagttacacattaccgcatgtttacgtagtaacactatccaagaactgcagtaaaacactttgttactgtagaacatatagaacgttactgcacctttggcagtaacatcgtggtgaaattgtagtaaaccagaaatcaaaagaaaaatatgggttaaaagtctcacatgctaaatatacatgttaccgcacaaagtggaagtgttactacatggcaggtacacgttaccacatgtttatgcagtaacactattcataaattacagtaagatgcattgttactacaaaacttatgggttttactacacacttacagtgatgttgtgatgggattcactacaagaaatatgaccttctgtgacgaattcctcgtgacatcggagctattcgtgattagcacatttcattttatgacgattagtatgagatggggtggcctagtgacgaaaaaaatgtgttcgtcgttaataccgactagaaatcgtcataaagtatttcaatgggacattgtgacgaatattaatttgtcataagcggcaaaaaaacaaacgtcacagatttatataatgcatttctagaaaaatatattaaaaggtgaagcaatttaatcgagtgaattaatgagtaaactaaaattttcttttaaaaatcatgggcgaaattattttgtaatattctacatgtttgaaattattctctaaaattttccgtgaattttttttaagctcaataactaattttaataccacaaagtttatttaacctattaaaataaatggaaaactaattaaaattgctccctctacttgggccttattcggcccaagtgttactccctccttagcccacacagcctctctctccctcctcgggccggcttccccttcccctactccctctttgggccgccggcccaatctatttgctcctccctcactgagaagtctattttatcaattcaaataaattttcgagtagtaaataatttcaaatgaaaaaaattctcaacaacaaagttgtataacttatcaagatctataacttttgttttggttattttgctatatgactttgtttcaataatttgaatttgaatttcaaattatgacaacttcaaacaacattttcaaatactaaatgatttcaactgaaaaagtcatcaacatcaaaattgtataactcatcaatatctataacttttattttggtcatttcttcatccgataaagtaatagtaatattgttaacaaaatttatatatccctcttatagtttataaataaagtatataaaagatatatacattttgtgaacaatgttacaaatcactttgtcggatgaagaaatgacccaaataaaagttatagatattgatgagttataccactttattgttgatgacttgttcagttgaaatcatttagtacttgtaaatgttgtttgatattgtcataatttgaaattcaaattcaaattcaaactgttcaaacaaagtcatatagaaaaatgaccaaaacaaaagttgaagatattgataatttatacaactttgttgttgacaacttttccatttgaaatcatttacaacccgaaaaattatttaaatttcttatattttaaaattcaaattttatatagttcaatcaaactcggatggagaaatgaccaaaagaaaattggtagatctcaataaaagttctacaactttatttttaacaacttttttacatgagttcatttagtataataaaattcgatttgaatttttaatattttgaaattaatttttttccctccaaattttttcatctcctcttctctctcctcctgatattttctcctctcctctcctctcctctcagcctctcttctcactctttcctcctctcctctctctctcaccgactggaggttgggagcgggcgggagtggcggccccggcagcggcgggcacggcaacgacggtggcgggtggcgggcacggcgacagcctgcggcggcggatccggcggcgccgtcctcggaagggcagcctcgatctccgctggtccttcgtcgggaaggctgtccgacacccaagcggctgaaggatcaaggattcaaggccctgaggtggtatggcgagccaggagaagcccacgccgcctcggcatccgcctccgcacccaccggcgccggaggtcgcgcctcttgtgtgcgggttcggagggggtccaccgggccgcggcggcagcggctcggcctcccacccaactccagcgccgccgcccggccaccctcgccccctccttccctcccccgtcgccgccgtcctccctcccctattctttccccttggtacctcctctgatcgaagctgacttgacctgttgagattgcccccatgtcaccgccgtggtcacctctgggatgggaagcacgggtcacgacgcggaggtcacctgggccgacttcgacggctcgtctttggcgtcgccttcttcgtttctcagataaatgaagattttcacagaaaacaaagattttttttatgatctgggttcattatgttcttggtgcccattgatttaataattaggtaatgttaaaaagtttgtgctctcaggacatctaagatggaagcagtggataaagaagttgcagttcattatcaatatacaaggtaacaacaatttgcagttctttgctatttggatgtacaatttactggtctgtggttggtccagatgcactccaatgaaatcaaacatgtcaggcagcaaggtgaggagaataccaacccatttacttaatggatgctcatttggtaactacaataatccatgaaccataagcaaactgaaatctttaacttgtacctagttatttctcaaagtagtattgaagtaggcagcattagcaatcagtaatgactctgcgcaaggttgaagcattcaaactgcatatatttactgcaagaacttgtgcatagtacacaacttgttataaacgcaaacctgtcaattcttcatgtttgtgtgctactagtgggagagttcagaggacatgaagagttgctgcaactctgctcatttgcttgaattggtggtccagcatttctggaaaataactgcaaaacttttggatcaagcaaaatcttgcaattaggcgtcaactaatatcatccaaactgaattaaaaattaggataggtactgctctaagattacctcaaacttacttgatctagcagcgtgtgttgggctcctcaaagggtcacgttaatgggccacctgcgtcaggaaatatggggagaagtagatgcccaaataacgaccgtataccacataattttaacaaggactaatatggtggtcgtcagttttggtttaactagctggaattaactgtaagtctgtaacgaccaggactgtttactcttcatcgttaataattgaatgtctagtagtgctctttgcctcaggaagctttgatgaaattgctattgtcgctggtgggtgtgataagaatggacaggtgctgaaatctgccgagctgtacaattcagagactggtcattgggaaactttggcagacatgaacttggcgaggaggctctcatccagtttcttcttggatggtttctacaggtttgtgttgtctttgttttactaatgacaaacatgattaatagctgcgttaattacatgttcttggaactaattttgagtattgactaagcagggtaatgtataggctgcctagagtaagaattgcatttttttcgagatggagtatacaggtatatcgtagagtaagaattacattgttggtctaaagaaaaactcattcgacacgttctttgtactttgacttaacgatgttaagctttttttatatacgacaagtgtgccttgcatgctctctacaattatatgactgtaacaaactagagaagatgtttggggtttgcctgttgtgttcactggaataattttgtagttgaaacttgaaagcaagttttaagagcagcaactgtttcttgctccctcctgtgattttgttctccgggtactttctgattgcaggagctcagctcttgctcctcaatttagtttgtagtatttgacagatttttagcttactactgaaaagaagttatttattctatctccttaggattatattatttccatcaaacttggattaaattgggattcttcactcttctgtgttttatcatttccaggtcagcccatacactattctgggcatgcataaaaaatacattgatatattatagttagaatttagttaacatactgtctccaagaataacctataagtgcaaacgtaattacttatttacatctcttgctaaagtgtcgatgtaaatatcctgaagcaacaattgctttatggataagaaaactttacaatgattgcttgttgtatataacccattaactctgcatacaaaaaatctttcagagtgtgatggcatgttttgtttacaaatttttgcatcttgtatttacaaattgtttgcatgtaatttcagatgtaaggtttgtccatcctcttcgtgtcgccttgatgattcatgatgagacggcagtggtattttggttggtgtgatttcgacacatggttttgtgtttggtaagtgaacctgagattgtatttggacgtggttgggttggtacatatgtattttgacatgtgattatgtgttaagtcagtactaatgtactgcacctgattatgtgccgatgtattttgttttggctagttaatctgtaatgtattcatggtcagtgaacttgtgactgtgattgtatttgaatatgtgactgggttggcacatatgtatttgcactgtattagatgaccattggtttttattggctattataagggctgtaattttgtgctatatgatttattgggcttgtatagtcttttgaaatgggcttggcccacttggtatctggtactggtattgctagtctgctacaaatggattagcaaactgggctgaaatagtgtataaattgctacgtaattggatttggcccataatcaggttgcttacgacattgctctaaacaggccagtagtatgtaaattgctattttttagatgggctaggcctaaagctgacaagatttacaattgggcttagcccacgagaactacatggttcttgacagcccataataaagtttatgacgttttataggctagataatgacgaatatgagcgtcacaaagttatgacgatggaaggatcgtcactagattaatgacgaaaaaaataaggtttcgtcatagaacgtcattagagacgcatgataggtgacgaatgaattttcgtcatgcgagcgtcacagattacgaaatgtgacaaaattttatgtgtttgtgacgtaaatgaaacgtcacctatcataagatctcttgtagtgattgtagtaacgcattacagatagtagtaacaagtagtaatgctatagtattactacttgtggagagttaagataaaaaaaaaacccaagcttcgaataacaatatctctcatgtgatgtataattttttaaaaccgtttgtaccatgatgttacaaaaaaaatgcttatcaaaagtagatccgtcatgactatattttaactaaatttgaatgttgttactgcacataagacacagttttactgcacaatggatgtcgcgttactgcactgtttcacaagacgagagctgagaagaggtgggtggtgggggagttagtaggcagtttgaccgggttttgaccgacgtgggggtgctttgactgacctttgactgaggtggaaggtgggttttgagcccttaaaaaggaggggaggtgggtttggcccttgggagggaggggggtatagaatagctattctatatccgggtgtagtgtatatatatatatatatatatatatatatatatatatatatatatatatatatatatatatatatata

SEQ ID NO: 21214 - DNA, 11706 bp, Oryza sativa
attattatttgtgctctgaaaattccactaaaatttgagggctccttttagaccaaggatgtcgtaggctctccagaccttccattatatttgagagatgaagtgaataattcaaatcatcaaacaagcataatgaaacatccgacgcctcgagagaggaatattggagacattgctgggcccttagcctgccagtcaacttcagcctgagatgtgcccgtcaaaccactcgaaggcggcgaccagatgtgttacacattcaggagacttgacaaaaatggctaaagatctacaacctctcaaatattcctaactcatactcatgtgaatctagttcccaggatgtgcactagatccacactttcatcttaagcatgattatacatagcaaacacaactaagatgaaagaaacttaagacttacaacaacttaataattacataggccaaccggccaaatagacttattagagaacagcggaagcttgactacccaatcacaagcacaccgactaggggtttaccccattaagttctcatcctagaagaagcaatcggaactcgcatcactcaaagactaagactaaacctgcaaacaaaaggttatatcaacagcaagagtcagtacattaacaagttaatgtactggcaagcacaagtcaatcctactatactacatgtaaggcatatattcaaaggaaggcaatatgtagttcaatttcagcataaagcaagttttgttttgcaattcttttgtaaaggagttgatgcttcaattaacaaagacaagttttaagtttcattattaacttcttcataattccatcataaataatctcttattgccatacttaacaataagtcataatgtatcaccacatacacaactcaacacatttatcaatttcaaaccaatgtcacatgatcacatttttaaaacatagtctatactcatgacacatcaccaaagcgctcatgaccgtgagcacggctaatcgattagtttaaagaactctgcagagtttgtacagctttacccacatgatatgaactctctagtttgttttgagtttgcaagactccatcacactcttcatgttgaatgtgatctagagatcataacgaagcctttacactacttagaatctagccttgcaccagcacgatacgtgttcctccatcctaggcatacttggaatatacctagaaccgttaagtggcgggcccacgccttaaacttaacgccgtggtggcggacacgacgggaacccaccacgtggcacaataccgttgtattggacagacttagtcacctaaactaccacgtcggggcaaataggaagttcctctgaatcatcgactaattcctcagaattatcgactaactcatacacaccggcctaccagaatgcaaggctagtcctaaatagattaatcagcttaggccatcccatactagcacatgtggatgtacggataactttaaatgggtgacacaagttcggtccttatggacttgggcaaacacttcccctatcggtatgcaactaacaccatatgcacaccacttgctgcccaagtataaaatcacattttacacattttagttcgcaaatacccatcatattcattttattccagcaaaggttcaagtatcaaaaccacattttaattatagatggaatgagcatttgcatatttctaagcatggctaagcaagtagttgcacatagagcatatataaacccattcgagcacaatgaatgtactctaatcatttctaggggttcaaacagcaagaggatcaattattcaaggtggaatatgcagcaaataggtcataactaccttaacccaatttcaaataccgatatagtctaagttcacatgcaactttgcaaacaaatattttcattcctcaaatcatgggattcaatgtgttcaaaggatgggaggagaaaacttgccttgatcagagaattgttagcacctaatccacttcttcaccgattatgcaattatctagataaaggacacgatatgcaattaaacaccgaaagagctgaaaatccaaaatgctctaaaatgcatgatttatgcacagtgggttggtactgatctaaaatgaatttaggtgaaataattcctattttattttattccatttgggagttatgaattttagaagttttatcggtttacaatagtatagtcttaggtagtgttatgaaatacttttgtaaagtgatttttattatattggacttcacaggggtgtggagatgtgttttctaagactaacacatttggtttcacaatttttggatttataatgaattctttatgcattttacaagttataacgtgttattggtgtatagtgttttatatgttcatgacttttgagttataggttcagaacatgctacttcctgtttaagttgaataaaaggaataatttggttaactaaaacatttttatctcacctgtttatggtctttactactatggttcatattttataaagtagagatgctttaatctaaactagcaatatattatattaacctagaaattgttatatgagctaagttcttctaattttagtggatggaaatggaactatggcttcactggtcaatcaagtttttatttaggtttaattagacctaaagtgtatatatatacttatacatgtttatgtattacttaaacaacactatgtgtttaaattcttatttcactaagttaaggttttgatcaatgttctctacaaaaggtgacaaattttattttactatgttgaagataactatttgctggttctatagaaactttgttcatttcatttggactaaaaataaattttctacaagttttacaaattaatggctgctctgtgttagtaaatctttatatgaatatttagagacttttactacacagcaagtatataatcttatttcataacttggaaatacatgttttagtgattctacagaacttaagtttactcaaattgaagctaaattgggttctacatgaatttctaaagtttagcttatctaaaactaatcattatagagataatagttttagaggcatttgatgcaaagtaagtaattacttttatttaacctaatcagagactgtatgatgatgaatctgtagaatttgattttgtttcaaaatgagttgaaatgaattttctatgcattttataagtttgtacatgtttatgtataacctatcttagataaattttagagacattatttgtacagtgagtgtcaagttttatattcctggaataaagttcataacttcaagaatctacagaaactggaataacttcaaaatgagctatatttgattttatatagattttacaactttgtgcatttttctgctaaacatatatttgtttgggcattttcctaatttttcttcagattttaaaggatgggtccacatggctgtgagggaccaatatgcacaaaggcccttgaggtttctaggaatcaacccgcagtcctaggcccatatgtcagtgtgtttctacaattgtaaacagatccctgcacttaatctaattcacggaagtcatccctctgctctaggcagagcagagctagccatggctgagctcgatctggagctcgccggcggcaaacggtggctcgtttgaggttgaggtcaaaagataaaatgaagagcaagctctcgcgattccattcctctagttttcttggttagaggacatcggagtagcgccgatggcgagtgtgagcggcggtggttttggggtgaaagtgcatgagcgcatggaagtcgatttcgaacgaaaaggatgcatgcatgtggtcttctagacttcaggatgctcaccgtgggtcgagctagggttgtcgaggtcttggcggcagcgacgacttgaggaacggctcggcgacggcgctcctcctcaggtgaacgacgacggctcgaacgggacaatgagctgcttcaagcaagcatgcacgagggttgtgaggtcaaggagatggtgtatgcgcaaggaatcgaacaatggctcaccgaggcagcggtaatcgacgatgacggcggaggcgatcctagatcggcgttgaggaagaaaaggatgtgttctccgtgttcttgatgtttccggctggggttcttgaggcgttttgaagaggaggttgaggcgatgacaatggcgcagcggttttctctgacgtggatgagaatggccggacgacgacgatggttgatagcggcggcgctccggtgcgtgctccagggcgttggcggtgtggcttgcgttcccggcgatgcactgcacgagaggggtttaggtcaaaagaggaaatgctcggcattgtgtggagagatgggaacgcgaaagagatggaggtgaccttgactcaaacggagatggcgaaggtcgtcgtcactacgaccggcggcgaggttgaggatgacggagaggctgaggacctctccctcggcctcttcagctccagagtgatgtgtggagttgggcgactcggtctggaggagatggaggcatgactcagtgacttgaaggcgtcgacacgtcgtcaccacgcgtcgacgtgtccaggactcggtcggctctcgatctctccctctctgtgcttcttggtcggctgaggatgagggacagaggaagggcgaactggagaggctgccaggtggggccaagtcgatggaaactaggctagggagagagatatgggtagaagactgggtaaacttgatttttagattaattttcggaattattttctcctctaactttgtaactacataattcaatgtgtggaccaaattaattagtgttgattttactagaggtagatgattacacctagattccattttctttggttgcactcaaaaataatgggtggactgctcacagaaattaaacaaagatgggctattagaaagctagattaaatttttaggaggattaaacagagaaggaaaattctagaaaaattatatttattcacgataactaatctagtatttgaataaattatttcccatgttcacttatatgcagttaaatgtacttttggatgaaatatggttttagccgattaaaatttaatttgatttcttttagttgtctgcttcgaccgattaatttgagatatcaacttgagtgttaacacgttaccaaattacggaggataagtttgtgctcatcactgtccacataaatttttctatgattttatcttgcacaaaatattttagagaattaggatgacctttgtttgtataagtgttcccacttcataattgcatctaatattattatagggattacattaaatttcttttagactgagaagatgatatttgagtttaatattaagtccacatgttatcacccaagattaactataggtttgtttagtgaaataattcttttagattatgctcatgggacctattatggaatgcaagaccaaaactccaaatgcacaaagaactcgagcctaggcatgcaatatgtacatgtatgcttgatgacatttctagtctaatgttgggaatgaaaaggttttattttgttctcaaattttaatcatgcaatggtttaagttgatcatcacctaaattaaaacggaaatttttggctctcaaaattggagaaattaacctctaactattttgacaagaaattttaagtcctaaaatttcgggtaagttacaaaggagaatttaacaaaaattctccgggccacatttgaatttttcttgtacgtattttagtgtttgccaatttctttccgaattttaattaattctattatttcttttagcgaatgatttttaattcgggatgaatttatcaggacgtgacaaatccaccccccttacaagaatctcgtccccgagattcgaggaggctagcatgaagataggttgggcggtcttctcttcttgtctgacttcttccgctccgtcttctataacaaacttgcctaacaaaacttctccactctggactgcttggctcgatctcctgttgcagatggaatcttctcttcacccgacttgtccctggttgaacctttagctgacttcgactgggttgcggcacttgaagatggtgcttcagttccagaacttcgcatagtttatatttttggcgtcaacctcatagaagttacccatttcacgttatgcgtcgagatcagctcgtcattactaggataccatgcttgtcatcatgagaatatcatgcttgtcttttacttctaacttgccaccaactgcctcatattagctttcctgctctccgggtgctagctacttctgctattcgatgcaagggtcgataactttgcctttgaattatgtttcttaacagaaccaacttatcccccttgacatgctttgacgtcttcccaaatggctttactgctggacttcttattgtctgatcgtgatcctgccaaatctgaagcttcgttgttagatgtgattttaatctaacatctgtagattatcttcgaacatatcactcggttcataactgggaatagctctcacgaacaagcaactcggattcactttctttacatttggttcacttcctactattctcttcatgttgtcctcagttagcattcaacgtattcctttacaccttcaaccttgatgtgttctttcccgatttctcttatcaatcacctttcgacctacttctttgcccggtaataaacatctttttcgatatcttctatcaatcatcttttgacctttgtcaactaagtactcttcactccgagtgttgtggatgcttccggtgacgaggtggtacttgagcctgctgcctttcagagaaaccttcaagtggttcgtcaaaagctagactggcgattgttacctttgatccgaagaaggcacatctgaaactcttagtccaaacaaatgtctctttggttgatcacttgattttcttcgccatcaatcgctaggttatttgattcataacagattatgggtttacggaaatgagaccctaggtctccctaatcaacaacaaaatgtacacactcacagcacttgcaatcttaacatggatccttcataaacttatcaaactcattcattatctcatgtttctctattattacatgattgacggggaacaactataaaacaaaagtatttgaacactgatataagagtgttatggttgcttctgactagcgctaggcttaacaggtactgcatttgctccagtgaccacttggcgattggcatgtctgcttccttaacaggtactacagttgtaaataactttcttacgctcgggttcttcatcttgtacttgatttcttggctgctgtgctggaacatccaaaggtacaatgccgatactggcctctgtcttgtcaactgatggctggggctgaaattgagcattgacaccttgtggtaatgcactcgctggagttggagctgttgcaacgcgggctataggactgcttcgggatgcatggatgacaattcgctgaggagcaagcttctgattgtagggagttgcgtggactgacgtgctggcagctacgtttctcggttttgggcacttgtcggcgaaatgacccattccttgacaattgaagcaacagatatcttcccggactcggcattttcttttctcattttgattcctctgtcctggcactggagttaggctgaaactgtaatcttggcgaggatttgtgttgccttgatgcttctctccgttggaactggcgggttggttggccatcttcttcgtcagcagaaaactgaattgacaatcttttggtacatgatcagttccttcacaaaagaaacaagtgatcctgctcgttggacacctgtcgggtggatggtcttccttacaatgaacgcatgtagtggcacacgagctggcaacatgaccgatttctccacaacgagagcatgccttacgttccatttcatcttcatcatctgaggagacttgatctgaatcttcactatcagacactctacctccattagctaaaagatgctctgtcaactgtggtgcacctcggaaggtatttcttctctgacgttttgtcaatcctggtggaggccattctgtgctggtaatgatcatcttacggacttcatcttcggttcgcattggtgtttttcttttctgctgaggacactcccttgcatagtgcccttgctcatcacacataaaacaaatgatacttgcttcttttgagtcaacatgtggcacgccaccatgggtctttcgggatgctggcggcatgctgacttgtggcgtgagtgcttggactgcctccaactgcacttgaggttgtatctgactcaggttcagaattggcgtctgatgctgctgtagtatctctataagcaatcggttctggttaatcaggtgttggaccagtgtcacacaactggtgtctggtgcttcattcactcgggagcttgaggtaccaatgtcctgacttctgaccttattgcctttctcattgtcagccatctgttgcaaaggtttggggagagagggaaaacaaaggggagagacagattagaaactaaggataggaccttaacagatctaagtcttttgctgttatgatgtatgttaggcttattctgcaagttgattaagcaaacaacctagcatggttacatcacaacccactgatgcaaaccacgcgctacacacacaagcaaggaaacacacgacaaccgaaacactagagggtagcttaggttctgcgacgggttctccaagatcttcactcctgcttcacagctggcttcactgcttccttcacttcgctagcggatcctgcagccttctggagcttcggcagacacttgacgacatcttcttcttcactgacctgaccatctagtactagttgaaatccgaataaggaagaagggagtaaaccttttgcaaatagcattaggggaaggagaaaaaaggaactttcgcaaatagttttatttataaaatatgtccttaggttttatccacttggcttatcctacagtcgagatggctctgataccatcttgtcgcgaccgagaaaattgccttttcccgaacgctagtgtattaatccccgtcctaggaaaagccggggtacaccaaacaaacatgatataaaaggcacatctttattatatcgacaatatttacattattacaaaggcacttcaggcctgacaatcaaaaataaacagcagcggactagcgggcctacggctccatcttcacaggcgctcaactggggtataagccaagactccacctaagacatcttctccgaagcttctcttactgaaggggggagaaagatagagcaagaatgagtacaaccacagtactcagcaagccacactggcagatgcatgattaatgcaagggggtacaaggggtaataatatcggggttaagttttgcagtaaacagcatttaaaagtcacttagttgcccaaagccattttataaagacgatcctagagctacacagtattagtaatcaaggccgtgaacccacacgaacctgccttaacccaaggcctacgatgattcagaccgaactggcaacccgaccttgggtcccagctcgtcccaagccaacccaggccaaccattccacattttagttattaagcaggttttaagaatttaaaacactaacttgggtacattgctaggcttgcccataaccgagggcgcggctattcgaataggttttactctgatcagaggtgtacatctttacccacaagacacatcttcctcacgtgcaaccacgtgccacataccaccacggtatacagacggaagacgtgacatagtttccaacccatcctagccatagacaagagtaccgacccaatcccaacctacggccggaacctccgggacaggtaggcaggattgagcccctagcagcaggacaccagccctgtgccatgacatctcgactaccgggccgcagctcgtgtagccttcatttgtcctagagatgtccatcgacccccgacttcgtccatctccatccgtgtacttttgtttataaccagactgagccacaaactaagccttacccactagacatgtggaagtacggtagtgctttgcaacagaggcccgaagaccggtccttatatggccgaggtgctactatcaaaaccatgcaccccgagcccagcctaaaaccattttggggattttgaatagagggggcggtgtgaatccaattccacaataatccaacaattccaaagtgtccaggtgatgagaaaattcccaaagtctagagttgtaaaaccacctaatgttgcctaattaatcagcgaagcatctacctaaaattatactagtggtactatgagtagagtgtccactagttggggttttgtttaatctagggtgaacaaggaaataataacaataacaataataaggtcataacaaaggtaaataggcatggctagataaaacagtgataacgcgggaatttaaataaagcgataatgcaataatttaaatcaacataattttataaactgggattcaatatgttcaaggatgatgtgacttgccttgctcgctttcccaaacgtcggcttcaacttccacgaagagcggatcttccgaagctgcagcgtctacacgaccaacggaaaagaaaaggcttttactctaataaactccatataacaagcaggaacaaagcacaaaaatgggctcttgacttcttaaggaaaaattagagacttgaacggtccaattccgagttcaaatggccaagttatggccgtttgaagtttatatgctctttaaatggatatttgcgaatttcttcatttaaattttaatttaaaaactcatttattgcgtcagccgggagagagggcgcgcggaccgggtccacgggagtggggcccacgcggtagcctctcagtccacggtggaccgggtgcacgcggctgacgccggccggcgccgtgggtcccacgcgtcagccgcacccgcgggcgcgggcggctgacggccgggccccacctggcagccgcgggacgcgcccgaaggcggccttgccggcacggccgacgggaggcggcgcgcccgcgcccctatggtcgccggcggcggccataggcatggcggagcggcggccgagagagaggagagaagagggaagcgaagcggcggtcctcggctcaccccgggtcgacggcggtgacggaaacggcgaccgaagcggcgagaggcggcggcgcggttcggatcgacgaggacggcggcgctccgacggtcggcgggcgaaacggaggagtggacgaggtcgacgaggacgcggcgaagccgaaggaggtgatgccgagacgggaggaggtccggggcgacgacggcggcgaaccggagctcggcggcgacggcggagagagaggacgccggtgcgggcttgattcccacggggagagagagcggcgagcggcggaaacggagcacacaggctcggggagcgattatatagcgtcgggagggggagagagcgcccggagaggaaggaacccggcgcggcgatctcggctccattgatgccccggcgaagattgcgggagtaaatccgagcgaa

SEQ ID NO: 21215 - DNA, 14355 bp, Oryza sativa
  unsure (1)..(14355): unsure at all n locations
gcatcatcctgaagataagcatagggatcctcctcgacttcattgccatccactgattaaattttgtaatagcaagagtgagtaccaaccgtactcagcaagccatcataacaacagtgcatatgatagagatattcaaggtacggccattggtttatttgcataaagctaatttcacaattcttttcacaagcctattatctagtatagactagtccagttttaattccagtgtttattacacagcaacggttctgttcgccacccctttatcttcccaaagatggcttcccgttaccggccgtaatggttttctggggtttactccttttcttctctcgaggaggtgatccgccagaagaaaatcatcatgcatatcccatcctaatcaatttaagaatttagagtctagccaagtgtaatacatgtcccgatgctcaatatccgcgagcacggctattcgaatagattggttttactcacactgcagtggatgtacactttacccgtactccgcgacttgcccaacacatgagcctacgtcccaacgaatgagacttgccacggcaaagcctttcaataacctcacgttgacagtacccgctccatgaacttgcatcctcatgcactctaggcgttataagtttctaacagtgagaggagttctggcgctcccgggaagggaagactcacacatgcattaagttttagttaagtccagtttacacatggcagtcctaccgatggcgacaccattgtaggcactcgcccctcgcgaccccaccaatggctgccccaccgtaggccctgacccacacacactaagaataaccactatgcagggatactgccttcgcttggctgtgtactccgctaggtctatacccatacgagaagtacggttgtacgagggtcatttcatgcttaacttcatggctcggtgtcacgaccggaaataacccaacgggcgttcctgacgtgcgtgcattattccttgtcccaggaggcaaggtacaccaaaagttgatacaattcagagtttaacaagcggaagcgtaaatagttaacttattacatgggcagcgaaggcccagcacacacagagacaaacgagaaacagcggaagactagggcgatgaccacaggcgcttgacggcaggcacgagctagacaccaaagccttcatcttcaaggagctcctcttctgggcttgggaaaaaattgagcaagactgagtacaaccaccgtactcaacaagacacacccacaaatgcagaataaatgcaagggagtacaaaggaattatactataaagggttagggtttgcagtaaacagcatttaaagatatttagttgctcaaagctattttgtaaacacgattctagaactgtacaatattatttatcaaggccgtgaacccacacgaacctgccttaacccaaggcctacgatgattcagaccgaactggcaacccgaccctgggtcccagctcgtcccaagccaacccaggccaaccaatccacattttagctgttaagcaggttttaagaattaaaacactaacttgggtacattgctcggctcgcccataaccgagggcgcggctattcgaatagattatactctgatcagaggtgtacaactttacccacaagacacatcttcctcacgtgcaaccacgtgccacataccaccacggtatacagacggaagacgtgacatagtttccaacccatcctagccatagacaagagtaccgacccaatcccacctacggccggaacccccgggacaggtaggcaggactgagcccctagcagcaggacaccggccctgtgccatgacatctcgactaccgggccgcagctcgtgtagccttcatttgccctggagaatgtccatcgacccccgacttcgtccatctccaatccgtgtacttttgtttataaccagactgagccacaaactaagccttacccactagacatgtggaagtacggtagtgctttgcaacagaggcccgaagaccggtccttatatggccgaggtgctactatcaaaaccatgcaccccgagcccagcctaaaaccattttggggattttgaatagaaggagcggtgtgaagccaattccacaataaccaaaccattccatagtatccagatgatatgaatatttcccaaggtctatagttgaaaaaccacctaatgttacctaattaaattgcgaagcatctacctaaaactaaactagtggtgccatgagtagagtgtccactagttgaggttttgtttattctagggtgaacaaggtaataataacaataacaataataataaggtcataacaaaggtaaataggcatggctaaataaaacagtgataacgcgggaatttaaataaagcgataatgcaataatttgaatcaacataattttataaactgggattcaatatgctcaaagatgatgtgacttgccttgctcgctttcccaaacgtcggcttcaacttccacgaagagcggatcttccgaagctgcagcgtctacacgaccaacggaaaagaaaaggcttttactctaataaactccatataacaagcaggaacaaagcacaaaaatgggttcttgacttcttaaggaaaaattagagacttgaacggtccaattccgagttcaaatggccaagatatggccatttgaagtttatatgctctttaaatggatatttgcgaatttcttcatttaaattttaatttaaaatcggatttattgcgtcagccgaggggaggggcgcgcggaccgggtccacgggagtggggcccacgcggcagcctcacggtccacggtggaccaggtgcacccggctcacaccggccggcgccgtgggtcctatgcgtcagccgcacccgagggcgcgggcggctgacggccgggccccacatggcagccgcggggcgcgcccaaaggcggcctcgccggcacagccgacgggaggcggcgcacccgcgccccgatggtcgccgccggcgaccaccggcgcggcggagcggcgcccgagagaggcgagggaagggggaaatgaaacggcggtccacggctcaccccgggtcgacggcgacgacgggaacggcgaccggagcggaggaaagcggcggcgcggctcgggttgacgaggacggcggcgttccggcggtcggcgggcgaagcggaggagtggacgaggtcggcgaggacgcggcgaagctgaaggaggcgatgccgaagcgggaggaggtccggggcgacgacggcggcggaccggagctcggcggcgacggcggagagagagggcgacggcgcgagctcgattccgacggggagagagagcggcgagtggcggaaacggaggagggaggcacggggatggtttatatagggttgggagcgagagagggcggccggaggagaaggaaaccggcgcggcgctctcgggctccatcaatggcgccggcgagatttgcgggggcaaatccgcccgtttgaacgcgagagagagaggggaaaatggggggaaagggagagggaatcacggggagtgatttccccctctttattgcacgcgggggcggcgggatgcggcggaatccgcggcggcggcggcgctagggcacgggcgaggcggcgggagcggcgcgaggtaggggatgacgggtgggccccacccgtcagcgagggtggcgggcgggcccgcccgtcagcggcgcgcgcgcgggggaaggccggatgggccgcgggggagaggagagagagggagagggaggtggaccgagccggcccaagaaggggagggggggaaaaagggactttttagggtttttctttttataaactcattttaactttgtttatttcttcttaattattatttgtgctctgaaaattccactaaaatttatttacgcattttaggcttttaggaaatatacaaaaatcctccaagccttattcgacttttatatttgcacattttaattgttggaggctttcacacgaattttaattattctcggcacaatttcgaggatgtattttagagtcgttttgggacgcgacactcggtccttaactgaccagggacagcactagccttttccggacaccacccaagtaccctagccgccccggtcgaaaacagtgtttaattttgtttctcttttcacaattcatgttatccttgtcatggcaatgtggtgtccacgcctccacatgccgcatctcaactaccttccctaaggtagttgcccaagcatatagcacttgataaatatgagaatgcatgattctaattagcatgactaagcatttgttcaatatcgactaagtacacacgttagcacggtttgcaatggtcatatggataatcaatatcaaggcatggcatatttaacaagtagggcattcatattcacatatgtatagcatgcaattttatttaaatcaacataattttcgcaataggttcaacatgctcaaagattagtgatgacttgccttgatcgcagtcttgctgacccagatcttcgattaactcagcaactccttcggaatctaaatttacgtgcgaaagattgatttgaattcaattagaattcatattaaatcaccaaaaattcaacagtacaaaaataaatagcaaaagtggttccatcagaaagatcttgattttagatgaatttaggttcaagtttcattcaaatccgagctaaaatgaatgagttatgcttgtttaaagattcaaatttgaattaattcaaacaattgtgaaatggcactgtgcagccgagaggggcattattacagtggctgacatgtgggccatcccccaattttatttccggtttttttttattattattttttttaaaggaaatcctattgtgtcattgacaggtgggtccggccccctgttgactgaggtcaagccggccttttaatccccggtgcgacccgcatgtcattgagacatttacttaaaacctaatttaattagatttctaagcatccgggcctacatgtcataggttcataataatactattagtttggggattactgtgcgctaatgaaatggggtccacatgtcataacccctccctctctcgtgtcttctctctctcccgtcgtcttcaacctcgcgcgcgcggccgaacagaggagcagtgcgcggcggcgcgacggcccgagccggaacagctcggcgcacggcgaggcgagcggcggcgcatcaccggatgcccgccggtggcggcggcgaagcgcggcgaccgttcggcgcgcggcacgacggcgcgcgtcggcgccgagatcccaaactcggcggcggcacgatgaggaccaatgtgagcgcaaccggctacgattcaaccatctagggtccacatggagtatatataagcaaaatctagcctaggttgtattggaacgaagtccccccacggcgagctcaaccatggcgcagtggcggccggtgccggcacggttacggcggcgcacaccccaaatcgagggggccgggggtttctaggtgactaggcgggactactggcgcgagggcttaccacgaagtggcggaacggcgaagttcgacggcgagtggcgcggcgcggtccaaatagggacggacggcggtcggcgacgggcgcaggtgttcgacgctcgacctccctcgcgtaacggctcccggctccctccatagcagcaacgggaacgggcacacctncttaaacaccccgccacccacactggccgagaagccctgtggcggcggcgcagccggcgcccaccaggtgttcgacacccggcgacggcgtgatcctgcccctcttcggtggagcaaaagttttagagagaggaagagttaatggaatgttgagttcggataagaacgagccaaggacaagcctatataagcgagagggagagcgattccttaatggataagggtgatcgatgacgcggctctgtttcgattcctcctaggttcgattcaatgccctgggccggcatgattgcctacgcggtagtatgcaggagaggtctcgctagctggagaaaggggcaccgcattacccagcggtcgcaaccgggggtgacaagatggagacgcgacggggacgtgatggcgacaagagcgacggcgatgggcagtggtaacggcttggatagggggcgccgggctatgccctagggtgacgcgggcacccgtggtggccattatcactccatcccgagggcgacgcgcgaggggacgggatgacgcgggcacccgtggcggcgcagcctttggcgcgggcttttggccgcttggtcggcggcgggcccacacagcttggcatgacgcggtgcggcgcacgggcacgactagtgtggcgcacgagtcggaaggcaggcgcgtggcacggcagcgattggcgagggtggcgccgggtgttcggttgggttaggcacagatcgaacacctggcgcgcaatgaacagtagcgccaggaaaagaaaaaggaagagaagagaaaggataagggaaaaaggaagagctaaattgcaaaatggcttggaattgagttgtaactctacatattttgaattcaagaattcaaacatttgatttgaatatttatttatttattcatatatctaccaaatgattttacccatcacatatacttctaatttcctgatttattgaacctaagaattaaggattaatattattactcttgacctatattccttaatccctgattttataaattctaatctttgtttttcctataacctcatttttggtttatttcaccttaggtcattactaatattccattcgcattatgtttttcttattttgccatattctggattttattatttgacttccatctcaacatacacctcttatagtatttgaattaaacaatatatttgcaatatataaacgaataacaccagcatgatgcaaagtttttaaaaagttcgaatttttagtgatttttattattgaggatttttaggatgttacatctttctcatggggcactcgcgggtggatggtcttcctcacaatgaaagcaggtagtggcacacgagctagcaacatgaccgatttctccacaacgagagcatgccttatgttccattttattctggttgaaaccttggggagacttctcatcttcatcatctgaggagacttgatctgaatcttcactatcatacactctacctccactagctaaaagatgctctgtcaactgtggtgcacctcggaaggaatttcttctctgacgttttgtcattcctggtggaggccattctgtgctggtaatgatcatcttacggacttcatcttcggttcgcattggtgcttttcttttctgctgaggacagttccttgcatagtgcccttgttcatcacacataaaacaaatgattcttgcttcttttgagtcaacatgtgacatggcatgaggggccttctgggatgttggcggtgcgctgacttgtggtgtgagtgcttggactgcctccaactgcacttaaggttgcatctgactccggttcagaattggcgtccgatgctgctgtagtatctctataagcaatttgttctgcttaatcaagtgttggaccactgccacacaattggtgtctggtgcttcattcactcgggagcttgaggtacccatgtcctgacttctgaccttattgcctttctcattgtcagccatctgttgcaaggtttggagagggagagagggaaaacaaaggggagagacagatcaaaaactaaggataggaccttaacagatctaagtcttttgctgttatgatgtatgttaggcttattctgcaagttgattaagcaaacaacctagcatggttacatcacaccccactgatgcaaaccacgtgctacacacacaagcaaggaaacacacgactatcgaaaccctagagggtggcttaggttctacgacgggttctctaagatcttcactcctgcttcacatctagcttcactgcttccttcgcttcgctagcggaccctgcggtcttccggagcttcggcaaacaattggcgacatctttttcttcgcaaaactaaccatctagtactagttgaaaatctgaaggaggaagaagagaataaacattttgcaaatagcattagggaaaggaggaaaaaggaactttcgcaaatagtttcatttataaaatatgtccttaggttttatccacttggcttatcctacagtcgagatggctctgataccaccttgtcaccaccgagaaaatttgcattttcccgaacgctagtgtattaattcccgtcccaggaaaagccggggtacaccacacaaacatgatataaaagacacatctttattataaagataatatttacattattacaaaggcacctcaggcttgacaaacaaaaaaaaacagcagcggactagcgggcctacggctccatcttcacaggcgctcaactggggtataagccaggacaccacctaagacttcttctccaaagcttctcttactgaagtgggggaaagattgagcaagaatgagtacaaccaccgtactcagcaagccacatcggcagatgcatgattaatgcaaggggggtacaaggggataataataggggttaggttttgctgtaaacagcatttataagtcacttagttgcccaaatctattttgtaaacacgatccaagagctacacaatattattaatcaaggccgtgaacccacatgaacctgccttaacccaaggcctacgatgattcagactgaactggcaacccgacctgggtcccagctagtctcaagccaacccaggccaacctttccacattttagttattaagcaaattttaagaattaaaccactaacttgggtacattgctaggcttgcccatatctgagggctcggctattcgaatagatttactctgatcagaggtgtacatctttacccacaagacacatctttactccgcattccatgggcatggaacccgtcgtaaacatgtgacataacccttcacccatcctagccgtgtagtcttcatttgcctagacatctcgattaccgagccgcagctcgcgtagcctttatttggctcagagatatccatcgtcgcaacgacttcatccatctctatccatgtccttttgttcaggactagactgagcaccaagttaagccttacccattagacatgtggttagtacggtagtgctttgcaacagaggcccaaagaccggtccttatagtggccgaggtgctactagcaaaaccctgcacctcgagcccagcctaaaaccattttgggagttttgaatagaggggggaggtgtgtgttcaattccatcacaagccaaccattccacagtgtccaaatgatatgagcatccccaaagtctaaagttataaaaccacctaatgttgcctaattattcagcgagcatctacctaaattcatactagtggaaccatgaatagattacccactagttggggttttattttcctagggtgaacaaggtaataataaacaatagcaataataataaggtcataacaaaggtaaataggcatggccaaataaaacagtgataacacgggaatttaaataaagcgataatgcattaatttaaatcaaaataattttataaactaggattcaatatgctcaaggatgatgtgacttgccttgctcagagagaacggccttccgaacgctcggcgacgaccgcaaaccacgcttcgggaacctccggaacgacaaaagctacgcgaagcacacaagcaaagctacaagcctataaagaagcaataagaatacataaaaagaaagcacagggttcttaaggatataacaaacattaagagacttgaacgggtcgattcagagttcgtatgaccaagatatgatcatccgaagtttaatgctgttatatgaagatttacggattattgtgatttggtttcgcaattataaaacatgtgtaagtgctaacctggaaaagacaggaaggctgcgcttgttgacatgcagactccacatgtcaacctaagggaccacggtggaccgggtacacagagacggtccgcgggtcgacggaagcggaccccgtgtgtcaaccgaggcgagtagccgacaaacggactccaccagacaccacgcgggctgcacacgtagaaaccacgtggctatcgagcgggcacactaacatggtctccacacgcacaagcgaacgactaccgacaccggtacacgggtaccggggtcgacagccgcacaacgggtacggggcgacaccgaaaggacgaggacgagggcgacgagggagagatccttaccaccacgcgatgaggcgtgggaatgacaaagacgaacgagcgcggcggagacgactcggggacgacggaggcgaacggcgagggaacgacttcggcggcgatccttggacgaaggcgagacgcggccggcgcagggcttgacgacgcggaggcgaggacgaagacgacgacggggctgcagcggcacacttgacggacgcggacgacggacgagaacgacttgacggagggacgaacgccacgacgaccgggaacgacgagaggacgacaacgatgacgaccagggccggcgaggagacgatgatggcagctggcggcagctgcacagagctgaggccggcgtgggacacgccgcagcaatgcccacgacggcggcggcacaacgagacgaggagccggcgaggaggagcggccgaccgaagggacgtcggcgacgacgaggatggagaggaggcgatgccgaggacgatgtcaccagttcgccgctgcgatgccggaggtggtggtggcgcggccgacggcgcacgggtagaggaagggccaaccggggaaattccggcgaggtggatggagaggccggcacggcacggcggtgttccggcgaaaccgaggagtggccggggaaggagacgatgccgcggtatcgaaggaggagacgaaggcgtcgatcggcgtatcggtgatgaacaggagccggccggagacggtgtagtggtggcgacgccactgaacgccggcgagaacgcgcctccggtgctctccgcgctaaacggaggacggcccgggggagaggaggcggctgcgaggctgctggtggcgacggcgcgaccggatggcgctccggcgaggtgggagaggcggctggaggcggccggcggcacaggagagagaggaggacggcggggagaggtggtgaggccacgggagagcgcgggagggggctaaaatgatagaacggagtgagggggttccattgtataggatggtggagggagccgggcatgggagagggcggaacggcgacgggaaacacggccagcggccatggaaggcggccgggaatggcagggccgttccaggcgttagagggcacgaatcaagggggaaattgggggtaatcaaagaggaatcaatggggattaattccccctatttaattttggaatcccatgagtaaatcgcacggatttgagggaggaaaggagctagggttcacgggagagagaggaaggaggccgggcgggaggaggatgatgacccggcgcatgggacccacgcagggagtgcggtcagcgcgcgtgcggcgcgcgtgaggggtgtgcggctcgggaggctggggcggcttgggccggtaggcggcccaggcgggaggggaggaaaagggagtgggccgggaggggaaggggaggcccaagagaaggagggagagaaagagagggaggaagagaggacttgggccgcgggccgagggagagagaaagggaggactttgggccagacttggcccaaaggtggaaggaggattatttttaggtttttctttttaataaactttgataattgttgttgttgcttaataaatattttcggtgctctgaaaattcaagtaaaatttgagggctcattttagaccaaggagaatttaacaaaaattctccgggccacattcgaatttttcttgtacgtattttagtgtttgccaatttcttttcaaattttaattaattctattattccttttagaaaataatttttatttcgggatgaatttatcaggacgtgacaaatgtgccatttttggatgctatgcaagtaccaacatacgcccgttatctcaaggtcatactcaacaacaagagaccgctcccaacaacggaggtggtcaagctaacggaacactgcagcaacctgatactccacaagctccaggagaagaagaaagatccggggtgtcccacgatcacctgctcgatcggggcacaacaattcgtccatgccttgtgcgaccttggagctagtgtcagcgtcatgccaaaaaacgtctttgacaaactcaacttcatggtgttggcaccaacaccgatgtgcctccaactggctgattcatcagttcgttacccggcggggatagtggaggatgtgcctgttaagatacggaatttcttcatcccggttgattttgtggtgctagacatggacatggggaaggagacaccgctcatactggggcgtccgttccttagcaccgcaggagccaacagtgacgtgggaacggggagtgatacagtattaccataatacaaacggagatagagagattaatagttatagagatttacaaccgaggaacggaacaatgcttcatggtcagaatcaagtacaggccaaacccgcagaacattcaagaggtcgaagtggagcaacccaagacggatagcctggtaaggttcatgcagaacttcctgggaaaggaaacaacaatgcccaggaaccgttattggaggacgctagtaaaatcacctgtaccggccaagaagttagagcagccagctcagaggaagccgtcttctgcactaaaatacaaaggtgtggaaggaaaagccaaagacgcccgctccattacctccggagacgggtggaaaatccgtgaactgaatcgaaaggaggtatggtcttgcacgacggactttaaatgacgcgaccttcgccaacaggtaaattggtatgtatccgcatatttgttttcaacaatttgaatttttgcatcaccacatatttgaatttcaaaattgcttttaggacttttgaattttgaggaaattcttcaaatgaatttttcagagcaaaccaaaataaaattttcaacgaaaattcactgtgccacgatcacactgaccgttggattccaacggccgaaagtggggccggttgggcccactaggggttcgcccgaaccggccaggcaacggtcagctgcctcactttttgaggcaacggctagtgggttccacatgtcatttttgaccgttgtgggtatcctacaaaagccagccggccgagagagggaattctaccccatttcaactcattttcatttcctctccaaagtttgctcccaagttcattcatgctttgatagttttcctcaacttcaactctttagttgcatacatacaagttgctttggtgaaactaacaggcgggtgaaactcttgtcatttctaacccccgccgagttagcctgttcttgctccattgtgtagtatgaggaggcaactgtctcgtctgttcaaggggtcgggctctctatcaagtcgtcatgacgagtctagtactcgttcatcagccgatgcctcgatggaaaacgccgacgctccgcgacaactcctgagcgacactgacctcgaccttgtcagtgatcgggagagacaagcctactacatcctgagcgaccgggagtatgctcacacgcgagaatactcaccggagttgctgaaaaagataggtttggatgttgaatttcgttctatttggaaagctgttggttggcagagatttgctgtggtagatgagtctggttctcgtttgcttactttgcaatttctgtgcactttgaaagaaatagaagatggtatttcttttcgccttttccgtaaggagttcacgctcacatggaaaggcttgagtacacttcttgtttttcacgattcctttaaaatcgatctccagaaaggaatttcttggttcaagaaaaataggttttgggaagatatttcgggtgctccaatttgcaagaaacctagaacgaatgatatccataatcctgcacttaggctcatgcacaaatggattgctatgactttgtttcctagagtgatctgagacccattaggggagatgaattaattatcatgtttgccatggttagaaagatc

SEQ ID NO: 21216 - DNA, 2651 bp, Oryza sativa
ccgatggatgcagggttttgagggaacggtggagattcacaaccaatggcggttggagggtattaccgacctttccaaccgccataaccgtcattacctgcctatttaagaagctcactctcttcacttcaacacgcacctcaagcaagagctctctcattcctctcaagtttagtttagtattatctagctggtggaatagaattagaataggaatcaggagtccggaagccttcagaagagttcgggtttggctctagtagctttcctttcctcttttgtaagctttgtacttttattacaatactcttctaaatacattaatggtattggaatactttccgagtatataagtacctactttacattatgttcatgttatactgagtatactgctagcttatctgggagatgctttggtgcgggtatagtgtttgcttatgcaattactctatgtcatgacaatgatattagagtagtatctggtagtttagacgtggtgtctagattagaggatatcattatttggggttatatattgaagacgagaggtgggccactgatactgacagctcagtacgggtattcctcctcgcctatatataatcctaagttaatttcctggggagggtattcctccgtatttagccccggttggatggtcatgacaggctgtcgtaaggaactcggcagtcaagggtggcttctcaaagtactaggaggccatcggatagagggtattagctagtataccagttaactagaatgtatgtatactatgtatattagaggtataggaatagattctctttctctttttttccacctagcttagattaattattatgaggatgagtagtaatgcttatgtgtcaaactacccttggattatcttaacccctgcttagaatacgattatcacaagtaatatgtatgttattagttgagttctctctacatgatctttccacgggataaaataaatacgataccctttgaatactctcgtgtgaaataatacaatggtatatccgtgctcttgtggatgaactctgtaaccataatataccagaagtattgatgcgtcattgctgtgaattatatttctagtaatgtccttacgaaataccaacagtaataattttaatattatcgatataataaagatgtgtctttttatcatgtttgtgtggtgtaccccggcttatcctgtgacggggattaatacactagtgttctggaaaagctatttttccggatgcgacaaagagaaagccaagttagatatgctctctgccgggccaattcagccgaacatagatcggcttgaagcccgcaagattgatctcatagctcaacttgaagaatgtaatgccgaactagatctggacaagcaaaagttagccaatcttccaaatgctgtcgaagaacagaaatccagactgaaattggctatcaagaatgtagctgatatgatcaagtacctcaaggtcatttctggaaccgatgctcaagatatccaagctatcgaagaagtagatcaaatcaggcaacgggctgtgtcggctatccaacgctacttgtctggataattaccctgtgtaataggacttagcaaattttgtaatcggctcagaaaccttgatactccttttgtcactgaactgttgtgccgattaatataacttctcaagttgctcaaaaatttgcaacttttgtatatatgtgcccccctaattttgcaatgatgaaggcattgataaaattataatttggactaagggcgatataaccatatcggccattgtacatcggcaaaacacaaccgattacaacaagaaaacaactaagggctatataaccatatcggccattgtacatcggcaaaacacaaccgattacaacaagaaaataactaagggcgatataactatatcggccatctcaaggcgatgtaaacacatcggctatcatgtatcggcaacatccagccgatcgtgcattaacctaaacactggggtaatatttcttcaagtacttgccattgagcgctcgtccataaacttctccatcaagtccttgcaacatataagctcccttggacacaaccttatggatttggaacggtccttcccaatttggtgaccacttgccgaatttattatcacgagtccctatcggcaaaatcaatttccaaaaaagttcaccttcagaaaaagactagggcaccacttttttgttgtaacgtcgagcaacgcattccttatccttggtaacttttacaagagctctcaacgtagattgaactaagtcttccctttcatcggccatgagattataatattcatcggctgtcaactcattttgcaactctgttctccttgggtgtcacaccctgaaaaatcgctaaattataaatcattgtgaaaaagaaatttttagaaattacttaataattaaagcaagtgtgtgaataaaatctatgaaaattttgaacattaagttgatatagataaaattgtattaaatatttttaatgtccaagtattttaaggatttttcccagaattatttgagcattggaagtatttttaataaatgaaagatcattcagtgattaatttaattggaaaagaattaataattctttc

SEQ ID NO: 21217 - DNA, 2435 bp, Oryza sativa
ttaattcatggccgaagatgactttattttcctatgggttataatttgactagcatggaccttatatattggattggttcagctagatgttatttatagttgcttagccatgcttagaaacaatagctcattaatgggatgaatcatactacattattatttatggttatatttaatggtagctcacgatattcagtcatgttatgataattaattggtaattaaaatatgattaatggtgggttgtgagcacatggttttgaaggtcgcgctcatgacaattaagaaccggttcgcgagctattgttgtgagacattaaccgtaccaaccacaagccagcgtgggcaacggctttatcttttgtatagcatgattcattatggtgtgccagactgagaagtggtgagaagtccgtgggggtcgctggggagtccattgcctctggttttgagggggaggttatgatccaggaatggtgcactgtggtgagttgtgttgtgcgaagggtattgtcacgatttcccccttagcagtgccgtggtggtacttcggggcatggcaacatgtgtggaatcgtgtcttctgggtacaatggtacatctctggccagagtaaaactattcgaatagccgtgcccacggttatgggcgagtctaacaatgtttttcgtgattagtcccacactactcattaatgttaataatgtgatgattaatttgactcctggtttggaatggataattcctggtttggaggtttgatctgtacgatcggggttggttgttcaggtttggttgggcctgtgcagcatgggtgtgctgttcagtgttgattaatattgatgattaattgctctactgttttacaaattctcaactctttgctaaatgctgctttcgcaaatgagcctatattatgccatcctttggtatccttgtgcacttgcatacttgctgtgtagcttgttgagtatgtcatatgctcattcttgcaataatcatcaaacctcagttgaagaaaaggatccagaagtagaagacctttggcttagaacccagttgagctgcctgtgggagtggagctgaagcttcgctagattttattttccgctgcagatttcttcatggtgaggactaagtgcctcttatgcaagtatttatcgttttagttattttgatgaatctgtatattaaattgtcagtttgtgttcctcggctgattcctggacgagggttttaatgcacaaattagttcagaaatttcttgcgaatttctaggcgtgacattgggccgattctgacttcctatggtaaaactgcctcatgtccataaagcttatagagaggaacttggatcgaaccatgacaagccatccgataggaccacaatgctttggccaacctagtgtgtcattgccgaggataatcagagatctttctcttaatgaacttaatcaaactcttattagatgcctcggcttgcccattagcttgtgcataatatggcgaagaattcaacaatttaatacccatgctatcggcaaactgaacaaactcatcggacacaaaaatcgagcctcgattggttgtaatggtctgaggaataccaaatcgataaataatatgcttttgaacaaattgtatagcatcccctgaatcaactttcttcaaaggaatcgcttctacccagttggtaaagtaatcggttgccaccaatataaacttgtgtcccttgctcgatggtggattaatcattccgatcatatcaattccccaacctctgaatggccacggtttgatgatatgattcataaccgatgctggcgctctttgaatcgctccaaacttctgacaatcttaacatcccttgtaatatcggaagcaatcttccaacattgtcggccaaaaatatcctacccgccgaagcaaccacttcatcttataagccgattcatgagtgccacatataccacgcctatcgcaaccttggcttgataggcactcaaacatttaagcaataccccatcaatcgtccgataatacaattcatcatccaacaaggtgtatttcaaagctttatagcgcaattttcgtgaagccatgcattattttcgaatgtcatcgggtggtgagcctttcccagataattaatggccgaagatgactttattttcctatgggttacaatttgattagcttggaccttatatattggattggttcagctaaatgctataagtatagttgcttagccatgcttagaaacattagctaattaatgggatggatcatatatactacattattatttatggttatatttaatggtagctcacgatggttaatcgtgtaaagttaattaattgataattaaaacatggttaaaggtggggttgtgagcatatggttttgatggttgggctcatgacaattaa

SEQ ID NO: 21218 - DNA, 6541 bp, Oryza sativa
ttttgctttaaattaatgcattatcgctttatttaaattcctgtgttatcactgttttatttagccatgcctatttacctttgttatgaccttattattattgctattgtttattattaccttgttcaccctaggaaaataaaaccccaactagtgggtaatctattcatggttccactagtatgaatttaggtagatgctcgcaaaataattaggcaacattaggtggttttattactttagactttggggatgctcatatcatttggacactgtggaatggttggcttgtgatggaattgaacacacacctcccccctctattcaaaactcccaaaatggttttaggctgggctcgaggtgcagggttttgctagtagcacctcggccactataaggaccggtcttcgggcctctgttgcaaagcactaccatactaaccacatgtctaatgggtaaggcttaactcggtgctcagtctagtctggaacaaaaggacacggatagagatggatgaagtcgttgcgacaatggatatctatgaggcaaatgaaggctacgcgagctgcggctcggtaatcgagatgtctaggcaaatgaagactacacgggtcggtgcccgttagtcgagatgccatggcactggactagtacgcgggtggtctcaccgctatgtgtgtggcgcacccggtctagatcttgttgctaggggctcaatcctggcctgcctgtcccgggataccggccataggtagggttgggtcggtacttttgttcacggctaggatgggtgaagggttatgtcacatgtttacgacgggttccaaggccatggaatgcggagtaaagatgtgtcttgtgggtaaagatgtacacctttgatcagagtaaatctattcgaattgctgagccctcggatatgggcaagcctagcaatgtacccaagttagtggtttaattcttaaaatttgcttaacaactaaaatgtggaaaggttggcctgggttggcttgggacaagctgggacccaggtcgggttgccagttcggtctgaatcatcgtaggccttgggttaaggcaggttcgtgtgggttcacggccttgattaataatattgtgtagctcttggatcgtgtttacaaaatagctttgggcaactaagtgacttataaatgctgtttacagcaaaacctaacccctattattatccccttgtaccccccttgcattaatcatgcatctgccgatgtggcttgctgagtacggtggttgtactcattcttgctcaatctttcccccacttcagtaagagaagctttggagaagaagtcttaggtggtgtcctggcttataccccagttgagcgcctgtgaagatggagccgtaggcccgctagtccgctgctgtttttttttgtttgtcaagcctgaggtgcctttgtaataatgtaaatattatctttataataaagatgtgtcttttatatcatgtttgtgtggtgtaccccggcttttcctgggacggggattaatacactagcgttcgggaaaatgcaaattttctcggtcgcgacaacattgatgtgaatcttttggattacttcaacaaaacgagtcaatagatggcgcttcttttgacatcccattagttcctacaggcttaggatatggcagatcacgagtggacttacctcccctcgttgtgatcgccttaacattttcaatggaggagtcgggttgccccggaatcctcccagattcatttgtagggactaaagatgccaacggagctaactgggtttcgatcatcttattaaagctcagctagttttgaaatgcggaagcaaagccatctagcttaacatttatgttctctaagatcttatcattggcagcaagctttttgcttagtgcatcagtggtttagcttgcacaaaaagaagatccttcaaggagggttggttaaagaagttactgttattattacctccttgataatatgggcgtggttggttccactcctgacctccttgtggacgatacccattgttgttgttgcccatgtacatcgcctcctcacggatttccgggcagtcgttcccagaatgacccgtgccgccgcagacttcacacgtgatgtgagagtccaaggccttgacggtgccttgtggccgtttctcatggtcgtccaatcatttcatgaggaggtccagcttggcagcaagtaactctgtctccttaacggtgtgcatgcttcgctgacgggtctggagtcgttcctcgctccaacccatattggagaccatcttctctatgagttcaacggctccttgaaccgttttagagaagaaggctcatccagatgccgcgtccaggtgatcgcgggacatcagggtgagcccattgtaaaagttctgtaggatcagacagtcatccatcccatgatgaggacgggctagcctgcgccatcgtgatgaggctggacttcaaatcgaaatccacatctcctatgttgacttgtggcccgatggccacattgtcagcagagggagcagcgaactcgcgaagagtcttggtggcgctggtacggctggtttctctgtcggtaaagttttctgcgaagcaatgactcgcggcctgatgctccggaagaaaacttatggattttctttgaagttttccggcaggttggaaccagtcatgcactaccaacggaaaggaaaatgattatacagaggaaaatgcactaccagttattttcacaagaaagagtgaaaacaaccaagataagcctgcaaaggaaaatgattatacagaggtaaatataaagtattagttcaagtaatctctatcatgaatcttccccggcaacggcgctagaaatgcttgctggtatttcttaacgacattactagaaatataatttccagtaatgacgcagaaatacttctggtatattatggttatagagttcatctgcaagcgcacggatataccattgtagcacttcatccgagagtattcaaagggtatcgtatttattttatcccatgggaagatcacgtagagagaactcaactaataacttatatattacttgtgataatcgtattataagcaggggttaagataatccaagggtagagtgacacacaagcattactactcatgctcataataattaatctaagctaggtggaaagaaaagagaaagagaatctattcctatacctctaatatacatagtatacatacattctagttaactggtatactagctaataccctctatccgatgccctcctggtacttcaagaagccacccctgactgccgagttccttacgacagcccgtcatgaccatccaaccggagctaaatacggaggaataccctcccatggaaattaacttaggattatatataggcgcggaggaatacccttactgagctgtcaccatcagcggccaacctctcatccgcaatatataaccccaaataatgatatcccgtaatctagacaccacgtctaaactactagatactactctaatatcattgtcatgacatagagtaattgcataagcaaacactatacccgcaccaaagcatctcccagataagctagcagtatactcagtataacatgaacataatgtaaagtaggtactcatatacttggaaagtattccaataccataaatgtatttagaagagttttctaataaaagtacaaagcttacaaaagaggaaagggaagctactagagccatacccaaactcttctaaaggctttcggactcctgattcctattctaattctattccaccagctagatactactaaactaaacttgagaggaatgagagagctcttgcttgaggtgtgtgttgaagtgaagagagtgagcttcttaaataggcaggtaatgacggttatggcggttggaaaggtcggtaatacccttcaaccgccataggttgtgaatctccaccgttccctcaaaaccctgcatccatcggcttcacgggaggtttggccgaaccaccaggttcggccgaacctggggccagcccaaccagcccacattttcgctggtggcctcctctgctgctttactttgtagacttgtgaattttggtctgattcgtcgtgtcaattctgagttcttggcccattcatacataagtctggacttcgacatcgttcgattgatttatcatttaagttgatgtcgattctccttcattttattgtcattctctgcaaaaggttagtaaacccaatactagtggaatattattattctaacatatttatgcattgcaagcatcactagttctcctctattttggtaatattgacggtcgaaactaatcaataacgaccgtcaacaattacaaaggcgcttcaggcctgacaatcaaaaataaaaagcatcggactagcgggtctacggctccatcttcacaggcgctcaactggggtataagccaggactctacctaggacttcttctccaaagcttctcttactgaagggggggaaagatagagcaagaatgagtacaaccacagtactcagcaagtcacaccggaagatgcatgattaatgcaagggggtacaaggagtgataatatagtgttaggttttgcagtaaaacactatattattaatcaaggccgtgaacccacacgaacctgtcttaacccaaggcctacgatgattcagaccgaactggcaatccgacctgggtcccagctcatcccaagccaacccaggccaaccattctacattttagttgttaagcaagttttaagaattaaaccactaacttgggtacattgataggcttgcccataaccgagggcgcggctattcgaatagatttactctaatcagaggtgtacatctttacccacaagacacatctttactccgcattccatggccttggaacccgtcgtaaacatgtgacataacccttcacccatcctagtcgtgaacaaaagtactgacccaaccctgcctacagccggtatcccggacaggcaggccaggattgagcccctagcaacaggatctagaccaggtgcgccacacacataggggtgagaccacccgcgtactagtcctgtgccatggcatctcaactaatggacaccggcccatgtagccttcatttgcctagacatctcaattaccgagacgcagttcgtgtagccttcatttgcctcagagatatccatcgtcgcaacgacttcaaccatctctatccgtgtccttttgttcaggactagactgagcatcgagttaagccttacccattagacatgtggttagtacggtagtgctttgcaacagaggcccgagcttaatccttgtattggccggggtactacttcccacaactgacatgcacccaaaccccaccggaaaataggttttaggggttttgaaagaggaagagaggtgtgtgtccaattccaccaaaagccaaccattccatagtgtccaaatgctatgagaactcccaaagtctattgttataaaaccatctagtgttgcctaattaatcagcgaagtatctacctaaattcatactaatggaaccattaatagattacccactagttgcggtatcattttcctagggtgaacaaggtaataataaacaataacaatgaaaagactataacaaggattaataggaagtgctaaataaaacagtgataacgtgggaacttaaataaagcggtaatacaataatttaaatcaaaatagttttacaaactaggattcaatatgctcaagggtgatgcgatttgccttgctcagatagaacagccttgcgaaccttcggcgacgactgcgaaccacgcttcgggaacctccggaacgaccaaagctacgcgaagcacacaagtaaagctacaagcctataaagaagcaataacaatacataaaaagaaagcacatggttctttaggttataacaaacattaagagacttgaacgggtcgattcagagttcgtatgaccaagatctggtcatccgaagtttaatgctgttatatgaagatttgtggattattataattaggttttgcaattataaaacatgtgtaagcgctagcctggaaaagacaggaaggctacgctgttgacaagcgtaccccacacgtcaacctaaaggaccacggtataccgagtacacagagacagtccacaggtcgacagaaacagaccccgtgtgtcaaccgaggtgagtggccgacaaacggactccactagacaccacgcgggcttcacatgtggaaaccacacagctaccgagcgggcacactaacatggtcaccacacgcacatgcgaacgactaccgacaccgatacacgggtaccggggtcgacaatcgcacaacgggcacgggcgacactgaaaggacgaggacgggggcagcgagaggacggatccttaccaccacgcgacgaggcatgggaacaacgacgatgaacgggcacggcggtggcggcttgggga

SEQ ID NO: 21219 - DNA, 1109 bp, Oryza sativa
agcccgaggacgacctttccgctgcgatgctggagaaggagacggcaacgtcggctggctcaccgacgaggaacagtagccacccggaggaggggaggtactggacgccgacgaggagaccactccggcgagcttcgggtgaggaggaggtgaggccagagatgaggacgacgtcgcagagccgagggaggtggtggcgacatcggccgatgctctggcatggcaaccggggcggctggaggcagtgcagtggcggcaatgccactggacgctggcggggatgcacatccggtggtctccgcgcgaaacggaggacacgccggggaagaggaggcggctacgacgccgaggatggcgatggaatggcctaccggcacacgggcgaggcggcaaagatggctggaggtggccggcggcacaggagagagacgagggcgacggggagaggtggtgcggccacggggagaaacgggaggaggctaaaacgaaagaacagaggaaggggattccattttatagcggaggggaacgagccggccacgggaggagcggggaacggcggcaggattggcggccggtggccatggaaggtggctaggaatggcgcggtgtcacgtcctgataaattcatcccgaattaaaaatcattctctaaaaggaataatagaattaattaaaattcgaaaagaaattggcaaacactaaaatacgtacaagaaaaattcgaatgtggcccggagaatttttgttaaattctccttggtctaaaaggagccctcaaattttacttgaattttcagagcaccggaaataattattaagcaacaaaaacaattatcaaagtttattaaaaagaaaacctaaaaataatcctcttcctcctttgggccaagcccagcccaaagtctccctctcctccctctctttctctccctctccttctctccctcctcctcttgggcctcctcccctcccggcccagctccctcccctcccctctctctcccgggcctcctctccctcctctcctcctcttctgggccgcccctccctctctctttcccggcccaccttcccccgccttctccagcctgggccgccgccggccc

SEQ ID NO: 21220 - DNA, 7333 bp, Oryza sativa
  unsure (1)..(7333): unsure at all n locations
tgaatttatcaggacgtgacaacctatgtcaatttcttccaaatcatcagccgacacaaaaccctgtccttgcttgtcatcgagatcatctaatgtgtccttagtgtagacattcgaaccctccacgacgccctcaaaataatagcttgggttctccatcttcaattggctgtatctcagaatcggacacttttagaaaatctccatcccaaacttttccagataaacaatctagaccatccatctcccaaagagctaaatcggcactggcaacattgactgacctgtcggctggcacaatttcaatcttgtcgtcttgccactgaatcaagcattgatgcatagttgaaggaatacaataattggcatgaatccaatcccttccgagcaacaagctgtaagaacccttcccatcgatgacaaagaacgttgtagggatggttttgttgctgactgtcagctccacattcaaaacccctttggtttctgatggattgccgccaaagtccatgagcaccatgtttgtcttgatgagatctttggcatttctgcccagtttcctgaacgtggtgtaaggcatcaagtttactgcagccccaccatcgaccatcatcttggacatcggcttcccattaacgtaaccatctatatacaatggcttaagatgccgatgctctgtaccctctggcttctcgaaaactgcctgctccggtgataaaatcaacttagccgattcgtcttcaattttatcgacatcggcttgtttgatcccaatttcaacaggcaatgtgaaaaccatgtaaccgaagcagttaccacacttttccacttagccaaccttcttgcttcatcatccgtggcttcatcagctacaggcacttgattcttaacacgccactcctgcctcggctttgttttctttagccgatgattgatttcctgctcgacttcctgaaagcgctccctgttcctcaatatttgaacccttctcttctgattctttgtaaagataccagaaggacaccattgagttttcctgttttcattgtcctcctggccacgaccttggtttactggacccaatctttgatgaacaggaaccattgtctgccttagccgattgcccctgctatacaatcggcttgagctctccgcaatatcactgcacccaggacagtcctcaatagatggcagccttataccttcattccaataaaatctaaagaactcgcaaccccaatgaggatcaaagccatcaccaccttcctcataatgcttctcctgctgtttgtcatacttcctctgatatttgttgataatcttagccgaatttacctgaaaccctcttgcacgacctccatcggctgtccagccagctgtatgtaccatattgacaggaaaaggattgccatcaaccttcatcggcctcttagaatcatcaaacttgattttgcctccttcaatagccgcttggactgctgcctgaagaccttgcaatcattagtagtatgagacccagaattatgccacttgcaataccttttcttgcccaattctttagccgatggaattgtgtgaccagcgggaagttgaatctgcttttctcggagtagcaagtcaaaaatcttgtcagccttggtgatatcaaagtcatacctctcctcttttctagaattcttcacccattggtatggtataacctttttgctccttacccattcgagtgcagctatcttagaatcatcatccccatcatccgatccatatatatatacatatatatatataaggacaaacatgattaacctttctagaattcttcctagcctctgcaaacctctgttcatgcaaggttaccttctgtgtaagatgtgacaagctttcgaagtcttcagatgagaatttctccctgattggagcaatcataccctgaaaagccaaatcgactaactgggcatcagtcaaacttaagctgtagcacttattcctcatttctctgaacctctgaatatactcatgcacaggctcatcatgtctctgcttgattgctgtcaaatcagacagtttcatctcatgtaccccactgtagaaatagctgtgaaaatgcttctccaaatcggcccaactgttaatcgacccatatggcaaagaagaaaaccaagtgaaagccgatccagacaaagacaaccagaacaacataaccctcaaggcatccatagccgatgcttcaccacactgagataaaaatcggctaacatgttcataagttgatgtgctatcttgccctgagaattttgaaaaatctggaactttgaaccgattaggtagaggaactctctcaaaccattcagggtaaggttgtcagtacaaatttctagcaactttcggcctaagcccaaactgctccttcatgacatccgcaattgtcacgtcccaaaacgaccctaaaatatatcctttaaattatgcccagaataaataaaatccttgtgaaagcctccaaaaattaaaatatgcaaagttaaaagtcaaataaggcttggagaatttttgtatatttcctaaaagcctaaaatgtgtaaataaattttagtggaattttcagagcacaaataataattattaagaaataaacaaagttaaaaaggttttataaaaagaaaaaccctaaaaacccctctcccctctaatgggccggctgagcccatctccctcccctctctctcctctcccccgcggctcattcggcctctccccgcgcgcgcaccgctgacgggcgggcccgcccgccaccctcgctgacgggtggggcccacccgtcatccccgacctcccgccgctcccgccgccccgcccgtgccaagcgccaccgccgccgccgaatctgccgcatcccgccgtccccgcgcgcaattaagtggggggaattattccccgtgatcccctccctctttcctccctatttttccctctctctctctcgcattcaaatggccggatttgctcccgcaaatctcgccggcgccattgatggcggccgcacctcccacgccggtttccttccccgccggccgccctctctcccttccaaccctatttaaaccctccccgcaactctctcgcccgtttccgccacttgccgcaccttctccccgccggaaacgagctcgcgccgtcgccctctctctcctccgtcgccgacgacctccggccggccctctccgctcaccgggaccatctcccgcctcggcatcgccttctccggcttcgccgcaccgccgccgaccccgtccaccacctcgccgagctcgccgaccgccggaacgccgtcgtccccatccacccgagccgcgccgccggctttctccggttcgggcggcttctttgtcatccccgtcgacccggggtgagccgtggaccaccgcctcttttcccccttcccttcccctctctcggccgccgctatcccgtgcctatggccgccgccggcgaccataggggcgcgggcgccgcctccgggcgccccgtgtgcccccccagtggggcccgaccgtcacccgcccgcgccctagggtgcggctcacgcgcggggcccacggccccgcccggtgtgagcccgggtacgcccggtccaccgtggaccgtgatgctgccgcgtgggccccactcccgtggacccggtccgcgcgccctcacacctcggctgacgcaataaaccctttttaaattaaaatttaaatgcagaaattcgtaaatattcatttaaagagcagataaacttcaattggccataacttggccatttgaactcggaattggaccgttcaagtctctaatttttccttaagaagtcaagaacctatttgtgtgctttgttcttgcttgttatatggagtttattagagtaaaagccttttttcctttccgttggtcgtgtagacgctgcagcttcagaagatccgctccacgtggaggttgaagccgatgtttgggaaagcgagcaaggcaagtcacatcatctttgaacatattggatcccagtttgtgaaattattttgatttaaattaatgcattaccgctttatttaaattcccgcgttatcactattttatttagccatgcctatttgcctttgttatgaccttattattattgttattgtgattattaccttgttcaccctagaataaacaaaaccccaactagtgggtactctattcatggtaccactagtatgaatttaggtagatgcttcgctgtttaattaggcaacattaggtggttttataactctagactttgggaatattcatatcacttggacattatggaatggttggattattgtggaattggatgcacaccttcccctctattcaaaaccctcaaaatggttttaggctgggctcggggtgcatggttttgatagtagcacctcggccatataaggaccggtcttcgggcctctgttgcaaagcactaccgtacttccacatgtctagtgggtaaggcttagtttgtggctcagtctagttataaacaaaagtacacggatggagatggacgaagtcgggggtcgatggacatctctaggacaaatgaaggctacacgggctgcggcccggtagtcgagatgtcatggcacagggatggtgtcctgctgctaggggctcagtcctgcctacctgtcctagaggtttcggccgtaggtggggttgggtcggtactcttgtctatggctaggatgggttggaaactatgtcacgtcttccgtccatatgccgtggtggtatgtggcacgtggttgcacgtgaggaagacgtgtcttgtgggtaaagatgtacacctctgatcagagtacaatcaattcgaatagccgagccctcggttatgggcaaggctagcaatttacccaagttagtgttttaaattcttaaaaacctgcttaataactaaaatgtggaacggttggcctgggttggcttgggacgagctgggacccagggtcgggttgcaagttcggtctgaatcatcgtaggccttgggttaaggcaggttcgtgtgggttcacggccttgtttaaaanccacgccatgttctaggatcgtgttttaaaagcagctttaagcaactaagtgtcttttaaaagctgtttagtgcaaacccaaaccccctatattataactcctttgtactcctttgcatttattctgcacttgtgggtgtgtcttgttgagtatggtggttgtacttagtcttgctcaatttttcccaaactcagatgaggagctcctagatgatgaaggctttggtgtctagctcgtgcctgctgtcaagcgcctgtggtcgtcgccctagtcatccgttgtttttcgttgtcttcttgtgtgctggtccttcgttgcccatgtaataattaactatttacgcttccgcttgttaaactctaaattgtatcaacttttggtgttccttgcctcctgggacaaggaataatacacgcacgcaaggaacgcctgttgggttatttccagtcgtgacagcaatcaactcggcccatggttgttgctaaggtgctccttgaggttgctgtggcatgggctcaaattgattgtattgaggaacaaactggggttgagccgatcctgcctgctggtattgaacttgcggtgatggcggctgttactgataattcaaattgcccccctggtaattttgaagatcctgctgaatattgcgcaccaaatgcttgggaataacttgaggtatcaccgtgccatctagttgtacatgatgaaccaaatgctccgggacaacttgatttgcagcatgctgcacaggctgaccaccaggtgtcgcaaacctagccgatgcattcattaagccttgttgctggatccgctggacaacctgctgccttagtggcgtctattgaattggctgcaaaacctgccgtctgtgtggcatatgctgagctggttgcacaacctgttggattgggggtgtttgttgaatcggttgcacaacctgctgccttggcgttgtttgctgaatcggctgctgctgggttggatcaacggtatgttgaggaggtaagaacatagatgcaacctagtcttgtgttagccgattcacgttctgtccgctgtgttgtggttattctctcaccagcaaacggggattaaccaattggcctggtgccgacggagctgcaggaggtgcgggagccgatactggtgccgtcagctgagccgatggtgcattgtgagggattgactggacaactggttgattatcggtgattaatggccgataattcgggaaccctcctcctggtagataaaccggtcctgtagcttgatgctcagccattgaaccatcaaccattgattttaccatgcttgccaaagtattggttaatatgccagattgattgatcaaagcatggtgtacaacatagtcaacctgatcttagaagttgttgaactacaactgtgctgtattgctatcttgattaacacctccaccttgaactccctgagcaccatcaccttgaactccctgtactccttgagagttgtcaccttgatttccttgagaaccatatgtagcacctttatcactcggttgagccgagccatctggagcttgtttcacctctccatccttagaagaaccagtcctaggaacatcagcaactacctttaccttatacttctgcaccaccgttctcttgcgcgtttgcataaatgaacttaagaactggttacgtgcttactgcatcattgcttcaaatccttcttttgatcaggtgtcagcttgtctggagtgatggtcacgatgttgctctcattaacctcggacaggcctaactgctggatcttctctttaacagaaccggggctagccgaggacggtgatgctggtggcttctcctccatggagaaaaactgttgtcgcggttctgacttcttatcaggtccaactaggcgtgccaaaagcgtgttgatgaaaaacacgaggcttgggagatccgctttgttccagtgcaggtccaaaactcgcctccgggtatgctaacgtgccagttgatttgatcctgcaattaacaagaaataaagacaaagaaaccgcggttaaacttataaacgatagacgatcggcaaaaggccgatgatatatcatttatctttgagccgatgtcatatatgtatcgatcggcagtcatgaataaataagaaagaactaaaactactcgatcggctgcagatattaacgatatatactccttatatcgatatatacttaaatcaagtgattgggatagatcgg

SEQ ID NO: 21221 - DNA, 6491 bp, Oryza sativa
aacaaaagcctaatatacttaaatgcaacaagatctcaacataaagggcagatttaacatgttaataaagcacataaaacaaatatagttaaatcaggtaagatcagctgaaactccgatactaccccaatcggcaaccaagaagtaggctagagattgagattctaatcacgactcataagatcaaacaactgatgcagctataagtatgaagggaagaacaatatctagacaatcaagccgctggaagtttcatagagtggtggatatcttatataatctgaatcaacatcgatatttaacctaatcggctgccctctatcgacagatgttagccgattgtaagttaaatagagatattgctagagattatgtaagatatatgataactcgacgaattatataaacaagattagagtatcattgagatggaagcactaatcccgagaacgcaagttgtcataacaagttttacctcttgttgaagatcgaaaccgatgcagctcaaaccaaaagtaagaactcgtcgaaataaaactaaagcaaaaagggtggcgatgcgctgagattgtattgaacgtgtatgttcaatgattacatggggttcagggtctatttatacccgagaatcacaaactatgtccataccggacacgactcttatctctaacatactctaagataccataagtctttgcggcagacttttgcccaaacatatctctaaggaaattacataaaatatcctaattaatagatacaattgccttctcaggactctatccatgcatggcaatcgtcttgaagcatatcaactcaacccgatgtcgcacaccaaatcgtatcgtcggaatcggctgtatcggcttacccagtctgatcggactcagccgattctgatcgtaaccgatttggactccaaccgattcttactgtgtttccgcaatgatcttcactttcgattccgcttcgattcaatcttcttctccgatactaatattaccaaactttaaaaagtagggtcaaattggtagctagatttaaagcggggtcaaataagcaattgccccaaaaataaaaaatgggtgcacccctataagatttaaaatcggcaccaatgggtttctctgcagtagtgagtataaactatgtttagtaatttatatcttaacgatccatcttatcaatttagtatttcatatttttttaagtacaagtttaacgtacacacaacacaatcgtgcaatcgctcacatatctaccaggactcgttttgtgaagattttaaaaaaaatttatagctatttagattgcatgtatgcaattagggccatgtttagatttcaacttttttcaacaaatttctaacttttccgtcacatcgaatttttctacacacaaacttccaactttttcgtcacatcatttcaatttctttaaaattttaattttgacgtggaaatcacaacctaggtgtgtatatgtactttggtgaaatactttctgcaagcacgaaatcctatagacacagctagcatacgaatcataagattgaacagagctgatcgacaaaagaaataaagaacggggaactacgttctgccgcaaaggatgccgtggcagcatcagctttcaacggcaagtttttcccatcccgcggcagacagtcaaaacaacggcgggtcgacaagtcaatgtttttgacacgacgaacaccataaaactttaaaacgtgtttgagagttgacgaaagaaaaaaaaaacatacccagaaaataacacaactattagctatgattaattaaatattacaacaattcttttaaatttaaaatttaaaaatacaactttttaaaatttcttttgtaaaagaaaatatcgtttagtattttggtaagcgtgaggttgaaaaaagtaatttttttctctgtgttgttgctgaacgcaacctaagatagcattaaagaagtactcatgggacaaaactttaacgaagtaaaactgaataaaaggatgcaaagtgcaaaaactaaaaagagtatcagtgactaggatctaatttttcaagctgttttcttgaatttagatatatatataaaaaataacttatctttaattaagaactcaccaggcatgtactagttggttgtcctcatgcttaattaatttggttaatctcatctttaatttggccaaaaacttgcttgctactccatatcgttatcaaccataacgaatgagattaagcaaagcacgagggtcgttgttgaagctgagtacatatttgaccaaattttttaatgtttagtggcacgtacatatatacctacagatacatctctttggcatgcgcacagtgttgtttatagagagagagatgcgttctagcgggatcagcgtaattgttgtcgttcgccacctggcgtggctggtgctaattttgtgctcatggccgcgggttgcagctgctcaggctcaacaagcaccaaaaactgatccagtcgaaggtttgtattgagttgttttgtttttccccatataaatcgcaggagtatagtacacttcggttgatatatggtgtcctctcttgccgcattgacacgagaagagttggaggaaatttgattcattaatcgcctagttttttcatctacatgattagtacttcatgacgagttaaccacacagcggccgccctgaacacgatcctagggagatggggcaagaaggcatcgtgggagtggaacattagcggcgagctctgcagcggtttcgcctctactgaaatcgactgggattactaccccaccatcaacccgttcatcaaatgcgattgcagtttcagcaacaacaccctctgccatattaccaaactgtacgtttgttttcatcagttgtgcaacatgtatctcgatgcggtgcctgaaaaatataagcaaaggaacatgtcagattatcgatacgtctgttttcaccagttgtgcaacatgtatctcgatgcatgcagtgcctgaaaatataagcaaaggaacatgtcagattattgattactagtatttccaattcatagagccatcacatcggtttatcctaaattgggtcctccggctccagtgacctttctttaatttgcatcttatttaggcaaaaccaaatatatcccaattagcacaattctcatatataggtattgcatgtctattatgcagaagggtatataaattgggagtagttggtcaaatacctgcagagctacagaatctcacccacctagagtatttgtatggtatctaagtcttttctccttaatcttgataactaattgttacactacagattaaggttttgccgtaaatataaattatattccatgttctttttgtgaaaacagacagcttatgctttttttctgctaattgacctagtgtttctttatgttgtcttcaggaactttaattataattacttgactggtgccattccatcattcattggaaaattcagttcaatgaaatatttgtaggagttacacatcacattctagatttatgtactatatccctttcatattataagtcgttttcagttttccaaatcaaatttctttagctttaatcaagtttgtaaaaaaatgtagcaatatttttctacataaaacaaagaaactattaaaatgttttcaatgttagatttaataaaactaatttggtgctagaaatattgctatattgttttataaacttgatcaaactttaaagaaatttgattttaaaaaagtcaaaacgacttttaatacgaaatggagagagtaccattcaatggttaatgttttttcttaattctgtttcatcatttgaagggcattagcttcaaattcactgtccggacaacttccaaaggaacttgggaacctcaccaatcttctctcgttgtaagataatctttcccatggcaaataaatcatcaactatttacttggactgcctcaaccaatataatacaacaaatattaatcgcataacttctcaacaataataaattaagtaataaaaaaccataattgcaaaaatatcataaactactaaacaacatgtaacagacaagtcagtgcaattccttttccatgtgttgcatcgtttgatcaggaaaacacgatgccccctttcttctattatatagttgaactaaaaaaatttaaatcactgctgaaatatttcattttcaattaggggcattaacttaaataattttaccggtgtacttcctgaagagctgggcaacatgaccaaacttcagcaattgtaagatgcttcgttagttcctaacatccaatttctacttctaaaagaattaaaatttgaaaagagcagatctgttgttgaccatgatagttacttcaatgttccaaaagcaggtatgttgctagttctggattcagcggtcggtttccttcgacgttttcaaagcttcgcaacctgaagttattgtacagtcaataacagagactcacctagtatgtttatggtgttttcttgctgaatgtcaaatatttttgtgtgcttgtaggagagcatcagacaatggattcatagggaagatacctcattattttggcagcatgactaatttagaagatatgtaagattaattatgtatattaacttgttaacatatcattcgctctatcctaatcagagacaaatgaaattttgcaacataaattttctgcatatatgattttcccattcgaatttgagcaatataatagcaaacatttccactcaacaaaattgcacacatctctatcacactaaatttatccagggggcatgttactacatcgagattttatgaaataaaaaaggaaaaaaaaactgttgatacacatacagcttactttaaccttactttaaataaatggtggcatgtattctttctaaagtatgagctttagtggtttcgaaggaaactcatttgaaggaccaattccagaaaatctgtctaatctgaccagattagaaaacttgtaagtatacttttttgtggtattgatctctcttgaagattgacaatgccaacgctgatgagttatttctgaaaaatacatgtgagcagacggattggagatatagtaagtggggcctcttcattggcatttatcagtaatctgacatctctgtaccaactgtatgtgatgtttttgcttcaaattaagtttacagtgtataggcaaatttgcaagttacaaaagttggatttcgttcttacacaggatattaagaaactgtaagatatcgggtgatctcagagcattagatttttccaagtttcgaacactaatatcgctgtaagtctcccaaccaccggctatggtgtcacatttcctcatgtagtgaaccatatgtactccaagtaatttatactatactgttgtggcacagggacctaagttttaacaatatcacagcccaacttccttaatccatcctacatttgtcgtgaattcctgtaagaaattctttcttgatattaattgagttttttcaagcaccttttaagcagatgagcatgttagatctcacatcttcaattgtgctcaatttaggtttattgggacaatttatgtaaggatgcatgatagtaaaagctcttcacatagagcaatgtatgtcaaaaataataatcagcggagcagtatagcacaaatattttgataatagaatgatgtatcagtatctatatatgatacagttctgcaatgcttaggagattatttttgtacaattctgcagtactggaatcttcccttcctcggctacctagaataatttgcagttctaagtataaaattaccatatttgtgtttgagaggaaaatttagatcattgaatatttattttgtgaaatgattttggtaacaaacagcttttacttgttagtattacacccaagttggtatccacgtacctagaatactaccgtgccaattatgatagtctgcgaagtctgaaatttattaaaattttcgataaaattcactcgcagctctctggtttgacttgtgagcattggtgacatcatcttttggtgagttacgatttgagcgggatgttgatgaccacactataactatacgggacgcagttgtgttgtgccttagcgatcgatatacctctttataggttgttgttcttatcggtgcagatcaaccttatacctgcaagcaaatcaaaaaataagctaaaaaaagataaaaacaatctaaattgcaaatactaattaagctcgcgataaatttaacacccaataaggtggggtgccgaagatgagtgattaagcggtcagccaacatgcacaattacgaggtaaagtagaaataataaacttcaatctatcaaaacccaaaaaaaaaagtaaaattcacaaaactacacgttttgtggtccaagttgtagaaaaccacacacactttgacacttggcacttaagta

SEQ ID NO: 21222 - DNA, 3028 bp, Oryza sativa
acccctcgacgacaccagacgatcccaaggcgatttcctctccgaccaaacttccgacctgcgatgatgtcaacttccgccatcccgtctgccgcgccatcgaccgaatacgcagaggtaagtacccatcggctagattctctcctttatgcagtagattggttcttctttgtcttatcttgttttcttcttctcttttcttgtttgcatctgtagcacttgtccaacctggtcgcaattcccagtttgtcacatgaacatcactactttctcggtccaatcggcaatcccgatcccactaagtttattattgctggaaccaataggatcccttttagattggccaacccaatcctaagtcactggaagaataccttcaagtcttggccttctcttgagaaaacttcccctgagaaaagctggtctgtgtggtataagcgtgtattagccagcaagcaagttcattgggacgaactaggaatcggccatgcccttgctcttacattagcaaattcggctaaggacaaacccttgatggcctctccagcctattgttggtccaacgcccttaatgctttcttggttaatcaagggccgatgactcccactctgcttgacatcaccatgattactggtctagatgtgaccttatcggctaaccccatgagtttgaataccaagaatcaatttgattttaggaccaacagcataggtggttggtctggctatgtagccgcatatatgggcaaaggatctgccaccccccgagagcacactgcctttctcttcatgtggcttgaaaagtttctgttctgtggatcaagctgcggtcctaccaccaactggcagttcttagccgaagcccttgaaagcaagagacaattccctctaggcaaaatccttctcggctatctgtaccaaatgttgagtaatgcatcggctaagatagccacaggctcagtagtgggtgcgggtggaccatggtgattgctacaaacatggcttaatcttgtcgttatgaaggttgtgaatcggccgcctctgatagatgctgaattcccaaggctggagcccaccaccaatgatgacagggaagaagttacccatcgccgatgcctgtcgtatggtgaagctacatcaacaccagccgattctggagcaaagctatcggctcaactgctcaaggactggttctgcagtttctatgaaggcttccaaagagatgctcgagtctggtttccatatgaggactcagtaaactttgatctcccatcggacttcagatttgaagacatcaactctgaaaattccaaaaatccagagaagtcttctcggctgccattagtccatgcatccttcctgttggcattcaccaagggagaaacatacaagtatcttaggagttataccatccaatgagctcggccagacaatttggaatgggatagttgccgatcggcttgttctttgccgataagatccagtgcagaggagaaatctgatcaacattgatgatggatcggctgctcaatatcctaggaccccctttgggtagtattgataacatagagctggcaaggttcaggagcaggaactttgaaagatggtggggtgaatggaagcaacatatattccatcagctagcctctatgtatatgacagatctattcccagatattgttcctcaggtatatcgttactctgtcaattctgttgtaataaaagttagccgatttgtacctttaactaatctcttcgtttattttgcagacaatagaatcttctcctcctcgcaaaagcaacagtggcagagatatagaatatgtcctaggccttctaccaaatggaggtggactagctcctcctgtcattggctatcatgcccccaggaccacaagtctgcttcaagagcaaatgagagaaccacccgatattcgtaagaagagaaaaaccaaggcatcggctattgatccatcggctctggctcccaagaagaagaccaagaagaataaacccaagccagccgatgacctgcctactttagatccatctattgagcaagcctgggatgaagaagagatcgaagaagatgtttgtcacaccctgaagttctcctcccaagccaaaaatttaatttataaatgaccctaagaaaatgccggcgcaaatcaagagaaaaccctaagaaagtaatacaaataataatcgaatctgacatgtggaatttttcttgagttctacatgtcgaaattcactaacaggatttttagtggaattttcagagccctagaaataattttgaccaattaaaattgagcataagcaatatttaaatccctggaaattcctttcttcctttttctttttccttttcccttagtgggccgccggcccacttcccctcctctctccccgcgccttgctgggccggccggaggccacgccccagctcaacccgcgccccctcctctcgcccggggtcaccgacaggtggggcccacctgtcggacccgtctcccacctcgccgccgcgcccgcaaccgccgccgcgcgcacgcctccgcctcctccgggccacgtcggccacgcccgcgcgtgcgccgcgtctcccgcgcccactcccctctccctcccgcccgcgcccgcgcccgagatggccgggattcgaaaatcgaatcccgcctctctctcctcccccactcccccacgttggccggcgattcccgcctctcccggccatgtccggccccctctccccctatttaaactccgccgccaccccctctctctttttccccatttcgccaaactctcccgagctctccatcactcccgcaacgtgcatccacccgccgccgcctttcccgtcactccggccgccgctagccgccgctagactcgccgccgcaccgcgccgtcgccgccgtcgggttcgcgtggccgagatccaccccgtccacccctccttcgtcgaggttcgccgccggagcgccattcccactgtgcgacggtgagagtcgccatgtcc

SEQ ID NO: 21223 - DNA, 8555 bp, Oryza sativa
tttaatgcatattctgcttggaattctattcggtaatttctgggagtgacaggaacggccgggggtggcccgatttcgccggccgacgtggggaggtggaggtggagagagaggtgggattcgaatttcgaatcccggccatctcgggcgcgggcgcgggcgagagggagggggagtgggtgcgggaggcgcggcgcatgcgcggggcgtggccgacgtggcccggaggaggcgggaatcgtgggcgcggcggcggtagcgggcgcggcggcgccggctggaggaaggagacgggcccgacaggtgggccccacctgtcaacgaccctaggggagaggaggcgggcggccggctcggctcagctgggcctcggccttcggccggcccagcgggaaagggggggaaaggctagtgactgcacctgtgttagtcttgcctgatcctaggaaaggttttcaagtgtactgtgatgcatcccgacatggtttgggttgcgttttaatgcaagatgggaaggtggttgcctatgcatctaggcagttacgccctcatgagaataactacccaacgcatgacctagagttggcagcggtagtgcttgcattgaagatttggcgtcattatctttttggtaaccgtacggagatgtatacggatcataagagtttgaagtacattttcactcaacctgatttgaacatgcgacagtgaagatggttagagttgatcaaggattatgatatggaaattcattatcacctaggtaatgtgttaccacgatcggaagaatgtgagcagagttttcaagagttgaagaatcgcttgatatcagctcctattttgattttacctgatccaaagaagggtttccaagtgtattgcgatgcatccaaacttgggttaggttgtgttctgatgcaagatgggaaggtggttgcctatgcatctcgtcagttacgtccgcatgagaagaactaccctactcatgatcttgagttagctgcagtagttcatgcgttgaaaatttggcgtcattatcttttcggtactcgtactgaggtgtacaccgatcacaagagtttaaagtatatctttactcagccagacctgaacatgagacaaaggagatggttggaattaattaaggattatgacatgggaattcattatcacccaggaaaggctaatgttgtagcagacgctcttagcaggaaaggctattgcaatgctacagaaggacgacagttgccattggaattatgcaaggaatttgaaagattaaatttgggaattgtcagtagagattttattgcagccttagaagcgaagcccactctaattgatcaagttagagaagcgcaaattaatgatcctgatattcaagagatcaagaagaatatgagaagaggaaaagctatcggtttcttggaggatgagcacggaactgtatggttgggtgagagaatctgcgttcctgacaacaaagatttaaaagatgcaattctgaaagaagctcacgatactttatactctattcaccctggtagtatcaaaatgtaccaggatctcaaggaaagattttggtgggcaagtatgaagcgcgaaatcgcagagtacgtagcagtatgtgatgtttgtcagcgagtcaaggcagaacatcagaaacctgccagtttgctgcagcctttgaagattcctgaatggaagcgggaagaaatcggtatggattttatcactggtttacctagaacgtcatcgggtcatgactctatttgggtgatagtcgacagacttaccaaagtggctcatttcattccggtaaagacaacctattccgggagtcggttagcagaattgtatatggcaagaattgtgtgtttgcatggcattcctaaaaagatagtgtctgatcgaggcagtcagtttacttcaaatttttggaagaaacttcaggaagagatgggttctaagctgaactttagtactgcttatcatccgcagacagacggacaaaccgaaagggtgaatcagattttggaagacatgttgagagcttgtgctttagacttcggtggaagttgggataagaatctaccttatgctgaattttcgtacaacaacagttatcaagctagccttcagatggctccttacgaagcactgtatggtcggaagtgccgcactccgcttttgtgggatcaaacgggagaacgtcaggttttcgggacggatatcctaagggaagcagaagaaaaggtgaaaatcattcaagaaagattgcgagtggctcagtctcgtcataagagttatgccgacaatcgccgcagagatttgagttttgaagaaggagattatgtgtatcttcgtgtcacgcctcttcgaggggttcatcgttttcacaccaaaggaaaattggcaccgcgttttgtgggaccttataagattgtcagtagaagaggagaggttgcttatcagttggagttacctcaatctttggcaggagtccataatgtgttccatgtttcgcaattgaaaaagtgtttaagggtacctaccgaagaagctaatcttgaacagatagaagtccaagaggatctgacctatattgagaaaccaatccgtattttggaaatagatgagagaagaaccagaaatcgagttatccgtttttgcaaagtccaatggagtaatcactcggaagaagaatcaacttgggaaagagaagatgaattgaagtcagctcatccatatctgttcgccagttcttccgaatctcgaggacgagattctgtttaaggggggtaggtttgtcacacccttgaaaatcataaatatataaattgttgttaaattggaattttttagaaataattttaaaagtttttttttataagatctaattttaaaaattccaatataaaatggggccagataaaatttcattaaatactttgcttaattctataattcctagatttttctgggatttatttgagctaaggaagtatttttaataaatggaattgcatttaagaaataatttaaattgaaaaaggttttaaaaagtcttcttttggctttgggccgaaagtcggcccaaaacctcctctctctctcctcggcccagccggcccagtccgcagccgcagccgcccgcgcgcgagtgcgctgtcgctgacaggtgggtcccacctgtcggagtcgtcgtcttcgtcgcgccgccgccgcccgaaaccctagtttcgcgccgccgccgttcctttccaaatccggtcgatcctttccgtttccggccgaattgatagaggggaaatgatcatcgggatctcctctaccttttctcttttggaaacatcggctaattcgttttggaagttcgtggaatcgagttcgattcggatcggcctctttcctccgaaccccgaagtttccttctcgtcgccggccgccgtgggctttcgtcgccgcctccgagcccctttaaaaggacccccggtgtctcctctacccgccgccaccctcgccttcgcctctcgtcgccggaagagctctagcgccgtgtgccctagcgccgccgtcgccgccgtcgctccagccgtgcgccaccgccgttccagacgtcgtcatcgctcgggaagaccgccgtcgtggtcgccaagtcaccgccgtcctcgtccgccccttcgccgtcgccgaagatcgccggagcaccatcgccgccgtcgacccgaagaccgccgccgtttcttcgtcgtcgccgtcgtcgtccgttggtcttccgccgctcctttggtcaccggtgagttcgccgcgtcgcgctctacccgttggtgtcctccgttcgtgccgaagcgtcgccgttcgccggcgggcttgcgcgtccgagccgccgagccgccgccgccggtggtgacgtcatcgctgacgtcatcgtccccgtctcccgtgagccggtcgtggaccgatcgatctcggccgtccgttttggatggatcgatctcggccgtccgttcgcgtgaaccgccgccgtgcgcccggtccaccgaaaccctagcccgctgacgcaataaatccctttttccttttcaaaaataattcattattgcgtcataattcaattaaaatcaatttaagtgttttaatccgatttaatcttcaaaaattcataactaattcatcttagctccgatttagttggttcaagtctctaaatttttctaaaattgagatctacatgttaaaaatatccacatgtactgttcatgcttgtttatgtgctgttttggtgattttgctcttttctgcttagattccgtcgtttccggagagtccgttttcgccggagaagagtttgaagagttccaaggccagtaaggcaagtcacacagatcccaaacaaccctttgagcatgttgatcctattttaagctattgtttctattcaactattgcatttattttcgaatgtcattgggtggaattaacctattctttgttatagcccttttgttcttgaatactttattccttgataccttgggttatttataacttgactagttgggctatgtatattggttcaactagatattagatataattgcttagccctgcttagaaacattagcacattattgggataacttatgactcattacttaatgatggcttaatgatagttcacgatggtcaatcgtgattggttaattaattaatgtgccaactaaaacctgataatggtgggttgtgagcacatggttttgatggtcgtgctcatgacaattaaggaccggttcacgagtttcggttgtgaaacattaaccgtgccaaccacaagccagcgtgggcaacggctttatcttttgtatagcatggttcattgcggggcaccagactgagaagtggcggagataagcccacgggggtcgctggggagtccatgccttgtttataagggggtgattatgatccaggaaaggtgcgctgcggtggattgtgttatgtaaggggtattgtcacaactcctttccgaggtaccgtggtggtattgaggcacatggtgacatgatgtggggttgtgtcttgtgggtacagtggtacacctctgatcagagtaaaactattcgaatagccgtgcccgcggttatgggcgggtctaacaatgtctttcgtgattagtctcacccttctcaccatagtaaatgatgctataactggtaataatttgattagctcctggtttggaatggtatattcctggtttggagatagaactgtgcagccgggatggttgttcagaatggttgggcctatacaacagggtatgttgtatagcgttgatttaatattgtttaattattacttaactgttttattaaattctcaaatgtttgctaaatgctgcttttgcaaatgaaaccctattatgccatcctttgttatcctgtgcacttgcatatttgctgcgtggcttgctgagtatgtcatatactcaccttgcaatcattcatcagaggaagagttcttcagtgaagctgatggtgtggaggattaggtgtagccttggtcaagctgcctgtggtgtggagccgtctgcgccgtttatcttattttccgctgcttagatctttattgattgagttgagaggaactatctacctctgtaatgacattttattcgcttattaattagagtaataaatgtactctattatcaatttgttattgtgtgcctcggctgattcctggacgagggttcacacacatgtaagcgtttggaattttggatagaaattccgggcgtgacataggtaaagcaaatgtggtagcagattctctcagcaggaaaagctactgtaatatgtcagaaggatgacatctaccttgggagttatgctaggaattggaaaggttgaacttgggaatagtcaacaaaggttttgttgccgctttagaagctcaacctacccagtttgatcgagttagataagctcaagtgaatgatcctgatatccaagaaataaaaaagaacatgagaagaggaaaagccatcggatatgtggaagatgagcaaggaattgtgtggctaggagaaagaatttgtgtgcccgacaataaggagttgaaggatactatcatgaaagaagctcatgaaactttgtattccattcaccccgggagcactaagatgtatcaagacctgaagcaacaattctggtgggccagcatgcgacgagaaatagcagaatatgtggctctatgtgatgtatgtcagcgagtcaaggcggaacatcggaagccagccggtctgttgcaaccgttgaagattccagagtggaaatgggaagaaataggaatggactttatcaccggtctacccagaacgtcgtcgggacatgattctatttgggtagtggttgacaggctgactaaagtcgctcacttcatacctgtcaaaacaacctacacgggaaataagctcgcagagttatatatggccagagtggtatgtttacacggtgtacccaagaagatagtgtcagacagaggtagtcagtttacttcgaagttttggcagaaactacaagtggagatgggtactcgtttgaattttagtactgcttatcaccctcaaactgatggtcagacggaaagagtgaatcaaattttagaagacatgttgagagcctgtgttctagattttggtggaagttggtataagaatctgccgtacgcggaattctcttataacaacagttatcaagctagtctacaaatggttccatatgaagcattgtatggccggaagtgttgtacgccgctcctttgggatcaaactggtgagcgtcaagtgtttgggacagatatcttgcgagaagcagaagaaaaagtgaagattatccaagaaaggttgcgagttgcccagtcgcgccagaagagctatgccgacaatcgtcgtagggatttggctttcgaagaaggagattatatatacctacgagttacgccactgcgaggagttcatcgttttcaaaccaaagggaaattggcaccgcgttttgtgggaccttttaagatcgtgagtcgaagaggtgaagtagcttatcagctagagttgcctctgtcaatggcaggaatacatgacgtgttccacgtgtcgcagttaaaaaaatgtttgcgtgtacctatggaggaagcagatcctgagcgtatagagcttcaagaagatttaacttatgttgagaagccagttagaatcttggaagtgagcgagaggaacaccaggaatcgcgtcatacggttctgtaaggttcagtggagcaatcattcagaagaagaagccacttgggagcgagaagatgaattgaagtcagatcatcctcatctttttgccagttcttctaaatctcgaggacgagattctgtttaaggagggtaggtttatcatgccctaaaaatcgcctaaattaataatgcatattttaaatcatttttagaaattattttaaaagcctacaagttaatctctaaaaatctaggaaaattttcaacataaaattgagctagataaaatttcattaaatattttgcttgttcctctattttctagatttttctgggaattatttgagtaagggaagtatttttaataaatgaaacaacatttcacaaattattttaattgaaaaagtgttaaaaaccctcccccaagccgttgggccgatttatccctccctcctcgcgcgagccgcgggcccacgccgagcccagccgagccaccggcctccccctcctcacagccgccgacatgtggggcccacatgtcggggttgtcttcaacctccggccggccgagtccgcccgagccgccgccttccgattggttgaggggttttgatccccttgttgtcctctatctttacccccaaaaatcggagctaatcgcttcgtatcttacctgaatcaaactcgttttcgagtttatccccaaaacctaaacctagtttttcccggtccgattactcgcggttagagtccgatctctccaatctaaggctataaatagcaccctctagtcgccctctttcgtttgccctaactcccgagccttcttgtgccccgtagcgccgccgccacgccgtccaagccgccgccgccgccgtccgacgcccagccgcgccgcgccgtcgcgttcgccatcgccgccgttaggtgcgcacggaggtggggaacctcggccgccccctcgccgccgtcgccggtcacaggagatgtcacgaccggaaataacccaacgggcgttccttacgtgcgtgcattaatccttgtcccaggaggcaaggtacaccaacagttgatacaaatcagagtttaacaagcggaagcgtaaatagttaattattacatgggcagcgacggcccagcacactcaaagacaacgaaaaacagcggaagactagggcgacgaccacaggcgcttgacggcaggcacgagctagacaccaaaacctccatcttccaggaactcttcttctgggcttgggaaaaaattgagc

SEQ ID NO: 21224 - DNA, 8748 bp, Oryza sativa
  unsure (1)..(8748): unsure at all n locations
caaatccgcccgttgaacgcgagaaaaaaagggaaaaatgggggaaagggagagggaatcacggggagtgatttccctcctcttactgcacgcgggggcggcgggatgcggcggaatccgcggcggcggcggcgctagggcacgggcgaggcggcgggagcggcgcgaggtaggggatgacgggtgggccccacccgtcagcgagggtggcgggcgggcccgcccgtcagcggcgcgcgcgcgggggaaggccggatgggccgcgggggagaggagagagagggagagggagggggggaaaaagggactttttagggtttttctttttataaactcattttaactttgtttatttcttcttaattattatttgtgctctgaaaattccactaaaatttatttacgcattttaggcttttaggaaatatacaaaaatcctccaagccttattcgacttttaactttgcacattttaattgttggaggctttcacatggatttttacttattctatgcataatttcgaggatgtattttagagtcgttttgggacgcgacaaacctaccccccttaaacggaatctcgaccccgagattcggaagaactggcgaagagatcgggatgggccgccttcagctcgtcttcacgctcccaggtagcttcttcctcggcgtggttgctccattggaccttgcaaaaacggattacccggttcctggtcctgcgctccatggtgtccaggattttcactggcctctccacgtaggtcaagtcttcgcgaacttcaatttgcgctgagtcggcctgctcggatggcactcggagacatttcttgagttgcgacacatggaacacatcatgcacgttgcccaaggaggcgggcagctccaactggtaagcgacttctccgcgccgagcaatgatacggaaaggacccacataccgaggtgcgagcttcccttttgtctgaaacctgtgtacacctcgcaatggcgtgacccgaagatacacaaagtcacccactgcgaattccaggtcacggcgacggttatctgcataacttttctgccgggactgtgccacttttagattatcccgaatggttctgactttagcttcagcttccctcaggatatcagtcccgaacacttggctttccccaacttggtcccacaatagcggtgtccggcatttgcgcccgtacaacgcttcataaggtgccatttgtatactggcctggtagctgttattgtaggagaactcggcataggggagactcttatcccaggtcttcccaaaatctaggacacatgcgcgaagcatatcttctaggatctgatttacccagctcttcttggagcttcttccaaaagtgagaggtgaattggcttcccctatcagatacgattttcttgggaacgccatgaagactcacgatcctagcgaagtagagttcggctagtttgttccctccataggtggtcttcacaggaataaatcgagctaccttggttaatcgatccacaactacccatatagaatcatatccaccttgggtttttggaagtccggtgatgaaatccatcccaatttcatcccatttccattctggtacttggagaggttggagaagtccggccggtcgctggtgctctgccttgacacgctggcacacatcacaaagggccacgaactctgcaatttcccgcttcatactaacccaccagtatttctccttcaagtctaagtacatcttcgtactgccagggtggatggaataaggactttcgtgagcttcctgaagtatcagctgtttaagttctctgttatttggaacgcatacccgatttccattccatagggtcccgtgttcatcctctgtgaaaccagcggctttaccctgtttcatattcttgaggagtccatgcatgtccgggtcgttcttctgagcctcgcggatttgatcgagcaaggtaggtttggcttccaacgcagccaagaatccacgactaactatgccaaggttcagggcttccatctgttgattaagttcgggtggaatgccacggacgttaagagtgttgcaatggctttttcgactcagagcgtcggcgaccacgttggccttaccaggatgatagtgaattcccacatcataatccttgatgagttctaaccatctcctctgccgaagattcagatccgactgggtgaagatgtatttcaaactcttatgatcggtatatatttcacagcgattcccaataagatagtgccgccagatttttagagcatgaaccaccgcggctaactccaaatcatgggtagggtagttgccttcatgaggtcgtagctggcgtgaggcataggccaccacatgaccgtcctgcatgagcacgcaccccaatccttggcgcgaagcgtcacaatacaccatgaaatccttgcgagtatctggcaagactaacactggcgaggaaaccagcttttctttgagagtttgaaacgccttctcgcattgcgggctccacacaaatttctcttctttcttcaacaactgtgtcatgggtcgagcgattttggagaagttctcgatgaacctccggtagtatcctgccaaacctaagaaactgcggacttgagtgacggtcttgggttgcttccaatcagtgacggcggtcactgtttcggggtccacagcaactcctttagcagatatcacgtgccctaagaatttgacttcggacaaccagaactcacacttgctaagtttggcatacaattgatgttcccgcaactttcccaacaccagacggagatggtgctgatggtcttcctctgattgtgagtatatcagaatgtcgtcaatgaaaaccacaacaaacttatccaagtattccatgaacactttgttcattaagttcatgaagaaggcaggtgcattggttaaaccgaacgacatcaccgtgaattcatacagtccgtatcgcgtggtgaatgcggtcttcggaatatcttcttcgcggatgcgcaactggtgatatccggaacgaagatcaatcttggagaataccgtggcacctttaagctgatcgaacaggtcatcgatccggggaagagggtacttgtttttgatggtgacttcattgagggctctgtagtcgacgcacctcctcttcgtcttgtccttcttctccacaaaaatcacaggagcgccccagggggaagtactcggacgtatataccccttctctttcaactcttccaactgtttcttaacttcggccagttcatttgctgccatacggtagggtcgcttgtacagaggagtggttcctggagcaagatctatccggaactcaatctctcgcttgggcggcataccgggtagttcttccggaaacacatctccgaactctctgacgatggggatttctgacagtcctatctgatgaagttctgaactactgacagaggttgggggtgcaaagaaaacaaccggttgttccggtcctcggtacagagtaacagtgcgtctcgcgcaatccactactccttgaaattgagccaaccaattcattccaaggatcacatccaagttcttggtgtctagcagaatcaggtccgagggaaaaggaatcccctgaatttctatagggacggcaggactataatactttgctgtcataacccctccaggggtggtgatgagcagagggtttctaagcctttctacccccaactgatttctccccacgaatggcacagatataaacgagtgggaagctccagagtcgaacaaaatggtagcagggatggaatgaatgaggaacgtaccaacgatgacgtctggagttgtcagcacgtcctcggccgtcacgtggttcacacgaccctgaatgacatccttcccaccgttgttggagcggggaggcgcttggccttgctggcgcctcggtttcgggcatttatccgcaaagtgcccgggctcgaagcagttgaagcacagacgctgctgaccttgagcgtccctgcagccttgaccagactgcacggctggcgtaggaggacggggcgcacgagtcccttgctgactctgctgctgctgcggctgtgggacgcgcaccacgtattgaggtcgaggcacggagcgaggttgctgctgctgttgttgctgctgcgaggaggatccccctggatagggattggtgtagcggaccctttggttagcaccctgttgattgcggaaattcgccaagcggcgcttgtgcgactccagttccttgtgcttggcttccaagcggatgctcttgtccaccagacgttggaaatccggatagtccccggagactagacggacggacagctcagggtccattcctgccaagaacttctcttgcttctcctcatcttcccgcacatcctccggggcgtaacgggccaggttgttgaactcatgcaaatactccatcacggagcggttgccttgcttcaactctcagaattccctttttttaagagccacgactccggcgggcacatgggttctccggaaagcggcggtgaaacgggcccaagtaataggctgcccctctggctgcgtagcctggaaatggtcccaccatagagatgcgggcccctgcagttggtgggcggcgaagatgactttctcctcatcgctgcactgcacagtgtctagctttttccccacggcatgcaaccaatccaacgcatccacggggttgttggagctagagaaggtgggtgggcggatgcggaggaactcggcgagtttagagtgttgcgggggtggtggtggagcattctgttgtggcggattttggaggtggtggaggaaagcagtcatcatgttggcctgctgggcgaggatttgggtgagaatggcgttggtatctggtggtggtggtggaggcggaggaggaggtggaggtgggctgccatggtggttgcggttgctgccttcaggttggttgccatcaccggcattagcacttctcctggtcgtcaccatctgaaaaccccacacagaaccagcaaacagagagagctgacaattaaggctaaccatccacgactaccataattcttaaatttattactgctattaaattggttcattaaagttcaagttgcttaggcaaataaaataaagacaggctccgacacagttatgccacacaccggcctaaccatgccccacacaactccaacaagaagacaaacgaggaagaacacacgcgcaagcctactaactgctcgtctaccactgcgacgggccagggcggaaggtgagcaacagcgcatcctccgtgctaccaacgccggaggcttccccctcctggggaaccacaggcgcgggctcggcacgaggggtctccacgaagcaggtccacgccagggactgacgaacaagctcgggcctggaggtgctcttgcgggcggtgatcttctggctgcggcagacacggcgacgcttggggcggcagacctctccctgggcgatcttgagctgatgcagctgcgcctccaccgcgtctaggtccttcttgagctgcaggttctcctgacgcagctccaggatcttcaggttgttctcgaccatcccacggcgcaccatctgatggaagtcgatacgagccgcgtcgtacgcctccaccatgcgcgccaggtgcacgatggtagcgtcgtcctccgagctagcatcccggaaggtggcgtagtcgcgggctcctccgcggtgagggtggtagcggtagggcgagtgctgcaactcgtccgggtagcgctggtgaagagtgccgatggcgaggagagcggcgttctggcaagcggcggggaaagaatctccacccgcggtgactgccagcgaagtccgctcgggagagccagcgaggatcactgcagtgacctcccaagcagcgtggggctctgcatcgtcaccctcctgcttcggaagcggcctggcctggtagtccactccatgcggataccccaggaccacgcacatgccccgcagctccaagacgaagccagtcatgtccaaaccacgacgggtgacgctgccggccatctacaaacaaaaacaaaaagaaaaacaacattttaaagatcatattttggcgataaatgaagcagcaagacagagagagactagacagttttcacaaataacaaaggatttttatttcgaaaatactgctaaggcttgggatctaaggctcgtcctagggtcaagggggctctgataccaacttgtcacgaccggaaataacccaacgggcgttccttacgtgcgtgcattaatccttgtcccaggaggcaaggtacaccaacagttgatacaaatcagagtttaacaagcggaagcgtaaatagttaattattacatgggcagcgacggcccagcacactcaaagacaacgaaaaacagcggaagactagggcgacgaccacaggcgcttgacggcaggcacgagctagacaccaaaacctccatcttccaggaactcttcttctgggcttgggaaaaaattgagcaagactgagtacaaccaccgtactcaacaagacacacccacaaatgcagaataaatgcaagggagtacaaaggagttatactataaagggttagggtttgcagtaaacagcatttaaagatatttagttgctcagagctattttgtaaacacgattctagaactgtacaatattatttatcaaggccgtgaacccacacgaacctgccttaacccaaggcctacgatgattcagaccgaactggcaacccgaccctgggtcccagctcgtcccaagccaacccaggccaaccaatccacattttagctgttaagcaggttttaagaattaaaacactaacttgggtacattgctcggctcgcccataaccgagggcgcggctattcgaatagattatactctgatcagaggtgtacaactttacccacaagacacatcttcctcacgtgcaaccacgtgccacatacaaccacggtatacagacggaagacatgacatagtttccaacccatcctagccatagacaagagtaccgacccaatccctcctacggccggaacccccgggacaggtaggcaggactgagcccctagcagcaggacaccggccctgtgccatgacatctcgactaccgggccgcagctcgtgtagccttcatttgccctggagatgtccatcgacccccgacttcgtccatctccatccgtgtacttttgtttataaccagactgagccacaaactaagccttacccactagacatgtggaagtacggtagtgctttgcaacagaggcccgaagaccggtccttatatggccgaggtgctactatcaaaaccatgcaccccgagcccagcctaaaaccattttggggattttgaatagaaggagcggtgtgaagccaattccacaataatccaacaaattccatagtgtccgggtgatatgaagattcccacagtctagagttggaaaaccacctaatgttacctaattaaatagcgaagcatctacctaaaattatactagtggtactatgagtagagtgtccactagttggggttttgtttattctagggtgaacaaggtaataataacaataacaataataataaggtcataacaaaggtaaataggcgtggctaaataaaacagtgataacgcgggaatttaaataaagcgataatgcagtaatttaaatcaacataattttacaaactgggattcaatatattcaaagatgatgtgacttgccttgctcgctttcccaaacgtcggcttcaacttccacgaagagcggatcttccgaagctgcagcgtctacacgaccaacgaaaaagaaaaggcttttactctaataaactccatataacaagcagaagcaaagcacaaaaatgggttcttgacttcttaaggaaaaattagagacttgaacggtccaattccgagttcaaatggccaagttatggccatttgaagtttatatgctctttaattgaatatttgcgaatttcttcatttaaattttaatttaaaatcggatttattgcgtcagccgaggggaggggcgcgcggaccgggtccacgggagtggggcccacgcggcagcctcacggtccacggtggaacgggtgcacgcggcttacgccggccggcgccgtgggtcccacgcgtcagccgtacccgaggcgcgggcggctgacggccgggccccacatggcagccgcggggcgcgcccgaaggcggcctcgccggcacagccgacgggaggcggcgcgcccgcgcccctttggtcgccggcggcggccataggcacggcggagcggcggccgagagaggggagggaagggggaaacgaaatgggcggtccacggctcaccccgggtcgacggcgacgacgggaacggcgaccggagcggaaaaaggcggcggcgcggctcgggtcgacgaggacggcggcgttccggcggtcggcgggcgaaacggaggggtggacgaggtcggcgatgttgcggcgaacccgaagaggcgacgccgaaacgggagaaggtccggggcgacgacggcggcagaccggatctcggcggcggcggcggaaagagagggcgacngcgcaagctctattccgaccgggagagagagcggcgagcggcggaaaccgaagaaggaggcacggggatggtttatata

SEQ ID NO: 21225 - DNA, 5938 bp, Oryza sativa
  unsure (1)..(5938): unsure at all n locations
taataatttgtgttcagaaaataccactaaaatttattaacgcattttagacttataggaaatatacataaatcctccaagccaaattcgacttttaactttgcacattttaatggttggaggctttcacatggatttttacttattctatgcataatttcgaggatgtattttagagttgttttgggacgcgacaggagagccgccgccgccgtcgaccgaactgtgccgccgctcaagctcgccgccggccgccatccgtcgtcatccgtcgcgtttgttagtaccggtgagttcgcaatgttgtcctctacgcgtaggtgccctccaatagtccggccgagcctccaagcgccggcgaggtcatcgcccgtgtcaagccggcgaggattacgtcagcatgacgtcataatcttttccttttagtttttctttattagatgcaaatcaattaaacttcggaaattcataactaattcatcgtaactccgattcgagtggttcaagttgctaaatttttctaaaactgagatctacatgttaaaaatatccacatgtactgtttatgctagtttttgtactgttttgttgattttgttagtttgctttagtttccgacgttccggaggagagcgctttcgttgaagaaggttcggaagtgtttgtggaagctcaaggcaagtcacacagatcccaaacaaccctttgagcatgttgaacccgtttaaagctaatgttttatttcaacttatgcattattttcgaatgtcatcgagtggtgagcctttcctagataattaatggccgaagatgactttattttcctataggttataatttgattagcttggaccttatatattggattggttcagctaaatgctataagtatagttgcttagccatgcttagaaacattagctaattaatgggatggatcatatatactacataattatttatgcttatatttaatggtagctcacgatggttaatcatgtaaagttaattaattgataataaaaacctggttaaaggtgggttgtgagcatatgattttgatggttgtgctcatgacaattaaggaccggttcgcgagctactgttgtgaaacatttaccgtgccaatcacaagccagcgtgggcaatggctttatcttttgtatagcatgattcattatggtgtgccagactgtgaagcggcgagaagtccgtgggggtcgctggggagtccattgcctctggttttgagggggagattatgatccaggaacggtgcactgtggtgagttgtgttgtgcgaggggtaatgtcacagttcctttctgaggtaccgtggtggtgctgaggcgcatggtgacatgtgggattgtgtcttgtgggtacagtggtacacctctgatcagagtaaaactattcgaatagccgcgcccgcggttatgggcgagttgggcaatgtttttcgtgattactctcatgctactcattaatggtaattgtgctaattaatgtgactcctggtttggaatggtatattcctggtatggaggtttgatttgtacaaccggggttggttgttcagatgaggttgggcctatgcaacacgggtgttttgtatggtgtttatttaatactgcttaattattcaactgttttactattctcttaaatatttattaaatgttgtttatgcaaatgagctttattatgacatcctttgttatcctgtgcacttccatgtttgctgtgtggcttgttgagtatgtcatatgcttattcttgtaatattcattcatcagaggaggagtacttcagtgaaggtgatgatctggaggactaggcttgatccgggttaagttgcctgtggagtggagtcgccatagctattccgtagtttgctgttatttttccgctgcgtagaatgttattctttgagaggaactatccacctctgtaataaattattatttgcgaatattaaatagctgtgtgttcgtactctattatcaatttgttattgtgtgcctcggctgattcctggacgagggtttaacacacatgtaagcgtttggaattttggatagaaattccgggcgtgacaccgattgagatggattctataaatattggaaaacatcatatcttcaatcatcaactgttatcgtagcaacttctactttgacatcctttatcatcggcttgtactccgatgctccttgagccgattcattagcttcaacattttgctctcgagacacatgcgtcaaagttaccggccgaaatccatccatcaattctcggcacttctcattgtaaaccattaatgtatcattcttgcactcatattctcctgccaattgactgatcaccagcaaggaatcacccataatttcaacagcatcggcttcaacctctttaagcaattgcaatcctttgagaaccgcttcatactcagcctgattgttggtcgcatagggcttaataacgtaggcaaactcgaaacttgccccccgaggagaaattataaccaagccgataccacaaccatgagtgcatactgatccatcaaaaaacaatgtccaaggcataatttcaactgagccgattgagtcatcacgatgatccacaataaaatcggctatagcctgtcccttaatcgcctttggtgattcataccgaagatcaaattcggttaaagcaaatattcactcaaaccgaaagtcattacaacctactcaaacaagccgattgcacaaggacatctgaaagccgtcttatgaatgtcttcttctgccataaagatctgattgttacctgcattgacatccataaaacataatatcttatgccctgaagcagcatcaaccaattgattggcaaccggcattgggtactcgtcctttggggtagctttgtttagatcccgaaaatcaatgcacaccctgactttgccatttttcttgataactggaactatgttggaaacccactcagcatatcggcatggacgaataaaaccggcatcatacaaacgtttaacctcagccttgacagcttcaagcatatcggatttgcatctcctcggcggttgctagtatggtctaacccccggtttgatagggagccgatgttcaacgattgatcggctgagtcctggcatctcataatattcccaagcaaagcaatctctatattcctttaaaagctctatcaacttggttctaaattccggagataaattcttactgatgaacgtcggccttggtctgtcacctggacctatatcaatttcttccaaatcatcagccgacatgaaaccctgtccttgcttgtcatcgagattatctactgtgtccttggtatagacgtttgatgccctcaaaataataatttgggctctccatcttcaattggttgtatatcacaatcggacacttttagaaaatctccatcccaaacttttccagacaggcaatcaataccatccatctcccaaagagctaaatcggcactggcaacgtgccaaaagcgtgttgatgcaaaaacacgaggcctggaagatctacttaacttcagtgcaggtccaaaaatcttgcctttaggttcgtgagcacaccagttgatttgatcctgcaatcaacaagaaataaagacaaagaaaccacggttaaatccataaatgatagccgatcggccagcagccgatgacatatcatttatctttgagccgatgtcatatgtgaatcgatccgcaatcatgaataaataagaaagacttaaatctactcgatcggctgtagatattaacaatatataatctttatgtcgatatatacttaaatcaagtgattgggatagatcggtcgccatgccgaaacagtataaatcacttagatcgaaatatatactaacaatgagattatagatgctcatagcatagccgatcagatagatctagcatgtatcggctaatactccgataccactctatattaagcaagtaaaatatatcaaacagaagcctaatatacctaaatgcaacaagatcttaacataaagggcagatttagcatatcaatcaagcacatgaaatataaggctaaatcaggtaagatcggctgaaaccccgatgctaccctaatcggcaaccaaaagcaagctagaaattgagattctaatcacgacttataaaatcaaactcaactgatgcagctataagtataaaaagaagaacaatattgccagggattatatagaatatatgataactcaacgaattacataaacaagattagggtatcataaaaatagaagcactaatcccgagaatgcaagccgccataacatgttttacctctagttgaagatcgaaaccgatgcagctcaacccgaaagcaagaactcgtcgaaacaaaaacgaaagtaaaagggtggcgatgacccgagattgtattaaacgtgtgttgttgtattacatgagactcggggtctatttatacccgagattgcaaaatatgtctgtgtcagacacgactcttatctctaataaactctaagataccataagtctttatggcagacttttgcccaaacatatctctaaggaaattacatgaaatatcctaattaatagatacaattgccttctcaggactcaatccatgcgtggcaatcctcatgaagcacattaactcaacccgacaacgtgtaccgcgtcacattgtcgacatcggctcaatcggccaacctagtctgactcaaactctgtcgatcctgatcatagccgattcggacttttagccgattctcgctctgtttccgaaacgatgtttatcttggattccgctttgttttatctccatctccgatacttggattactaaatttggttattaataaccgtaaaaccagcggcgtccttctacgtagctattccatcacctatcaaggtacggtaacgtccacgtcgcagtatgttgctagccacccacgcgtcggtctagggcttttgtctcggggtaggggcagtgtacagtctagtggtttcgtcaccgtgcatgncaactctacccctgccgtctggntacagctatctcctgcatgcaaatatactagaaatgctagtcagctgcgggctcctcgggcctccaagacccgtaggactcccactcggatccctatccgaattaagctcatattggatctccatccaatccccttattctggcccattgagcgtgcgaccctgtaggttcacgtacactcggctgtaaccagaaaactcctttacggtccaaatgtcaacagctgccgcgaccgagaaaattgccttttcccgaatgctagtgtattaatccccgtcccaggaaaagccggggtacaccaaacaaacatgatataaaaggcacatctttattatatcgataatatttacattattacaaaggcacttcaggcctgacaatcaaaaataaacagcagcggactagcgggcctacggctccatcttcacaggcgctcaactggggtataagccaagactccacctaagacatcttctccgaagcttctcttactgaaggggggagaaagatagagcaagaataagtacaaccacagtactcagcaagccacactggcaaatgcatgattaatgcaagggggtacaaggggtaataatatcggggttaagttttgcagtaaacagcatttaaaagtcacttagttgcccaaagccattttataaagacgatcctagagctacacagtattagtaatcaaggccgtgaacccacacgaacctgccttaacccaaggcctacgatgattcagaccgaactggcaacccgaccctgggtcccagctcgtcccaagccaacccaggccaaccattccacattttagttattaagcaggttttaagaatttaaaacactaa

SEQ ID NO: 21226 - DNA, 9417 bp, Oryza sativa
ggtgaagggttatgtcacatgtttacgacgggttccaaggccatggaatgcggagtaaagatgtgtcttgtgggtaaagatgtacacctttgatcagagtaaatctattcgaattgctgagccctcggatatgggcaagcctagcaatgtacccaagttagtggtttaattcttaaaatttgcttaacaactaaaatgtggaaaggttggcctgggttggcttgggacaagctgggacccaggtcgggttgccagttcggtctgaatcatcgtaggccttgggttaaggcaggttcgtgtgggttcacggccttgattaataatattgtgtagctcttggatcgtgtttacaaaatagctttgggcaactaagtgacttttaaatgctgtttactgcaaaacctaacccctattattatccccttgtaccccccttgtattagtcatgcatctgccggtgtggcttgctgagtacggtggttgtactcattcttgctcaatctcccccccccttcagtaagagaagctttggagaagaagtcttaggtggagtcctggcttataccccagttgagcgcctgtgaagatggagccgtaggcccgctagtccgctgctgtttatttttgtttgtcaggcctgaagtgcctttgtaattatatcatgtttgtgtggtgtaccccgtcttttcctcggacggggattaatacactagcgttcgggaaaatgcaaattttctcggttgcgacactccagcaccgaaggctcgtgttaatcatgttgcagcttcagaagcccagaatgcacccgatgtggtcttgggtacgtttcctgttaactctatacccgcatctgtgctttttgattccgatgctacacattcctttttgtctaaaagttttgcaagcaatcatgggatggaagttattagtcttgggagacctttactagttaataccccaggcaaccaagtatcttcaatgcagtactgtccttccgttactatagaaatagaagaaataactttcccatcctcactcatcttgctagaatccaaagatctagatgttatcttagggatggattggttatctcgtcacagaggagttatagattgtgccaaccgtaaggtgactttaaccagtagcaatggggaaacagtgtctttcgttgcgtcatcccctaaatctcatggtttgacattaaatcaagttgctttgcaagagatcccaatagtacaagattatccagatgtgttccctgaggatttgccaggtatgccacctgagagagacagagttccggatagacctagtacctggaaccaaaccctatccataagagaccatacagaatggcagctaatgagttagtagaggtaaagagacaggtggatgatttgcttcagaaaggatacattagacccagtacttcgccgtggggagcaccagtcatctttgtggagaagaaagatcatactcagagaatgtgtgtggattatcgagcgttgaatgaggtcactatcaagaataagtatccgctacccaggattgatgacttgttgtcacgcccagaaattcccaaatagaattccaagcagaatgtgcattaaaatccccgtccaggaacggctggggtacacaaacgacaaagttgacatacagatccacatcttacaaacattataaaaagtcttacataaatgcagcggaaaacttaaaggataactggagctaagccttgacttggtctacagcgggaacaccactccacaggcatcctcgacggcatggacgaagcctactcctcggagaaaccactatctgacgcatactcgaattctggggtttgggggaaaatagagcaagactgagtactacccacagtactcagcaagtcataccggaatatgggtatgatgtagggaaatatcaagggatagctataatggttcatttgcataaagcgagcatttataaacataagttgaaagcagttaaacagttgtaataattaattaatattagctatccactgtccaacgctatcccacgttgcaacaggcccaaccatccacctaaactatccaaattcaaaagattacactagggtgagactaatcacggtgaatctggttgaccgcccataaccgcgggctcggctattcgaatagttttactctgatcagaggtgtacaactgtacccacaagacacagccccacgacacgtttccgtgcgccgacatgccaccacgacataccagaaagagtccgtgacaggacccttcgcataaccccctctagccaagcacaccacacctcaggtttcacccccatccccagcgggcaacgggcagtcccctctcgtgcctaggtgaatccggaagcgacagaggccgtcgcagggcccgccccgctccatcacgcccacccttgcctggatgcgtcgactagaggaaagctacactacaagcccagccgctgcccacgctggcttgtggtaagtacgataagttcttccagggcatcccgtgaaccggtccttaactgccatgggtgcgaccagcaaaaccatgcacccacagcccaccatgtgatttattttaattagccaacaccaaagcggtggaacgaaaccaacaaaaccattagaaccaacagtctaaacattaattggattttccccgctgtgcactagttgaactaagcatggctaagcaacccctagtccaatctctagtcatgttataaccccaagctgacaaagggacatggtataacaatagcatggctatgacaataggtaaacaccccatagtaacattataaatcaatgcgatatttgaagaaaaacaatagagcatttgcaatataggatcaacatgttcaagtgacaagcatgacttgccttgctctgctgctggaggaacctcggcgactatttcgaagtacaccggagcgtcggaagaaccggaatctagcgacatacaaggctaacattgcaaacaggctataagactactgaaacagggaacaaaaccatttttaatggattctacacatttttcttgattcactgagacttgaaagggcttaaacggagcacggatgaattagttatgaattttagaagattcgctgtgtttattactataacaaaaagtccttaaatcatttattgcgcaataaaccccagggctgtcgtcatcaagggggggcgggcgcggcgctggcaagcggggcccacacggcagcggcgcacgggtggtcggtctaccgtggaccgggaccacgcgggtggtccaccgccggtccacgggatcgacggcccggatcggcccggggccgattggacggtgcggcggcggcctggctcggctcggctcggcacaaagccggccggccggccatggcaagggtggcggcacgcgcacgtccaccggcgacggcaagcggcggcgcgggcggcggcagaggacggcgccctggcggcgacggcgaccgaaggcgacggcgagcgcgggtggcggcggcgcacggggaatcggggaaggaaaggaaaggggacggagtcctcaccggaggggacggcgacgaccggcgacgaggagcgacggaggaaggtcgacacgcggcggacggggaccgggacgacctaaggaacgaaaaggaaaagattagagagggagagaggggccatagaaggcgggaacgccggccgaaggcggcggacatggcgactctcaccgtcgcacagtgggaatggggctccggcggctaacctcgacgaaggaggggtggacgaggtggacctcggccacgcaaacccaacggcggtgacggcgcggtgcggcggcgaccctagcggcggctagaggcggccggagtagcgggagaggtggcggcgggtgggtgcacggtgcgggagcgatggagagctcgggagagaccggcggaaaaaggaaaagtgaagaggaggatgcggggatggattttataggggcggagaggtcgggaactgtcacaccctgaagttctcctcctaagcataaaattgaatttataaatcaccctaagaaaataccggtgcaaatcaagagaaaaccttaataaattaatgcaaataataatcggaattggcatgtggaatttttcttgagttctacatgtcgaaataccctaacaagatttttagtggaattttcagagctctcgaaataattttaaccaattaaaattgagcacatgcaattttaaatcccagggaaaatcttttcctccttttctttttcttttccctccttttcctcttcttgggccgtcggcccagtccaccccgccgccgcgcgcgccctcctccttgtgggccggcccaagccgcccctccctctctccccgggacaccgacaggtgggccccacctgtcggggtcgtccccttcctccggccgcccgccccacgtcgccgacaccgccgaaaccgccgccgcgccaacgtccccgcctcctccgggccacgtcggccacgcccgcgcatgcgccgcgcctcccgcacccactcctcctctctcccgctcgcgcccgcgcccgagatggccaggattcgaattccgaatcctgcctctctctccacctccacctccccgcgttggccggcggaatcccgcccctacccgccacgtccgggattcccctcccctatttaagctccaccgccactccctctctctttttccccatctcgccgaactccctcgtgccccccatcgctcctgcgccgtgcttccatccgccgccgccgctcccgctactccggccgccgctagccgccgctagccgccgataggctcgccgccacaccgcgccgtcgccaccgttgggttcgcgtggccaaggtccaccccgtccgcccctcctccatcgaggtccgtcgctgaagcccacatcccctcgcactccggtgagcaccacctctaccgccgccttcggccatggtttccgttcgccgtggtccacccctctccctctaatctctctctttgcctctcttagggcatctcggagctcgtgcgcccaccgccgttgtcctcccgtggctcgccgtcgccgttcgccgtcatcctcctccacgccggccactctcggtgaggcattccccctcctctattcccctccctctccctcctagccgcgccgggtcgagcccccgccccggtcgtgcgccgccgcctctgcgccgccgcctttgcgccgtcggttgccgtggatcccgtggaccggtgttggaccatccgcgtggtcccggtccacggtagaccgaccacccgtgcgtcgctgacatgcgggccccgcctgtcggcgccacccccccccttttgatgacgtcagccccgggacatattgcgcaataaatgatttaaggactttttgttatagtaataaacacagtgaatcttctaaaattcataactaattcatttgtgctccgtttaagcccattcaagtctcagtaaatcaagaaaaatgtgtagaatccattaaaaatggttttgttctctgtttcagtagtcttatagcctgtttgcattgtttgctttgtatgtcgcttagattccggttcttccgacgctctagtgtacttcgagatagtcgccgaggttcctccagctgcagagcaaggcaagtcatgcctgtcacttgaacatgttgatcctatattgcaaatgctctattgtttttcttcaaatactgcattgttttataatgttactttgggatgtttacctattgttacagccatgctattttgataccatgctcctttgttagcttgggttataacatgaatagactttggactaggaattgcttagccatgcttagttcaactagcacacattggggaaaaatcctattaatgtttagactataggttctaatggcaatgttggattagtgacaccgcttcggtgttggttaattaaaataaatcacatggtgggctgtgggtgcatggttttgttggtcgcacccatggcagttaaggaccggttcgcgggatgccctagaagatcttatcgtacttaccacaagccagcgtgggaaacggctgggcttgtactgtagcttttctctagccgacgcatccaggcaagggtgggcgtgatggagtttggatgggccctgcgacggcctatgcggcttccggattcacctaggcacgagaggggactgcccgctgccttgcgaggagtgggagtgaaacctaaggtgtggtgtgcttggttagagggggttatgcgaagggtcctgtcacggcctctttccggtatgtcgtggtggcatgtcagcacacggaaacgtgtcgtggggctgtgtcttgtgggtacagttgtacacctctaatcagagtaaaactattcgaatagccgtgcccgcggttatgggcggtcaaccagattcaccgtgattagtctcaccctagtttagtctaatgaaattagatagtataggtggatggttgggcctgtcgcaacgtggtatagcgttggacagtggatgaataatatgattaattattacaactgtttaaatctttcaacttctgtttataaatgctcgctttatgcaaatgaaccactctagctctcctttgataattccctgcatcatacccctattccggtatgacttgctgagtacagtgggtagtactcagtcttgctctatttttcccaaccccagagtatgagtatgtgtcaaatggaggtttctccgaggagtaggcttcgtccgtgccgtcgaggatgcctgtggagtggtgttcccgctgcagttctagtcaaggcttagctcctgttgtctttcgtttttccgctgcatttttgtaagacttttatgatgtttgtaagacgtggatctgaatgtcaacattgtcgtttgtgtaccccggccggtcctggacggggattttaatgcacattctgcttggaattatattcgggaatttctgggcgtgacaatgttgatcaggcggtatccgaattgagtgatgccggagaaaaaacaccattggctttacccaagcaaactcctccaactcttgctgcccctgctcacttttcaagggtaaaccactcaccttgattccctcttacaatcatttattcatagccgatcacttataaatcttgcatttgcagaaaaagaagactgctgtgaagaagaaatcggcagcagcaccatccaagccagctccaccagtaatattttcttcatgaaattttcaagtctaatcataacccatgtggactaacacttgtcttttcagcctcctcctcctccttcacctcctatacagcaaatgtcaagtgaccgaactccatcggctataggaagtcataatattgaggaagaggaacaatcagccgctcctgccatcccagtaagtctttcattgtcttaacatcttatatcggctgaatctgtttgatcttcaactgtcttcaaatctctcctttgcatgtattaaccgatctattctcctttgacatcaaggattactttgatgaagaagcagaagaagaaaccacaagtaaggctctagcccctctcgatgaaactgtcaagaaaacacttgaagatatatcccttcggctagagtcatcattagataacctggtggccgactgtagttcgatccgggcacgatttatagaaatccaaccctaatcccacattatctagtgaacaccatcactccagcgatgtacgttgagcaacatcaattcaagctggaaaggcctaagcaacggatagccgatcggcgggagcggaaggacattgaagcaactatccaagccaatcggcagcttgtgcaagaagagtgtcacgtcctgataaattcatcccgaaataaaaatcattctctaaaaggaacaatagaattaattaaaattcgaaaagaaattgtcaaaccttaaaatgcgtacaagaaaaatttgaatgtggcccggagaattttcgttaaattctccttggtctaaaatgagccctcaaattttagttgaattttcagaacaccggaaataattattaagcaacaacaacaattatcaaagtttactaaaaagaaaaactaaaaataatccttcttcctcctttgggccaagtctggcccaaagtctccctctctccctcggcacgctgtcgaagtctctcttccctccctctcgttttcctttcccatctcactctcgggccgcccctccctcctctcctccccggcccactccctcctatcctcctcccgcctgggcctgccctggcccaacccgagccgcagccctcccgcgcacgcgcgccgcacgcgcgctgatcgcgtggaccggtgggtgccacccacccggtcgtcgtcctcctcccgcccgactcctccctctcccatgaaaccctatgcgtttcgtccttcaaatctgcgcgaatcaattcccttctttccaaattgattagggggaatgacccctttccttcctcttcaattccccctaatttcccccttgaatggcgccattagtcacccggaacggccgcgtgtcgcgaccgagaaaattgccttttcccgaacgctagtgtattaatccccgtcccaggaaaagccggggtacaccacacaaacatgatataaaagacacatctttattatatcgataatatttacattattacaaaggcgcttcaggcctgacaataaaaataaacagcagcggactagcgggcctacggctccatcttcacaggcgctcaactggggtataagccaggactccacctaagacttcttctccaaagcttctcttactgaagggggaaaagattgagcaagaatgagtacaaccacagtactcagcaagtcacaccggagatgcataattaatgcaagggggtacaaggggataataatatcggggttaagttttgcagtaaacagcatttaaaagtcacttagttgcccaaagccattttataaagacgatcctagagctacacagtattattaatcaaggccgtgaacccacacgaacctgccttaacccaaggcctacgatgattcagaccgaactggcaacccgaccctgggtcccaggtcgtcccaagccaacccaggccaaccattccacattttagttattaagcaggttttaagaatttaaaacactaacttgggtacattgctaggcttgcccataaccgagggcgcggctattcgaataggttttactctgatcagaggtgtacatctttacccacaagacacatcttcctcacgtgcaaccacgtgccacataccaccacggtatacagaccgaagacgtgacatagtttccaacccatcctaaccatagacaagaataccgaccc

SEQ ID NO: 21227 - DNA, 1081 bp, Oryza sativa
cccgctgcgaatgccgacgacggaggcggcgccgcgagacgacgagccggcgaggatgaacggtgaagacgacgacggacaccggcggtgttcggccgaaggggaagcgatgccaaggacgacgtcgcggctgcgatgccgaaggtggtggaggtgcggccgaccggtgcacgggcgaggagggacgggcggccgaacaactccggtgaggcggatcgaggggttggtggcgacacggcggtgttccggcgaaaccgagttgtggccggggaaggagacgatgccacggcgtcgacgaaggagacggcgacgtcggccgacgctccgacgagggacagcagccggctggagggagtacagtggcaccaatgccactggttgccggcggggacgcgtctccggtggtctccgcgtgaaacggaggcgacgccggtggaggggaagcagctgcgacgctgctggcggcgacggcgcgaccggatgacgctccggcgaggagggagaagcggctggaggcagccggcgcgaaggaaagagaagggcgacggcgggaacgtagctccgggggtctccgcgggaaacggagggcaagccggcgaagaggaggcggctgcgatgctggaggaggcgacggcacggccggccggcgtgctaacgcggcggcaggggcggctgaagacggccggcggcacgggagagaggggacgacggcggggaggtggctagggaccacgggagagctcgggaggagactaaaacggtagaacgcaaagagggggttctattttataggatgggggagggagccgggcatgggagagggcggaacggcgacgagaagcacggccggcggccatggttggtggccgggaaaagcgcggccgttcctgacaattgggggcgccattcaagggggaaattggggggaattgaagaggaatcaatggggattaaaaccccctaatcaattttggaattggccaattgaatcaagcggatttggaggagggagcgagctagggttcgcacgggagagagagaaaccgggcgggaggaaggagacgaccggggggctgcagga

SEQ ID NO: 21228 - DNA, 629 bp, Oryza sativa
tctgagcagggggttgtcctgtcatcaaaggaaacaaatggtcatcaaccaagtggatgcatgtccgtgagtacaaagcttgagctttctgaagtcgtgattaccaaaggtatctagtgttcctatggatctgtactgagtaagatgtaaagctggcgatattactgcatattgctttcttaactagttttggtcctcttcaaagtgacttccactcattcaccctagcaccagaaacccaggaagcaatatggctttgaggttatctagcacctttagctttgcattcttctcttttcgtgattactcctaggataggagtcatgcattcagatagtgttctatgtaaattttcagctgaggatggttaacgtttgcttgtagtagcttgatatctgccactttgtgagatctttactatctgaagaaataatttgctcaaaacttgttttataaactgatgtgctgtatctttctttggcagatggaccctatataaagcattgactggggcactttccaggatggcagttatgtaggctttagagatccacaccggtggtattctttgctctctgagaatatatagtagaggcactaagcaagggggtttacttgtccataccgtg

SEQ ID NO: 21229 - DNA, 676 bp, Oryza sativa
aaaaattgccaacgccaatcgcggagtttcacatggaggagggaagaatggaatgagcgccaggcgtcgcgtcggcgcgcgcgtgagtgcgtgatttgtgttggttgtcttcctcttggcttcgcttcgctgctttgccgcgccttcgccgagggaggccgaccaacgcatcaatcaaacacacaagcacaccacgcggacgcagcagcaggggaggagacaatttcctattcttcctcgccccgcgtcgcctcgcctgagtctgactctccaaacgccgaccagtgacgccgcgagccttgccccttgcccgcgcagatctcaccaaaccctaccagatctgcgccccgccatggactccgccgccggcggtggcggcctcacggccatccgcctgccctaccgccacctccgcgacgccgagatggagctcgtcagcctcaacggcggcaccccccgcggaggctcccccaaggaccccgacgccacgcaccagcaggggccccccgccgcccgtaccaccaccaccaggaagctcgtcctcgcctgcatggtcgccgccggcgtgcagttcggctgggcgcttcagctctcgctcctcacgccctacatccaggtatacccactaccctttgctctcccttctgcttcagaatggagagtgggctgcaggaat

SEQ ID NO: 21230 - DNA, 3876 bp, Oryza sativa
ttgatgacaattagttgctctattcctcttcctattcgattggtaacttacatcaattactcttaattgattgttggttgatggttgtgtagtagaggatggttcatggctagttgatgacaattagttgctccattcctcttcctattccatgactcttactcttcatcttccattcctcttataaaatgggaatggatttgatctcccgcgagaagaagaagacacactttcatccattttcaaaagctgttgctgctacggtaatcccatcccgaccagtgtgtgcacacgcgttgggagagtaggcctccgaaaccacgcgttgctgcgacgtttgcacagacgggcgggcgatcaggtttttggggagcgcaaggcgcgactactcactgttcgtcaacatctacttcatcttcaccaacatgtcgaacactggagacaaggagaaggagactcccgtcaacaccaacggaggcaatactgcctcaaactccagcggaggaccattcttggggtataaccttattatattatttcaattagaagttttactgttaatgttcatcgcaatgtcaacattgtgtcattatgtgattgttgatgcttattcaacgttaagcatgctcatgttgattacattcaccactatcactggatcaaatcctattgtaaatatcatgtttattatcttgttattttggaataaaatatgccgaattatgaccaaatttccaacactagttacattatttttctcaaaaacactccgtttcatgttcttttcttattaatgttgattagagggaaacaagactttatcattttttcacttgcgcttttagtgctagatgttgacagtatttgggaattcattggaaccaaaacctgaaatttttttcagatggttgtcctggcaaggctcaggtttagtcaaagaggttttcttgagattttctttatggcgtcatggcacatttagaagcatagcaatggacttatctttcaaaatattaaccttcatttcaatcctggaaatccctttttgtgaaataaactcttctgcatctgtgcacagaatgaaggattccctgaaacaatatgtttctaattggttgcacactttatagctttgttgccttttcttctcttttgtgtattatctgtaactttgtaaatattttatttttctataaaatttaaactgctaggcaaagccttgacagtattcccagtcaaaaagacttagtttttaactcgattttcatagtacgtttttcaaactattaaacggtgcatttcatacggaaactttctatgtagaagttgttttaaaatatcaaatatggatgaatatatttgtcaactttgtaataaatctatactattataaaaattgaagatgtttttaccggtatttttgtacatcatccgtatttgagtctgtttttaagttcattcgcttttggaaatagaaatccatgtatgagtcggattttaagtttgtttgcttttgaaaatacaaaagaagtcgtataagaagtttctttaaaaaaaccttacatgctaacttgagatgaaagtcggacttctaattgaagctcatgattttctaaaaaaaatccaagtaaattcccacagtgaatttcatcttatttaaaccgtataatattaagatagcatttgcctgttgcaacgcacatatatttttctaagtaaaacctaattaacacataataaatatatatatttgatattttaaaacaacttctctatagaaagttttttatgaaaccgtttagtattttgaaacaatatcttctaacttaacctgttgcggcttgtttgttaactcgagggaaggggattgggagtttacatgagggaattgatgatgagattaatatgggaatttgatttttaatcccaatatcttgtttggtagaggtaatggaaattgatagggagtttagttggagattaggtcattaataaaaacggatggctgagatttgcttagacaaattaaaggaggaattccctcccaattacctacccctatccagatattgaaaaggagggagttccttcctcaattcctcatcctcatcccacaaaaattcccatgtctcccaaccaaacaaaacacttaataggcttatccctctaaactcccaatatctcctaaaaactccctacaaccaaaagcaccgttggtgttggaaagccatccaccgtaatataatcagagttggggtccaggccgaaggctcgaggaaattaccatatcgcccaccaccccgggccacgttcgggacgcggttgcctaaaaagcgaaaatatattcccggaacaaagcaataataacccgtcacgattcgcccacacggcctatctataaagccgcccccgtctccgcaaggtgatcgtattcaatcagtttattcgatcgccggatacccgaggaagaagaagaagaagaaaagatgagctactacggccagcaacctcccgtcggcgtcccgccgcagcaaggttcgaaatctccggctccccgtgttcttcttcttcttcctcctcggcttttttttaaaaaaaattatgtgtgtgcttgtgtggtttcttgtggatggtttgactgaatcttggccgtgtctggatcttgtgtttgttcaggttacccggggaaggacggctacccgccgccggggtacccaccggccggctacccgccggcgcagggctacccaccggctgggtaccccccgcagcagggctaccctccgccgtacgcgcagccgccgccccagcagcagcagcacagcagcggcccttccttcatggagggatggtgagcacttcgtctcgtctcgcctctttttttttaatcaacaattcagcatcttcttcgttgctcttgtgcactactagtagattttgaatttgaagtagtactagattgtttgattagatcaaaattttagtgctatttaggcggttagggagtagtagtagtaattaccggacgctggtctcagatctgtccacgccgacgggtgcggtggccggcgcgtccgccgcggcggcggcggcggcggcggcgcacgttcgctgtggtggggccctgaatagacgcgtgaactaccaccccttgaaacgtgggtttcgttgacgtgtcggtccttccaagcaaggcgacgacgaggttgcacttgcatgccacgagggggtctggctgtcttctccttgcaccagtgatggccgtctgatcttggatggacggctgtgatgcagtcacattcccttggtgcttaccatttgttgtttccttgtgaattttggttggttgctggagttttggctagaggaaagataagttcaaaagcctgtaggagaataaaaatgtgcttttcacagattcctttggggagaggtcacctaggataatactactatactccgtagtaagtatatctttcttggttttttatagagagatattatattttcgttgacgcgctaataccaaagaacggttctcttcttccccccgagatgattatgattagtcttggcgggtgttccatcactaattgtgttgctaacctagttgcaatttgaataatgcagtttgtcaatggacggctggacatatttagggacttattttagattgagcatatgcctttgttcaaatggcaatactatacttacctgctgcctttatcagtttcaattttggtgtcatgattctaatgatgtgttgtaacagcttggctgccctctgctgctgctgtctcctggacgcctgcttctgaggatagaggcgacgggtgcaacagagctgaagagatttgtttcatggagctgatcaaa

SEQ ID NO: 21231 - DNA, 684 bp, Oryza sativa
  unsure (1)..(684): unsure at all n locations
ccgtagtaagtatatctttcttggttttttatagagagatattatattttcgttacgcgctaatacccaaaaaaaaaggaaaaaacccggggggggtttttcctttnccttttctttctcccccccccccccccggaaaaaggaaatgattnatgattagtcttggcgggtgttccatcactaattgtgttgctaacctagttgcaatttgaataatgcagtttgtcaatggacggctggacatatttagggacttattttagattgagcatatgcctttgttcaaatggcaatactatacttacctgctgcctttatcagtttcaattttggtgtcatgattctaatgatgtgttgtaacagcttggctgccctctgctgctgctgtctcctggacgcctgcttctgaggatagaggcgacgggtgcaagagagctgaagagatttgtttcatggagctgatcaaaccgaactgctatgagaaaatgctgctagatttcgtgttcggcattattacctgttattcgccttgtttatgaacctctctgaacctgatttatttgatcagtgtttgatggatggctaaaactatatagttgtgtactactgttgattccaatcttgctggtggaattcaacccgggttgcggagtgcaagttgaattcgttcttgttatgtcgggc

SEQ ID NO: 21232 - DNA, 2578 bp, Oryza sativa
aaaaagtgctgaccaggccacctgacagtaactacaaactactcttcaattcttcagcattgccagcaacagcaatatgtacagactacatagtaccctgctcacatactactaccacactactactcgtagccaaggttcacagttcatcaaacctttggtatgggttaccgtcacccgcagtttgacggttaccatggtaaccacgtggttatcgtgaaaaccacatggtcacgtgataacccagtaaccgtacggttttgtaaacatagcagggtttacagtatgatctgcaatttcttttccacgtgtgtagtaaaaatgtctcgtcatttttttacctctcgctcagtccctcgctgcgtgcttcgttctacaggccactgagctgagctgctctgcacttgccctgcacttgctctgcttccccctcgacgtcgacgacgacgacgacgacctgctccctctcccgaacacggccagcctcgcgaagatgcgcaggatcctactcgcgcaccgccgctgcgatccccaccgcatggagccaatgcagctgctggaggacaccggcgctcgccgcctgaccgccgccgccgccgccggcgtggccgccgtgtccatcctgaagctcgcctccttccgggacgagctcttcttcacggtgttgtgccgctgcagcgtctgcttcagggagaggatctcctgctccagcgcctggatcctaaagctcgccgtctcgtagcccgacgccgcgtcgtcgtcgtcgtcgccggcgcgggcgcggaccagcttcctgccgtcccgcgtggcgtgggcggtgtccgtgtacgggctgctggtgctgagcggctggctggtggggacggcggtggtgcacccggggctcggggtgtacgcggtggcggcggcggcgccgccggagacggggacgaggagctcccccgagtgcatgcaccggaacgagtcggagcactcggtgaaggcgcggtgcgtgtgcagctgctgcacgaacagcgcctgcacgatcagccggagcggcatccggtcgttctgcaccgcctggatgcacgcctcgtgcgacagcttccggcattcgaggtggccgcacagcgacgccttctcgtcgccggacaagccgggatgctcctgcaatggcagaatcaaacagcttcacaacgttagcgcgacagcttaacggactaaataatctcgtgcacgcacgagtgctctgctcgatcgtctttaccacgatgtatgtgtcgattgcttcgtagagatggtcgtgggatttccggtcgccggccggaacgacgccgatgagctcggccagccggtccggccggagcttcgggtcaccgacgatctgggcgatgtaccgatcccagagctccgcgacggcctccgcgcctcttctttgcattgagacatggctcgcgacgatgctctccatcgccctcacctccgggctgccggcgatggattggccgccggcgtcttgctctggctccggcagcgggaggtcgtccacgcgggcgaattgcaggttggacgcgaccagttcgcgcagcctcgtctggctctcgtcgctgagctcgagggtgatcgaccgcgccagcagcgcgaagtagaacgacaccgggatggcgccgccggtcgccgccgacgactcgagtgggaggaggtcgatcacgccctgcaggatcgcggtggccctcctgttggcgtcggtctcgccgtcgccggtgtccgtgctcgccatgaacttgtgcgtcttcttggagagcacccacttgttggcgtagaagagcacgacggggctgacgtacttctccttcatgccctgacgccgcagcgccagcacgatccgcctgaagaactcgaaggggagggcgacgaggtccttgatccagaggtcgcgcgcggcgagctccttgacgagctcggcgtcccaccggcgcccggcgaggccgcgcgccgcggcggcggcgaggaggcccggctggtcgcgctcgcgccgctgctcgtcgccgtcggggtcgaggatctccatgcacgccatgaacgccagcgactcgacgcagcggctgacgacgaggagctcctcggcgacggggagcagcggctggcatcgctgcaggacgatgagggcgtcgtcccagctctgcagcaccacctggttgatgtacaggtcgcagcgcgcgccgaggccggacacgtcgaggaactccgccgcgcaccgcaccgccgccacgttgaacgggtcgagcgccaccgcgtcgccgtagcagtacagcccgatcacctcgaacgcctcgctgccgccggggaagctcgccggcagctcgacgacctcgccgtcgccgtcgccgcaccggagaatcgcctgcctcaagtacccgcacctggacaccagaggatcctgcaacgacaagatcacacacactcatcaccatcttcttcctcctcatcccaaccaagaatccctaattaatcttcacacaatctctcctaaccttgtgcaggttgaagctcctgtcgccgacgtggacgctcaccgtcgccggcggggctgcaggaa

SEQ ID NO: 21233 - DNA, 6583 bp, Oryza sativa
taaatggtttgaaatttatagtgtggtaggaagtggagaaagggggagatgtgtgcgtgttaggggagggacgggcgtgctaatcgcccaaggcgatcacccgtccattaggcttacccgttcccagttcctactcagaccttttctaaaatataaaaatagtttttttggactacaaaagttctttttttctttacaagtatggtaaatgcaaatgctaacaacttgcgcacactgttatagaaccggcctagaaatcacatcgataaccgaacatgtaaaaaacatcataggagatccaaacacgataatgacactgaggtacgatatttgttaacgagatttaatcgaagcctacaacctaagggcgttgattacgaatgctcctcccagatcaaacataattataacatattagagttataaggacccttgatttgatgtcatcggcagccgctccctctcacatatactaagttgtaatgcggtttataacagatgtatctctctatttaaaagagagcttaggatagagtccaactctaactttacctacacctattacaaactcctagtcctacattgtaatcgactacgtacacatattcgatacaaactctaacatacacacacctccctataaatatacgcgtacaccctatcactatgaacacctcaaaaagactgaattgtcacatctcaagatcggcaaagtcatcaatgatgtttcggtgttgatgagtgtgccgtctattactgaaagaataattagccgtaaatgcgagcacctcaagtctataacttgaaccgaatatattgattcccccacaagttatttaaccagttgctacgctcacttcaaaataaacttttgattacatggcaaagacatagcacaccactacacacgctgaaaagcagaataattatacggagtactacgaccttttattttgactacaaaaaatacccatacgttacaacgtgtgaagattattttaatcttattattgttatataatttagttaaggtgaaattcaccgtgagaattcacttggatatatatatatatatgtatgtatatatatatatgtatatatgtatatatgtatatgtgtatatatgtatatatatatatatatatgtatatatgtatatatgtatatgtgtatatatgtatatatatatatatgtatatatgtatatgtgtgtatatatgtacatgtgtgtatatatatacatatatatatatatatatataagaaaatcatgagctacagttaggaatctgatcgtctcaagttagcatgtggtatttttaaagagattttttatatgactcttttgtattttccaaaagtgaacaaacttacaaaccatctcaaatacgaatatgattttcaaaagtgaacgaacttaaaaaccgactcatacacggatgacgtaccaaaataccgataaaaacatctttaattttaatttttataatagtagagagcagacgcaccattacacccactcacacgctcaccaccctaacatctgtgtgtttccttactaagccatttattttacataaattttataataagctttataaagagatgaaagttattatattccccgtaaaaatgctgactcactaatgtgtcttgaaaatgaccattgtatacaaaagttgtgcatgaaaaagaggggaccacctacaaatcgggtgtccgacgctattccaccgagtagatcaaaattgtttcactaagtagatcaaaaatgtttcaatcgtttaaaaagctgaaacacaaccaaatcacctcatgaaacattttgcgacaacgtatgacacaacggtttttgaaactgtttcaccatataaaaaaacaatgtttcagcaaaataatggaatgatgtttcaattcactgcaacatttaatctatacatagtgaaacaacacgagtgtacttcctgaaacagtgtttgatggaacacaaaatgaaacggattctcttaatagaacattttcattcaaacacaaaatgaaacggattctcttaatagaacattttcatattgttagagtgcgcagcccgggccaccaatcatgggccacccagggtcacattgggcctactccaacacaggcccaaccggagtcacaactttaggtcctaggcctatacaacccaaaagattagtctgatgggtgaggaccaccccaccttttaagttgtgctcccccatcatcaattaccgatgtgggactaaacccaacaatctcccccgtcgttgatcacccaagacacgccagatgacgacacaggaacacacgatatttgttaacgaggttcagccgaagctacatccccggggctctggttatgggcgctcctccccaatcaatatagctcatagcccctacgagtccatggccacactgccatcatctccctgcgtgtctacgctacattgtagtcgccatggttacattgtggtgctcccctctctatttaagagagatgtcgggttatagagtctgactgtaactctacccctaacacctatttacaactccaagtctaactataaccaaataagactggtatattcgacacctattctaaaacgtgagttattattgcaacggcacatgtggtggggcgcgtggtaaggacggcacggaggcgcgggtagcgcccgacgcggggcattttccaaaaaagatgtctaaggattacgcgagaccgtgagagtgcgtacgtgcaaaatcagggcggaatttctctcccgtgtctgccacggccaccggtgcattgcatatgcgcacacgaggagcaaagctcgcgacctcgcgcgttgcactgccgcactgaacgatcgacggacgacggcagcgcgcggccgggcgtcgcgcgctgtaccgcagcgcgcaccgcaccaactgaactctgcaaggtgcaagcaactagcgtacggcgtagcgtcgcgctcgcgcggccgcgcctcgcctcgcgacgtacgcgcttgcgaattgaaagccttccttttcgtccgttccctgagaccctgacccgcgcccacccactcgccaagcgggagcgagacggagcggcgcctgcacccgcgcgcccgccaatggcagggcggccactcgtcgcgcggcgttgctacccgctcgccacggcacgcagcacatgccgtgcatgcaaaagggtgggttcttataaaaaaaaagagagagtaagaaacggagctgtagcgtcggtccaaaagtttgtttctcgagcagggagatcgaagagagaagcatttgccctgctgctgctccggctggccggtttaaattcgtgctgctgcattcggccgggtagctagccggcccgtggttgggctccagtaggacacgcgacatgcatgctccacgtgtgacgctttgcctgctgtttcgtgtaccgcagctgcatgtatgcgtaaagtttttctactactagtttattttttattgggcggacaggtcgtcacagtagagcatttaccgtcgagccgcgtactttttggaacagaagagttagatccacagtgttttacatatccagtcgatttatgtttgggtttgggaaatttcaccggtgtaaaaagcttctcacttcatcgggcaccgtcttctgtaaatttttttcgatatgaactttgataaattttgctcctcgtccaggcgaagaaactccggctttggctataggaaacggatggtgcatgcatctagtcccgacgagcgacgtaagcaagcgttcgcccggtcttgatgtgtgccacgtgctggagaccgtcgtcaccagcttttaattcatcggaaagatagcaaagcgtttgtcgtcgtggtttacattgcatcgtctggtttccctccgagattttgtatgtacatgcatgtatagtctcgtagaccatacatgaccagcaaaaccacgtgcggatatatcaacttttaggcggttttgtgctggctgaaacaatatgtacctcagctgagaagtaatctcgaaagcatgagtacaccaccggagtcggagtgtacatgcatgcatgcacggcaaggtatgaccaaaaagcagttttgacgcagattgatcattcgatctggtagtgaaaaacaaaaaaaaaaaaaggtaaagtggtgtgtcccggtgtccgcctatacgctaaacttaccgtggtgctagagtacaagcgagccggttggtggaggcgagcgcaaaagcgccacacggccttctgccaatgaggcctcacgccgtcacgcggggcacgccagccagccagtgaccgcggcggaacgcgccacgggggacgatgcgcccgaggggggcggacgccgcatgcagcgcaacgcgagtacgcgacctcgcctcacctcaccccaccatacgcctcgcgctgctggctggaatccaccggagcgcgcggcccgcgactccgctccgcctacgtgtcggccgcgtccccgcgcggtcgcccacgtaccccgccccgccctcccacgtgcccctcccccctgcgcgcatccgattggccgcccacgccttcttaaccccaccaccccaccactcgggccccaacgcatccgttcaccacctgcgagagcgagcgtaccgttcgttcgttcgtccggtgtacgtctcgccatggccatggtgcagccggtggacatggccgtgaaggccaacgagatcatggcgaggttcaggcccatcgcgcccaagcccgtgctgccggcggcggcggcgggggtgacgggtggtggtgacggtgctgcggcggtggcggcgacgaaccgcgtgctctgccagctgcagagcaggccgtgccgggcgcggaagcgggggcggcccagcgtagtgccgccggtgtccccgccggcgggggccaagaggaagagggcgccggcgtacccggtccccgtggcgccgctccggtgcgcggcggtggccacggcgacgagggcgcgcgtgtcggtggtggtcgtcccggccccggagagtgcgggcggggttagtgcgctggcgccggtgtcgccgagtgccggggactcgacgaggctctcgccgacggtggtggaggtggaggacgaggacgaggagaggggcgtggtgctcgtggagcgcgacctgctgcggaagctgctggagccgcggaagctgctggagccgcgcgcggtgcgccccgtgggctccaccatccacgtcgagtcagtccacatcgacgtcggccgcaccaccgccgccgccgccgcagccgccccgaagacggcggaggaggtggaggcggagctggagtcggactccctcccggcggtggtctcggactccagcaaccgcgtccggctggtgaacgacgcgtacaagcgaatggtggggcagcccgagtgcccgtggctcgacgccgtggccaccgccgcgtccaggaggatcagcggcgaggtggcgctggtagtgtccgagccggcggcggcggcggcggcgctgccggagacatgcaaggggttctcgtgctcggccaagatcgcgtgggagcgcgacggcaagtggtcatccgtccatgcaccgtgcgacgtcacccggctgcagtgcgagtcgagggactacgtcttcgcctggaggttccgcgccgccggcgacgaatgcaacacccaccgccgcgccgccggcgacgcgtgacgacgtgatgcatcaagccggagcaaactttagtagtgcatagatgtaatcgtgttaaggtgcaatgttactagtagtagcaaactagatcggctgcttcctcttttgcgaagcttataggatgcaaggccaggttctaaagtatatatgatgttgaccggagaatgcaagggaaaattgtaacttttgctttagtgagatttgtttgttctcatgtagtttagcactaatgatccatttgacagcgacaagtgattgcgtctgcatgcatggacatcccaggatagatgcatgcatggacaacccaggttagacaaatgcgtggtcgcaatcacattatccgtgtcgcgttatcaaacaaaataaagaaaaacgtcttcactgtcgtgttccaagagttgagagcaaaccagggcagaacaacacttaagttttgctttaacaacctaagcaaacaggtaaaggatctttatgaaatgatgtggaaggataatggtaaacaattttagtacacaggaaatcattctatttgatcacagtgcacgcttattataattgagagttggttgaggaacggtctaagcccacactcgcacaacagattggagaaaccaaaaacaacacatatgggggtaaacaccatcttgtgcatgtcctgctagcaatgtagcatgcaagattagtgctcaggcttgctctgccttcgggggacccctccacttgaagttctctgcataagatttggcctgcatgacagaaaaacaattggttaattacagggaagctactaacttaatgcacaacaacctggacggtatgtattaaattggtcaaaaaatctgggagaagagtgatatccccttcgtcccg

SEQ ID NO: 21234 - DNA, 3108 bp, Oryza sativa
  unsure (1)..(3108): unsure at all n locations
ttgtagcgtagcgcagcgtgggagtactacactgcactgcatcgcgcaaccaaccaaccacccaccacaacacaaccctcctctcctcatcatcactcgctcgctcgctctcgcgctttgcggcaactggcggtgtctcctagcccttgcctgccatggtgtcgctagccggctcccagatcccgtcgccggggcagagtccgtgcgcggcggcgcggtcgcagcgccgcggcgcggggtactccatgcggaccatccggtcggcgctgctgcagccggactcctgcccgggctcgccgcatgtggcggccgcgtacgacgcggcgggggcggactcggacatggagaacttgacggactccgtgattgatttccatctcagcgagctggcggccaccgcggggcccgcgcaccccgcggcggtggccaagtcgtcgtcggccaacgcggcggccacggagatgctcgagctctcgcgggacttcagtgactactcgagcttcaactcggatatctccggcgagctcgagcggctcgcggcggcggcggcggcggtggtgacgcccagatccgacgcgccgcaggtgggcgccgtggatctgaatgagcttgagtcgatggatctgtccgtcgaggcggcgccgctggagcgcgtggagccgttcgtgctggcgtgcgtgcgggcgctggggcccgacgccgcgccagacgcgcggcgcaccgcggcggcgaggataaggctgctggcgaagcacaggtcggacatccgcgagctgatcggcgtgtccggcgccatcccggcgctggtgccgctgctgcggagcaccgacccggtggcgcaggagagcgcggtgacggcgctgctcaacctctcgctcgaggagcggaaccggtcggccatcacggcggcgggggccatcaagccgctcgtgtacgcgctgcggacgggcaccgcgtcggccaagcagaacgccgcgtgcgcgctgctcagcctctcgggcatcgaggagaaccgcgccaccatcggcgcgtgcggcgccatccctcccctcgtcgcgctgctctccgcgggctccacccgcggcaagaaggacgcgctcaccacgctctaccggctctgctcggcgcgccggaacaaggagcgcgcggtcagcgccggcgccgtcgtgccgctcatccacctcgtcggcgagcgtggcagcgggacgtcggagaaggcaatggtggtcctcgccagcctcgcgggcatcgtcgagggccgcgacgccgtggtggaggctggcgggataccggcgcttgtcgagaccatcgaggacggcccggcgagggagagggagttcgccgtggtggcgctgctgcagctctgctccgagtgcccccgcaaccgcgcgcttcttgtccgtgagggcgccatcccaccgcttgtcgcgctctcgcagtccggctctgcccgtgccaagcacaaggtaaaaccttttcaactttacattcctcttgtttgctaatgtcatatcgggattggatatttgggtatgatttgcaagatttctagtatgtcgattttcaagtgtagattttgggtttgagcttttggtgtgactgaagcttttggataattgtaccgaacagtatccaacgaattcacctgttagagtttgattgaagtctgattaccattataataagtactgaaaagtacattaaacctagacggaggaaaaggttcactgtgcacgtacctgagtttaggtagatttctactacctgattattatcaaagctgtttaattcagccctggtttctattaagaaaaccatcatgctagctaacacgcaatgcagatttgcagtacactagttgttgacttgtagattcttttcacatagtgcagatatgcactttattaattatacatatcttaggtacagtcttggatttgctaaaccttcgaggtacaagaggatgcacgttcactcttctgcaagtcaaaactgcagtacctttgctgttagcttggtccttcgatttaagaaacattgcttagttcttactacctccgtcccacaatataagggattttgagtttttgcttgcaacgtttgaccactcgtcttattcaattttttttttgcaaatataaaaaacgaaaagttgtgcttaaagtactgtagataataaagtaagtcacaaataaaataaataataatttcaaaaatttttgaataagatgagtggtcaaatgtngcaagcaaaaactcaaaatcccttatattatgggacggagggagtaaacaataagtatattaattatttatatgacaattatcattttgccaccatagtctagcctgtcgtgctttatctgcctagttgtacagtcggattggaaagagcacccccgaatgtgtgcttcactagttagctatctagatttactgaatctgaaatctgcttccaaattttggagacacttatgtttagctgtgtgatttgcaggctgaaactttgcttgggtatctccgcgagcaacggcaaggaggtggtggctgcagggttgaacccgtggcagcttcgagcttggccaggtaatgctgtaatcatgtggtcgcagtatgcttcgctcttatttaacctcgtgtgctctgttcttggagaatggagtagctgtgtaaggaggggtagagatgatcatctgtaaataacggttgatggctttggtttggtaatgtgaatacaaatgtggtttgcgagtgacggatggttagttggtataactaacatcaactgagaggaggatccagccatccagggggtggggacagagggtttggattgttggtaactgctaaggtgacgttgaattttagatgtgtacaggatgctagggtggtatgcttgcttggcttggaaaggttataggagaatgatggatcatcaaccatgtcttttttccttctggtttggagtccgaattcccctgttccaatttatctagtgtgacttattttgcaaatatttcattattctctttgctccatgtggtttcctttcttttcctgttgaatcaagatattctcaattgtgatgaatatagggctgcaggaatt

SEQ ID NO: 21235 - DNA, 643 bp, Oryza sativa
tcaccaagtcggtgagccgtatccgcatccgcaccacgtccaacttcacctccgagttctcccaccacaccaacgtttagttgtcctgcggcaacatcgcgtcgcttcctatcccgttccacgaccacatcccaccgcctccggaggcgaaattgcttgaagtagagcacatgtgcggccatctgcatgggcagccgctcgttccgtgccgcgtgcaaatcccgtgccgttgccctgatgacgggtcggccccacaagattacttggcgggttggaccatgtcaaagtgccacgccagcgaaactgcgttctaaaacagttaaggaagacaaattacaccggttttaatagattaggagccaaggtatccggtattacggtttagtgataggaatcaaattagagtcaaagtgaacttgcatagcaatgtgtgggctgctaggcagatcgggcacagacagaacactgcccaagaaatgttctaacgaatttcaggcaacacgtgcgaaacaaaccatgattctaagtagcttatgaaagtatggcttgtcttctaaaagtacagtttctctaaaaacttcctacatcagcatccattagataaaactttttccaaattacttgtcagggaatgtatcctatg

SEQ ID NO: 21236 - DNA, 1819 bp, Oryza sativa
aactatacacacccaaggtatgcatagaattgcgttgaaggtactactacaaggagagaagcgaagcatatatataaatattggtcgttgtcataaactgctatagctaccggtccatcacccgttgaatttcgagaacatatttgtatggttgaattgtgatgagaaaattgacgtcgttcttatatgtgagcgagaggcgcggtcgatggcgggagactggactagcgcgagaggcgcgtctggtggtggaggaggccggcacggcgcgatgaggcgcggccggcggtaaatgaggcgaccacggtgtgagtaggagtggccggggggtgtggcgtggtcttcggcgcacgaatgctggccgacgggggcgccggtgcagtggttccacatgtcagcagaggttgagcagtggtagagcatcggtgcgtcagccatgaacttgcaggtgatgagcggcgggtgaaaacccagcccggcctggccggaccgacaacaatgttccccctccaaagggcgttgtcgtgtcgtctcatccctcaagggtgtttgccgggcgaaaacccagtcttggctcttttgagtccctgacggacggcggcggcggttttccgtcgcttctctccttggagacgtcgtttaggcatcccttgtcgaaaccactcgaacgactggtgcaagcacactctagatagagttgggctttgtgttggttgtaagggcgtcttttgggcattctcgtatgtgttcctttgtcggcctagcggcggtcagtcacgcttagtggcggccggtccggtgctagccttcttccggacctatgtgttggcgctgtcggtgtgggtggtagtattttttttcctttttcctgattacgaccttccagggttgtaatcttgtaatttttttctgctctatcaatagaacttcgcaccatctcgtgcgagtcgttcaaaaaaaatagttttgaagttacaaagtgtagtcacatacatatgtgcttgtgtcgactaggctgcattcggcagcatgacaataggagtttgtttgtttcttttttttcgcgcacgcttcccaaactactaaacggtgtgttttttgtaaaaaaaattctatagaaaagttgcttgaaaaaatcatattaatccatttttaaaatttaaaatagttaatactcaattaattatatgctaatagctcatctcgttttgcgtatcttcccaatccccttctcctcaaactcagccttaatacaagttaggtcacatcaaatctattcccacccccaatatggttatttggtctattaatatgtagtaagcttaaagtcaaccttgatgaatggtgacgaatgaaattatgttaagggaaaagccaagacaccatggggatgaacaccatgttgatgtattgatgtgatgggttcataagtcgatcataccaacaccaaaaatcgcaaagaagatatttggaaaaatagaaagaaaagagattcattttcaaaatcataagggcatgcacaattctcatgcgtggcaagtggtttcggctcaccaagtaggatccttaggcacgtgatggctcatcagggtaaacgtgtggggcgacaagggagaaaagggtgagaggaaggctgtgataactaggggagggagaggaggggcctaccatcatggatgctccgtcaccctgatttgtgccatcgttgaaaagttcattggcccgctgccgctgaagagcggagcgcctagtcgatcagattttctccatgctgccctgatctgcaccgctcttgagggtcacgccttgtcattactcg

SEQ ID NO: 21237 - DNA, 3908 bp, Oryza sativa
tgtttggctcataaaagctagtatacctaacaatttaaaatctcagataaacttgttgacaaattcaaatgaatcgaaagacatgagccgaatgagctagcaaaccacgagtttttatccaattttaaaagtcgggttacaaacgtctctcacacaacgaccagtgatgaacctagaacaaaatttcctaggatacaatatatagtaattatctaattattaatcgatatactaattaatatgatataatttagttaggatatggataatctatctggggtccttgtcaataaacccgttattcagaaaacccatatactctgtatcaatttaatcacgtaaaaaaaataagtcagatgatcctcttcccaccgatccaccaaactgaagcggagcatgatggcggccgcggaaagggccagtatccccccgttgaaaactccgcgcgagcgtgcggacgcggcggggcccctcacgccacacccaccccccgccggcaccgcgcgggcaggcgcgggcagccgcggccacgaagcggactcgagacgagacggttccgattaggaaaaccaaaaaaatacgcccgcctgctcatccaaaggctgcaggtggacgcgccccattggtgcggcccgtcacgcgctgccgccacaagcagccagagcccagaggcgagtcgatggatgcctttgcttgactttttcgggccatatcgctcaaaaccgtggaaaaaaaacgggagtaaaatatagcctagaaacagcgcacccgcctgatctgagctcactgcattgccccggactttctgcgacccctttttcccgacctttctacaggccatcctccctttttccagttccctttctacccctttttaagctacctgtacacgtactaattctataatctacacttctacagatacagtggtttgaacgaatgagtgaaggtatactcggggtaattttcttgaggctagggctgtgtggctgctaaagccaaacaaggcaataaaagcaagcttagttaggtacgggagtagaaaaaaaaaagcaaggtgagactaaaaaaaaaaaaatctgctgctactaccctaatccccctttggtgttatatcctcgagccccccagtagacgctgcctgctcctgctctctcctccgcctgattcctcattcctccaaccagtggtgtgtgcttgctgctgctgctgcttcagttctcgagtagtactccagtacagacaaggtaagaggcgaaaccgccgaatcctctcgtgctttctgctttcagatttgctttgcttccccgctctgtagcttctgtgctctcttggattccctgggatttgtgctctttcttgcgctttccctttattgggatggaaacctacgcggcatcgatcgccctctcttttccgggagtttatttatcttcagttcttgagtggttgtgtggttgaatcgagttcttggggctgtgaactggtagtgattccatctgttcgagaaacgttgacgaggaggagactctgtgtgctgcagtttctgggttttatttttcttttttgtaagcatctgccgacagttcagcgttgtgctgttcttccacctaccgtcggattttgactatgcagctgctctcccaccggtttcgatttctttagtcggggggaaattcggctcaattttgtgtggatttggtttgattcgttgttatctcttttggatgttgtttgcaggcgagtggtggtggtgtttgttgccatggagtcgcagcaggagaaggcggtttctgcgccggcggcgaacgggagcggcggcgccggcggcggcgagctgatcgggtacgtcgacgtgcacgtgcagagcgcgcgggacatccagaacatctgcatctaccacaagcaggacgtgtacgcgcggctgtcgctgccgggggagggggcgccggcggcgtcgacgcaggtcatcaacggcggggggcgcaacccggtgttcgaccagtcgctgcgcctgggcgtgcgcgccggggacgtcgacggcgcgctccggtgcgaggtgtggatgctgagccgggtcaagaactacctgcaggaccagctgctggggttcgcgctcgtgccgctcccggacgtcgtcgccgccgagggcggcacgctcgcccgcgagttcccgctctccaccaacgacatcttccactcccacgccgggttcctgcagctcgagctgtcctacatcggggtcgtgcctgaggtcgtgcccatctcgccgacgcccaagccggccctggccgacgcggaggagcaccgcgccggcggcgcggcgaacggtaaggagtacgagaagatcgagttccccgatctgaatctcgtggaggagaaccagatcatgctgtcggagtacatcgggctgccgtgctccgccgtggagccgcagagctccgagagcctcctgacctcggaggaggacggcgacggcgccaccgccgagacccacgtcgccggcgtgcgcgtcgtgcagagcttctcgacggacaacagcaccgccgactcggccggcaccttccggagcgacaccccggtcagcagcgtgtccaccacggagtcccccgccgccgccgcggtcccggccaccccgcagtccaactcctccggcaatgccgtctcgtcggcggagcagaaggagaaggccgcctccgacgccgccgacgcggaggtggagtcctcccgcaccgtgcagagcagcgccagcccggcggcgaactcccccggcgccatgtccgagagcgcggtggataagccgccggtcatccgcgtcaacctcgagcaggaggtcaaggtcgaccagaaggagatcatggacatgtacatgaagagcatgcagcagttcacggagtccctcgccaagatgaagctcccgctggacctggacaacggcagcgacaagagcgcggccgtctccggcgccggcgccgccgcttccgacgcggactccagcggcgccgactcgggcgcggcggccgcggcggcggcgaagaagccgatggccggtgggccggagaaatctcccaaagtattctacggaagccgtgctttcttctgaagcaaagagatggggcatttgcagccgtcggatctcagctgaaacttactactagttcagaggaataacacgttctcctcctcctgctcctgctgctgctgttcttgttctaggcttgtcatcagatctcgcaagacgagcaaactagctgctctgttttaatatatcagtactcttaatgaaaaaaatggtttggtttcttcgttccttttcagctatatttcgatcaaaaacggttaaattcgccaagaaggaacacggtaaaatcacccgtctttgtactaccatccaaaagcatcgaggcgtatttatctgtcgattaaacgctaaaaagtacgttcatctgtcttgggggatcatagaaacactcgcatttgatgcttgtcatcaccatctgattggaagaggcagctgcccacaccatctgattgtactacctagaagggcggtgtgggacagcgtggaaagtgcaccggtgccaattctgaagttgttcgtatgccatttgtcgatcgatcttgctcatggtttcaaggctttttaataggagtcctgaatacaatcaataagcgatattgatcttgtcggatgcatgtctgcgtatacaggtatactgatggatgtggatgtcgaaagtagcacatcaataacctatatgctgtgatcatggaatactcctacctttctttctcaatccacactcctgtttgtgtaggtctgtagattgttgggttcatcttgaaatgtacgaattttacacggttttttaaaaggaaagaagaaaatttaatcgggctgcaggaat

SEQ ID NO: 21238 - DNA, 579 bp, Oryza sativa
attcctgcagcccaggagtaggccctccccaattaataccgtcactggtaatacccatttgacctccagttccagatggtgcaaaagaactcatgtttgtggggttgtttgggtagttcagattttcattaccccaaacattccttgacattgaactcaatagtgatcctgaatcatcattaagaccaacataaccaataggactacctaatctgtttgaactaccattgtagaatgaacctatctgccgcccattggagttattgacaaaactagaattggcgccaaaattcgcattcatcccagattcagaattcatgcccattccataaccagggccaaatgaagagaatccattccgtgcgcctgtaagcagaccataccttccatcaaccctcatgccataacctccaatagggtttgggttataaccctggttgaaaccattcaagaagctatggaccctgctcatagcatagttctgccctcccgcaggtgaacgtgcagcaggtccaggtgattgctcctttggaacagctctcttgacctcaaccatcttaccattcagctcatggaagt

SEQ ID NO: 21239 - DNA, 5051 bp, Oryza sativa
attcctgcagcccatcacacttcacataacaccgttatatgataattaatgatataataataagtttgatcaacaatatgaacagaatttaacaatatctcaacaccgataagttgagtagaccaaagttcagcaacgtccacatgccatgccctagcgttaacagcgttttcctttggtcacttcccctttctaatgtgctacaaacctgctaggcttccttcattcataggcttccgatatgtttgattggttgagtcgctatggaacttttagaattttgacgaaaattaccatacaaatacggttatcgataaaacggtcagaaaaaccttcatcctatttccggaagatattaccgttgccatttctaacacggacggtaaccaatactgactgaaatggtcattggaaacggcagccgaaaatcttaaaaattttcgtaccgttttcaccactaatcggagccgccggatgggggggtcggcctgaccttcggaaacagtcgtgctctgaatcgcgcgtattgacatttccccctagcaactcttcagtactccacaatatcgatgcttttgagatagctactcggtgaatgagacagtccagtgatgctacctgtgagaactgagagcacaaaattcagcaacttcgttattgcgtttacgtgctaaaacgtggtgtttctgtctctctgtctcgggtttctgccctgctgatgccaccaaagacgaccgttaaggttcgcttcgactggaacttgtactggtggtccgtcggctacacggtcaccattctgagagcaggtaaaataggtaaaatagaaggctataaaccagctataaacatattttaaaataataaagaaagagagagaagagcagcagactacatatctgtagcccagctgcagcacgaactctaaaatgtaatgtgtgtatgacaagtgagaccatgtattaatagtataataagcaactattgtatgaattagctagtagtgggttatattattaaacttgctctgagcatcgtcaatgggcatcggcaattcggcatcctgcaacctgaccagaagtgcagaaaaaaacgttggtgccgttctggtcatcatcgccagcgcggacacgcggaacgcgacgtcggccgccgttcgcctcggtggtacatgcgtccagtgcacgctggcgctcagctcctccagctcgctgcactcctctcgtagacgcggcccccggcggagaacgcgcggccggcgtcgaccacgacgtcggcgccagcagcgaggaataggaggaggcggggaggcgaggcgccatcaaggaacggcccgagcccatcatcgcaggtggcgaggatggaaggatgcagaacgggaaagaaggttgtgcttggagtgtgccaggagagctggagatgaacaagtgaggagatatgccctgcaatagtgcaatttgtcagcgggagaccgaggcgtacccggagaaatgtttggttcatgcctgcatacgtgtggagctgtgggctgggacaacatgggccaaatgggatggaatgtcagatcggggtaaaaggcctagtttcgtagacttgtggccttttgggcttacgagctttgacggccttgggaaaataggccagctgttgggttggaacttggatctggatctgaagtctggaaaggaataagttcatctgaggtcccttaactcgtcaacgaatccgattttcgtcattcagccagaaaaccagatacagtaggtccctcatctatcaaaactggtaaagataaggtccctcggcggtttagagagcagttttggctgacgtggcgtccacgtggttaatttgactcggtcttcgttacgcgtggcattgatgtggcgctttcgtggcaattctatcacagaaaaaataataaaaatcgtgggcccacatgttagttacacaaaaagaaaattagaaatgttggggcccaagtgggccccacatccctctcccttctctctcttcttccctttccctctcagggcctgtttggtacagctccaactcctaaatttaactccaggagttgagtctggagtggagttgtggagctgcctaaacccagctccacaactctagttcattttgtgagagagctccacccagctccactcccagttttggtagagccgaaactgtttggctgagctccagctccagaaggggtgaagctggagctggagctgtgccaaacaggccctcactctctctcttcttcccgggagcgccggagcggacgggcgagtgggcggcggagcagcagccggcgacctcagcgaggcggcgcccttgctgccgccttccctcttcggcgatggccttcacgcggcagctggaccaagacggtggacaacagcgccggcgacggaagcctcaaccgggggagaggaggtgccgcggtggccggagccggggtggtaggcgcggcggcgggtgtggtggtggtaggcgcggggtggtgggtgccgcagcgggggccggtgtggcgggggtggtcagctggcagcaggcgtcctccttctccatggacaccggcaagcagcacttgctcatcgtcggcagcaatgcgacggcctcgatgcgctcatgctcgaggtcgaacgacatgatctacttgccctcggtcacccagtacgtggcgccgttgacgctgacaacgccccaggcgacgcacaggctccacggcgacgcccccaccgcgcgccgccggcggcggtggtgtcgtctcccagcgtgaggatattcaccaccccatcaccgttgccgccgccatggcgggaggggacgacgacgatgcggtgccccccagcgtgacttcatccaccagcccgccattggaagggaaatggacgatcttgtacttgccagtcgtcgaatggtagccgaagctgatcatacccgcgtggctgcggctggtcgccaacggcggcgacgggatatggagggactcgccggtgaccgggttgatcacgatgatgctgccgcagacaaggggatgtcgcttgagccacaggcagttgcacgagccaaccatgtcgtcgttgtcgttactggctactggtccaggtgccgcgtgaaggccatcgccggagagggaaggcggcgacgagggcgccgcctcgccgaggtcgccggctgctgctccactgcccaccagcccgtccgttccggcgctccccgcgaagaagagagagagggaggagagggaagaagagagagaagggagagggatgacgggaggagtgaggctgatggtgtgcaacatctcgtcttccccgacgacgtacacctcctcgcacggcttcaccgccgcgccgcctagccgccggccgcggacctccacggaccacggcctcagcgtggagcgtgcacaacacaagcctgatcagtgccattgcgaagcaccacgacgccgtgtccgttgccgacgcggtccccacggacagctccgccgcgtcgttcatattccggaggtggagagaccaggcgcgcacgcccggagtcagccgtcgctccatagctagcagggagagggagaaacaggggagagaggaagtgagaagagggacttgtggggcccacgtgggccccacctttttttgttaatttgtgtgtgagacagacatgtgggtcccacgaagtttttttttgtttttgggattgatttgccacataattgccacgtcaatgccacatcatatgaagaccaagtcaaatttgccacgtatacgccacgtcagccaaaaccgctctcaaaaccgccgagggacctcatctgcactggttttgacagttgagggacccgttgtatggtttttttagttgaaggacgaaaattggattcgttgacaagttaagggacctgagatgagctcattccgtctggaaatgggttcggtttttcttagagggaataagttcaacggagatacctcaacttaacaccaacattctttgaggtcccttaaccatagaactagaaatgtgtatccctaaactatgtaaaaccatttaaaaaagggacaatttcgtttctgcccctattttgatgtctaatattgattttacccctacttttttcgttttacttttttgaactgaacgcttgttttgcccctactttagaggtgaagttaacggtgttaagtaattgacaaaatgacatttataccctctcatgtatgttcattaattatgtttttgtccccattttatgcatgtagctttataactttatttttgtgagtatatttaaaattaaatgaagcacattgactagtatctaaaggaacagataattacattttataaaatgttgttaaaatgttgattaagttatatcaaaatgctgaaattttgtcaaaattccatcaaattcagaatttgtccaaattgttatattagtcaatgcgggtcatgtaattttaaatatactcccaaaaataaagttctaaagctacatgtataaaatggggacaaaaacattattaatgaacatacatgagagggtataaatgccattttgtcaattacttaacactattaacttcaccatccaaagtaggggcaaaacaagcattcagttcaaaaaagtgagggtaaaaatgaaaatcctaaaaagtaggggtaaaatcaatattagacatcaaatagggttagaaacaaaattgcccctttaaaaaaggtcccgaggcagtatacccgctgccgctcccccaaaaaacgaaacagaagagaaaaagggagaaaaaggagattgctgattaggattgtcgaccccatatttttttcacttacgtgtgggtcccacatatttatttatttttatttttttgttaactaggatgccacgtcagtaaaaccgggcaaaaattgagtcgatactgccatgggacctcctttgaacgatttgaataagtttaggggtaaacatttctggttttacaggtaaggaacctcaaaaaatctcgctgttaagttgagagatatccggtgaacttatt

SEQ ID NO: 21240 - DNA, 3182 bp, Oryza sativa
cgacaacatctcataggtaacgagacgatcaaccaataactggccttcctgactaggggaccatctgggttgatcgcgacattccagggatatgagatcaatgggtacacattctacacgagaacccaagacataaagagcacgaaccaaaatagcgttgttcgtatcgatgccatgggacacgatggaacaactggcacgtattacggtgccatcaaggacatatgggaacttgactatggtcctctcaaggtccctctgttccggtgccaatgggttaggttgactggtggaggcgtaatgattgatgacagtgggatgacaacggttgaccttaacaaggttggatactcggacgaaccttttgtccttgccaatgatgtaacgcaagtcttttacgtgaaggatatgtctagcaaaggaaagaagggcagagggcctgacgagccaaagcgtcacgtggttctcccaggcaaaagaaaaatcgtcggagttgaggacaagaccgacgaggattatgatcagttggatgggcaaccccctttcacggtgacgattgaccctagcatcctcctaccaaatgaagacaccccttactcacatatcgatcacaaggagggaacaatagtgaggagaaagtacgtgcggtcaaccgtcaccgccgatgtattgccgtaattattgtgtacacgatgtaaactattttggatgtattgattatccgtataaatcaattgttgtatggcatatgttaattacgtacgattattagaggttttaacaattttaaatcatgtaattgctagttatatgcgataattagaatttttaaaagttttaaatcatgcatgtggcatttacatatgttacttagagtttttaacaattttaaatcatgcatatgctagttatatgcgataattagaatttttaaaagttttaaatcatgcatgtggcatttacatatgatacttagagtttttaacaattttaaatcatgcatatgctagttatatgcgataattagaatttttaaaagttttaaatcatgcatgtggcatttacatatgttaattagagtttttaacaattaatttaatatcattcatatgctaattatatatgattattagaatttttattaattttaaatcatgcatgtcgtatgtatatacatatgttaattacaatttttaacaatttaatatcattcatatgctaagtatatatggttattagaatttttattaattttaaatcatatatttgcttattacgttttatccacttaatttactatagacaacaataatgtttcgaagtaattgtcattaatttttcgactttaaataattttaatgcattattttctattttagaaacacatatgtaatggaaattaatattcattgcgcttatcagtagtcccgtttcttaaccctaaccgggtttaaaaagaatttggaaatagcgggaaaatatctttagtccccgttgatgagaacaaccgagagtaaagatatctttactcccggtagttgagaacaacagggactaaagatctaggggtgtatatatattccagatgcgcaccctcgtcttctccaccaacacttagaagttttttccccgattgatctctctcggcttctccttcgccgccactccatagggcatccccgcaccgacgccgccgtcgtatctcgccgttgcttcgcgcgcgtcgtcatcgctgcctccgccgccgccgcatctctggggtgagagccgccgccgcctccctctctctctctctccgacctcgatctctctctctccccaaaccgccgccggccgcctcgttgccgacgccgccgccgacgtcgtcgcggccgaacacgactccgccgcgccgacgatgccgactctgacctcgatgcggccgccactagccacgacgtcgcgctggcagtgccgacgaagccgcgccaagccgcagccgcgccgccatgccgccgctccgctgccgccacgtgaacgaacgaagaatgatcgtgaacgaacgaaacgtacgtgaatgtgaatgaacaaacgaacgtgaacgaacatgaacgaacgaaacgtacgtgaacgagaacgtgaacgtgaacgaacgtgaacctaacgtgaacgtgaacttaacgttgtatgtgaacgtacgtaaacgaacgaacgtgcgtgaacgaaaagtgaagttaacaagaacgcgaacatgaacttaacgtacgttaacgtgaacgcacgtgaacgaatgaacgtaggtgaacgaaacgtgaacttatcgagaacgcgaacgtgaacgatcgtgaacgaaacgtgaacttaacgagaatgcgaacgtgaaatacaatatatgttactttgcgtttatcctaatacatcttatgttgcagaaaagacgttgtcgtcgtcgtccctcaagccggagtggtagctagccctcgaaggaattcgcgcaggcaagtgatgtaaatatatgattgttagatttttaatgcaagtaagactattagatttaatatacgacacttagacttagcatatatgattatctaggtttgtaatgtacgacacttagacgacttagcatatatgattacctagggtcctaatatacaacacttagacttagcatagtataagattattagatttgtaataagacgcatataagattgtttgagttagcatagttctaatacaagattatttgagttttaatataagattattagatttgtaattagacttagtatataattattgtctagggtcctaatatatgacacttagacttagcatagttgactattagagttttaatacaatattatttgagttttaatataagattattagagttttaatataagattattagatttgtgtaataagacttagtatataattattgtctagggtcctaatatacgacacttagacttagcatagttgactattagagttttaatacaatattatttgagttttaatataagattattagatttgtaataagacttagcatataagattgtgtagggctctaatatacgatagttagacttagcatatttgacttagcatatatgattgttagcatataagattattaaagcaaaaatgacctatagacttagcaactatttcttgtataacagggg

SEQ ID NO: 21241 - DNA, 509 bp, Oryza sativa
gtggagagggatgcggaggggaactaggaggggaacgtggagagggatgtggaggggaactaggaggaggaggctagtggaagtcaaccctccgctggacaaaagagggcacgcgggcaatgaggtgccgcgaagaagctagagggtcggcacatcataacggaagtggacgaagacggccgacctagtgccccggcggaagcagccaagaactacgtacgacacagcggttgggttgtgcgggataacgtgcctgtcagtacagtgtactggcgcagaacaagggcacacagagatcatgagagctttgtcccagattcggagaaagagatgctgtggaccacaatgctcgagacattcacccttcccgcgggtacagaggacaaagtgaaaaggtggactctaaagaaaatggcagaacagtttcagagcttcaagggagatctgtaccagaaatatatcctgaaggggcagacaccgaacttcgacacattcccaaagctaaggga

SEQ ID NO: 21242 - DNA, 1180 bp, Oryza sativa
atgccaagcaatgcttttgccgtgaatcactgattcacggggccatggcatgacaaccgaggttgattcagatttcagaatagctctggaatccccagaaattccttatttcaagagagagaagggtgtaatgtgctaaaatgctgtcacacgcgacactaatccttctggtattttaagcgtttattatgggcttcttataagaccaaaagaattatttgagagattaatgacatttagctctgcggtatcctgaattcctgatgaaatgatcactttaattctgtgtcgttttactctaaaaaatatgagtcgaatttgagagattcttgtagtacacaggctacacagcaaacacacagcagcgactcaaaccttcgggcccaagaatactggcccaataaataaggcctagttctatcgtttggtggcccacctcctcctccttccaaaccaacccaccatctcattccgcttctccctctcaaaaaaaaaaaaatcccattccgcttcgagaagcagaggaatcccgcacgcacagcgcatcgtctcgcctcctctcctcgccaccggcaagccgcgcctcccgcctctccaatggacgacgcgccatggcgcgaactcgacgccgacgtcctccgactcatccacagccacctcccgtgccacgtcgaccggcgccgcatgggccgagtctgccgcaactggcgcgtcgccgtcgcgccgcagcagccgccgccgccgccgctcccgtcgatcctcgtcccgcgcgccgacgtcgagccttccttcgcgtgcgccatcgccggctgcgccacccacgccttccgcctcccgctcccggccgacgcgcgcgccgcgcgctacttcggcgcctacgacggccggtggctgttcgtcgcgttcggccagaccaaggactacgcgctcctcagcctccgcacccaccaccgactccgcatcccctacccctacgtgtcctgggcgacggtggccgcgaccctctcttcgccgccggaaaacgaggactgcctcgcagccgccatctgccactactgccaggagaccggcccgcgagttcatagattctggcgcatgggccagcatcaggctgagttgatagtactaggatttctgttcctaccatcatgagtgcagcaaatctggaggatgtcataca

SEQ ID NO: 21243 - DNA, 932 bp, Oryza sativa
ccacttgtttacaagaaggtcgctggtatttcgcatccgaaagtactgagcaatacttacagagaaaagcggcttatgaacgacaatgtcgtgaacaacagagcgactggcgggtgctaactacggcactccctccatgggaagcccgtccaagatacaggtgtggtgatcgttgtcaggttcttcgttccataaatcctacaacattgggtcgaaggttctttgtttgtccaaatattcttgacgacgatttcatggtaagaatattttgattacatgattccttattttctcacaacatttactaactttgcttgctttacatctattctttcctcccaggaaccaccaaggagatgtcaatacagagaatggatagacaccagaagggttctaactccacctagccgtgttgtgcagcttgaactaccagagcaatacagggttactaaagcgcggtttgagagaggagagggatcctcacgtaggggttagctattatcggacaacttggcatattgaaatttctactgtcatgcttccttgtcccattattacatcgtcgttgtgttcaactattgcactacctccctcctagttcgaatctaatatcatctatgtaactgcaatgcaaatagttgtatcatgttcaaattgtactactatttcttcatgttacataattctccttgtttaagtccatataatgtttctatgacctagactgcgatatgcctatataaattatccgagtactaatacgtcgaataaggtacaaaataatacctcacttaacatatgaaattgcgcaacaaccaacttcaatacatttttataacaatattaacaagttttaccaataaatacttctttatttattattaacataacatagaaaaatcttttggccgtacttttttcatctgggtccc

SEQ ID NO: 21244 - DNA, 5206 bp, Oryza sativa
ccgtgccactccatcgccgcgcctcccattgcaagccgcgcgcgcgtgccgtggtggccgaccgcccggttgccgccgccgtcagcctctgcacgcgcctgtcgccagtgtcgccgctccgctccaaaccgccccgccgtcatcgccgtcgtcatcgcccggccccgccactccgcgcgcaagccgccaagggacggaggcagcatccctcctccctctgccgcgtcgcccccgctcacctcctcctttttcccgaatcggcaaaggggcaagccccctttctccccctccttttcccctttttcctcctcgccggcgtcatcctccctgttgccgccttggccgcgaccgccgagcgccagctcgcgcccttgaccgcgcaagtcggttcccaaaccgacattgccgcccatttaaaccccagcctcccctttcccttcctcttccattcgcctccgtgccattgccgccgctcccgtgctctgtctcgcctccgccgtccatcgccaagcgccgggagagccggtgcgttcgtggacgcggaaggggactccgggcgcgccctcttcttcctcttcctcggcccgaggccggagagatcactcccgcgccgtcggcctctcgtcaccgcgcccgtcccgcacggtagtgcctccctccgttcttcctcctcgctccatctcccctccttagctttcggtagtagctcgagtagcctccccgaagttagccggcgccgccccgaccgttgccgtcgctcgccgtgtgctcgccgccgtcgccgcccgagctcggaagcgccgctcgtcgccggcctcgctcggcgtagttccgcccaatccgacgctagcatcggattcccgtaaccgcgtagatgctctcgccgccgggaattagcccctagtgacctcgtcgccgttccccccttctcccgccgccggttgccgccgccgcaatccgccgccgtcgagcaacccccggcaaatccgagccgttggttcgtctcccctcatcacgaacaaccgcccggtgtgctagcttttgcccgtatcgccgtagttcgctccgccgctcgccgccgccgcccgctgtccattcgcggccgggtcgtcgtctacctctcgccggcccgcgtggcagccacgtaggcgccacatcggcgccagctcagcctaaaccgggtcgagccgaccccggtcagtccctccccgtgcgcgcgttccaccgcgagccgtgaggctgcgcgtgggcccgccgcacctgcgtccaccgcgaaccgcgtgcgtgcaccacgtccatcctccaccctagcgccgcgccgcgtgctccctccgcacggtgagccgagcagctgacaagcgggtcccacccgggaccgcgcgtggtgagcccggtccaccggactctctctctccttccaccgcgcgcgcgcgtcttgggccgccttgggccaccttcttgggccggccggcccgttaagctcagccgagccgccctttctctcgggccgcgccctaaccgcccgagggaagtctatattccctccctctccctttttcttttcttttcttttccaaaaaggatttaattaaatccttttcctttagaccaaaaatccaataatcttagaaattcaatatcttccccaccgtaaatccgtttgactccgttcaacttccaaaattccccaaatctcgagatctatctaatggcacgcttagaggtcattaatagggctttattttcgccgtttgttgagttgtcccgtttcgcgtgtagtttcggagcccgaagacccgcagtgcgaggatttcgaggatcaagctctggatctcgagcaaggcaagccacctttgaacatcttgagcctatacttgaaatttaattatattgcttgcaaaatattatgcattgataggatcacacttaatctgttgttccgtctgcaaggcagattggcggacctgcctaatttgttgcatttgatccttcctttgttaattgttataccatgtccccttgtaaccacccagttgcgcctcgatattcgtgcactctgtgcgagtatcgacggtcgccttcaaacttaaaatctgagaaacaacttgggtaaaacttgggttttacaaaagacttggaaaacccgacacctgggtcggtgcttgcgaactaaatgaatttctaaaaccgcggaccggggaacataccgggtgtacggttttcccgctcccgcacttaaggaccgattccttggaattacatccgaacataggacaagtgcgaccacatgggtggaatgggacacccctggctgagtaactagcttatcaggggagccatgatgccgagagacatgtggattcgccggggtggtgtcagagaggacccctgggcttcctggcacagtatggtctaggacctaacctgttgttggtctgggacccctctcgtcggcatatggtaagcctgtgtcggctttggaaatgccttgtcatgaaagcttggaggtctcccgacgtggctgatccccacgggctgggtgatccgggttagtaatatcgtgtgggtaaagtgtaccccctctgcagaggttaacaaactgttcgaacagccgtgcccacggtcatgggcggatgtgaggtgattcctagcgtagttttgtttgacaactgcttgtgaaattactgttgtgaaaaagggttcgatgtttggaaaatcagcagctgacgggatcagctaggcccgggtggccacttgaaaagttgttggcccgggtggccgtttgaaaaactgttggccgggtgccaaccttgttctaagatctaaagattgatacattgcacatactctgaccggacgggacgcactgtctcaaccgtgtcgtttgagaagcactcacctagatgtttttagaaaagagttcaaataaaatcaattacgaaaacaacagccttcccttgaagcctgcattaaacacttatttcccctggcttgctgagtactcccgtactcacccttgctctatataaataccccccagttgctgatgaagatgaagcggaccctgctgatgaggagttcttccaggagcaagccggttacgatgacttttagggtttcggcctagttcccaagtcgcgcctgtgttgtttggtccaagtcccggcttccgtttcccttttgtaatgcagttgtgagctcgggatctgtccacagcccaacatgactgtactcctactctataataaagagacctctgttgctgtgatattctatcctcctgtgataccagcactgtttcctgggactggtatcgattaacaggttaatttggagcgtcacgggctaattccagtcgggactagctcggggcgtgacatagagtatactcatgtctcttgttatatttttaatacaatgtaattattttaggtgtgtcgaccgagtttttctctcttttattaaaacaatgtattgtctttttcgtgctaaaaaattcctacaattttttaaatttgaaagtgtggacaaagagggcagctgggcctcacagttaaccacatttaagacgcacgcacagaaaagatcttcttcaacattgcatcatccaccctgtcgattgaatgctgaaaacaacaattccagcttgggcataattacaggatttcaaacttactttattaagtacattgttttgtaatggcaactaacccgatatgtacattggccgttgaaaaccacacatccacaaatctaataaaacgcaattaaacatcatcctgtcgtacattcagcgtgattataaaataatgcaaagaggctgatatttttaacctgatgatgatcagatcacattacgagcactgcatgaaccatcaaaaagatcatcttgaattagtcagggtatcagagaaagccaggttacggatggctatataggacaaattaacacggcgataattacatagtgcgacgcatgcttttgcacatgattctctaaagaagaagaagaaaaagaaatgctcagcgatgccatcggctaagctaataatatagttaatctaactaatttttggctaacactatagtctaattattaatcatgggtgatgtggtgtgactggaccagagcatttttgggtggcatcggaggtagatctttggggtggtagctgattgtaactagtaggtgtagtacatgttcgatcgatatctggacttgttttttttcagaggaaagaaagtgagatccagctaactagtattatagtacttttaaaagtattttttatatatatgctatcagtttgttagcttttgcttgttgctaaattaaattattgtagcctgtaatggggaaaattattagcatttatttacaggttgtttatttgtgcagatcaattggtgttcttgtcctgcagacagatcaaatgattttttttatgagagaataattgattagtttaatttgctacggcagatcttcctcttaagaaaaattgacctcattatcatttctttaatataagtcccataatacaatctttgaagaatcaatattactaactatataaccaatcattagatattctcttatcattagtgtatatgcagaaaaatgtacagattacctgctagctgaatagatggcaacgttatcagccgtatcaggcaaaaataattccatcatgggggtttgatgaattggtcaggaactttgaagggaatttagtatttttcctaaaccccaaatgaaagtgattaaatgatgttctaagtcaatttatcacgtccatatccaggactaaataaactgatcttgcaccgatgttccagagcattctccttacctgggctctgaaactctgaaggtagttgggatatttgccatgacttctgaccttctgtcctgttgatgttgccccggcccttccccgttagcttcttcgttttcgatgaagatgtaaacaagttggctgacttagcagttgacacaatcattaaccattaacctcttgttcttggctgctctctgaatggtatcaaaattttttagacggtttataactttatatgatgtcaatcacatggttcttgaaaaccagcggttaccggccggtaaccgtccggagttgacgatcagttcgagcaagtgaccaaaaggatatggttgtttttaaaattgaattaagaactattttgt

SEQ ID NO: 21245 - DNA, 963 bp, Oryza sativa
gcagcgtcaagaccatggcgcacgtcgcgccctgcggcgtcgccctcggcgccggcggcggcggtggctacgagatcgaaggctcgtacctgcggcggagctgcgcggtgtacgacgcgcggcggcgcgcggtggtggcggaggtgcaggcgaaggaggcggtggggacggacgtgttccggctggtggtgcggccggggatggaggtgtcggtggccatggccgtcgtgctggcgctggagcagatgttcggcaagccctccctgctcaggagctggtcctcctaataattagcctgtttctttctttctctttttttttcttttttttttggccttgaatttccaacattgtttgggcctgagagcagaagagttgctcttggctgcctctttctctctgatcctgaaatgaaacctcaaattgggtgtcactgtacactgaaaagaaaatccctcttggtgagtatggttttgggtcttttttttagcagaaaaccagagggatgaaagtgtaaatatttctaagaagaagaagaagaaaagggggttaattaaagcaggaaattcttccctgtctatctttctcctccatttcttgttctaagctaccagccttccactgttgcgaggcaaaattcccccccccccccaattaatactagaattaactaacaatatattgtacaaattcatccaagatccacatgcccaaaacatggaaaccattttaatcgctactactatgtactccctccgtctaaaaaaaaactcaacctaagaggagttcggggttccttctagtacaataaatctggactatttttatccagatttattgtcttaggagggagatttctcttaggttgaagttttttttggacggaaggagtacatttctgcatcttcttcacacagcgtctgaaaccacaaactgcatgtctgaattgtgaacatcaaaact

SEQ ID NO: 21246 - DNA, 8345 bp, Oryza sativa
ttagtcattagcatcaccctacaaggattaatcgcgcacgaaaaacgagacaagtcattagcacataattaattgaatcgtaattattaaaagtttgaaaaatggatttatttgttttttatagcaacttatatatagaaaattttcgtacgaagcacactactttttaacagtttgagaagcgtgctaacgagtaccgaagaaaaaaaaatctttatcttgttagagtttagaaggagaccagcttttggactgaacggtttgcatcttgctcttgcgagcacgcagcaaccacgggcgcgttagtgcgttacgttggtacgctgcgtacgcacgtacgctaggagcaaacacggcgccggtattgccacagtgggggcagtggtgggctggtggccacttgttgctgctcgcggtcacggatcgcggcgaggctgggtctgttcgtggatatttagattttgagaagtggcgtgtgggaatttaaattgtgagaatatacaaaaaaaatcagttccatggactctgtaactatatcttctctgaacgaaaaaccgatttgtttaggagaaacttttgattctggagaagatgtaactgtctgaagctatcctaaacaaaccgatatctattttgggacgcggaatattttatcgattttctcgtggaatttcatatggaattcctacggttttttgagatgcatgtgttcattttcactcctatgaatctatgatcaactattaatcacttctgcttgctgaattattgcagtctgcggcaggataattaatggtttacgtcttcctgcactgtggttcagaatctagcttggtggcgatatcgtccccaagtcccatcactctaccaccaaaatgctgctacaattttgaagcattagaaattagttcaagatctacaagtttcagacttgaacttggcgtcagcaatttcttgtcacgcatgggcctagtttaggagagtaagcgggccgacatgataatgtttcatgggctgatctaaatgggcctacaggacccatagaagaacgggcctgaagaattgtttaggcagagaactgtcggtcgaaaatacagtaaaggcttcgcttttctagtcccaaataccctgttctgcgattgctagaattgtgaccttaatagcctataaattctattcgcgatagcactcgtaattccatctaataacaatttcgtaccgttagaaaacaatttcgtacccttaaaaaacatttcataccaaataggcagatccgctgatgctacaagttcaggaaaatggatggcgaatgcagattgcagataaacaatgtttggagggacgtctctccctccaaatctcagcgttcccggataaacatcctcttcgtgtctcaacatttactctcatttccccctttctttagagcagaaaaccatctgattactagtgaacaggttaacatggtgcttgtcaaaaggctgtgctactgaaaattgctgagcacttcagattagtaactaataaccatatcttgaccgtttagccggttcatctgctactgaaatatactcaatattctacaccatgcacataataggggaaaatcagggcagaataaattaagtggcatcaatagtagtcctacagaagaacaaacaacacaggacgaattatttactgtacgtttaaacttttttgtcacctttcaaccgatcagacaataacaagtatgaagaaagaaataaaaaatcatgtgcatctttcacagctagctgaaaagcctgaaaatgatgcgcagtgttatctcatctaagtttaaataaaccgagagcttgacatgccagattatgaaaatgcgaagaatactagaaatcagttatgatactatgtagcagcaactagaatcctgcttagatcgtcagaagagatgcagtagcttaccccagccccatcttggacagtcaacaagcaactgaagcagacaacattcagttgcttgttgacaattcactgtcattcttaaatccatttgatgcagagaatacttaattcttactgctaattaagcacattatgcactaatgcaatccaaatcatggctcatgggtcttggatctcgtaggcttatcaaactaactgttccagatgcttaacagtccgattctaaccgagttaacactagtaatcaagcgaccaaccatgaaccatctcatgaacaattgaccaactattagacaaaatggtgctacaagttcagaaaaatgaatatgcagagaaacatcctctccgtgaatttaacaaatttaccactcattctgccctgtttgcagagcagaatatcctctaatcaatccttagtttgtacaaattgtcctctaatcagtactagtgaacatattaacaaaagcctgttatctctaaatgattttggcgaccaagaagccctctgctactaaattgtactcaacattctacatcatgcacacaatctaggaataaatcgtggcacagaaagtaaattcagcaccatcagtagtagcaatctatagaagaacaaatgacattcagacgatcatacaacatcgcatgatgaaagaaaacataaacgacctgcatctttcacatctagctgaaagcctgaaactgatctgtgaacagttaacaaactgaaatttggcttcggagaagaaattcagctacattgcaaatccatttcatgcaaagaattcttctatcaagaaaattaagcacggataattgggcacattttctcattgcattattattaactgcataaacaatgatgcatagactcaatccaagtactgaaagccaaaacgttgctgcattcatacaaatcatcagaccagagtccagagatcacatcacatgcattgcgttcatgcaagtctgactcagcaaggagaattatactgattgatcgagaattatcataccggatcaggaagactacatcatccacccaaacaagaggagaaggacatctcgaacaaatcaatagcgaatcatacctgtaccaggacgatcaaaactaacatgagcaatctcaggggagaagccacgccggcggtgagtagtccgacgggccttgctccggcaagaacttgtccacacgcggaacccccgccgcatccgccgccggtagccacttgccggtgtctctgcaggggtatttccccgcgacggcgcgagaagcgaacactgtcgactcgcggtagagcctcccgtcatccaggaagtagacgccctcgccgaactcgtcgcccggatagtcacccgcgtcgtacgatctggagcagcctcgcgcgacgaacagcatccgctcacccagcgactccagctccttccagccgtgcagggccttgttccgcttcctcggcggcggctgcaccatctcgaacaccttgaacgccgatgtcgtcggcggcgcggcaagaggagcaggaacgcgcctgaccaccatgaggagattgccgcgggactccaccaggtagcgagcaacgacgtctccgccataatcgcgccggccacgccagaagcgaagaatcaccctgggcgccatcttcatgttgccgtcgccgtcttcatggaaatcccgtgctgtgaaaacatggaggtcttcttctgcggtgaggaaaaggaaggctcccttgtggtgtatgacatcctccagagctggctcgtcgatggcactagggccatgccccatcgccgcaacctgatcctgggaagcatttgctgactgaacgcgccagaatgcgtgagtgcgtcgagcagcctggaagggccagtaggtgatgatggcggcggcgacgcaatcctcgtcctccggtggcgaagagagcgtcgcggcgagcatgatcacaccagtgttagggacagggccgtctggccgccccaattcagcagccgtcttgtccgggcggacaaaaaaggggaggttgaagcgcagctgatggtcgcggaggctgaggagcgtgttgcggcaggtctcgccgaggaagatccagccgccgtcgtaggcgccgaagcagcgcgcggcgcgcgcgccgtccgggacgccgaggccgtgcccgccgcagccgcggagggcgcacgagaaggaagggccgtcggcgcgcgggacgaggatccacgggagcgggcggagatgcggcgcgttctgcagcggcttgacggcggcgcgccagtcgtggcagacgcgggccatggtgcggcggtcgacgaggcacgtgaggcggttgtggacgaggcggagggcttccgccatgaagtcgcgcgcgggcgccgccgcgtccatgggagaggcggaggcggaggcgggggcgggggcgaggcgtggaggtggcggtggcgagggttgggcggcggcggaggaggtggaacgcgacgaggacgcttcgtcgttgtgcgccatgtttgaacttggcttctggaagcaggggaagagaggggaacagagtggattggtttggaagaagaagcagagaaggccagccttttgccagccgagcaagtggttgggcccaatttatagtgccggttttcttgggcctgaagtttggatcgctgctctttgctgagcgtttcttcttgggcctaaatgttttttttttttgagaacgtaaagttcggatgtacatatggtgcagaatcgtgtctagcagacaggagaaacaaatgggagcagggaaggttaacccttttttttttttttgagaaaaggcattcaagcaggttaacagttcagatggacagatggttattatcctacaggaaaaaaaaagagaaaaaaaagatagaaaaagttattggtccaatgaggtcatcatctttagtaacataggcacacatgttttctgtaggcgatatggttaatcttttcattagtgctgaactgaaggatgctcagttcacagctcgtcctttacagagagaaggggatgaggaaatgttgatacatacacaggatgcttatctctgaattccttgttcactttttctgaacttgtgcatcagtctgatggtacaacaaaaacactagattagacgctcgccaagccgtgcttttgccgaaaatatacagacatggcacccatccgacctcaaaacaaaaatatgcatggcagagctggcatcacaaacgaactcccagtttgaattttaaattcccggaaggtcacttatgaaaaagaaaaagtaaagccttcataaattttagcccatttatccgcctcaagatttggggcccaagaaagctggccctataaatgaggcccagtcccccatcccccttccaaaccaagcacatctcctccttcttccagaagcagaggaatccatcggttccattcctcctcctcgcctcgccaccggcaagccgcgcctccgcctctccaatggactcgccatggcgcgacctcgacgccgacgtgctcggattcatcctcaagcgtctcccgtgcctcgtcgaccggcgccgcatggcccgagtctgccgcaactggcgcgtcgccgtcaagcctgagcagccgcggccggggacgaggccgctcccatcgatcctcgtcccgcgcgccgacgggccttccttcgcgtgcgccctcgccggctgcgccacccacgccttccgccccccgctcccggccgacgcacgcaccgcgcgctacttcggcgcctacgacggtggctgggtcttcgtcgccttcggccaaatcctggactacgcgctactcagcctccgcaacggcacgcgattccacttccccgacacgggcacggacatggtggccgcgaccctctcttcgccaccggatgtacgatccacgcgttcatgtacgatccacgcgtgatgtacgatccacgcgttcatgtgttctggcgcatggagcatcaagttgtggagaaggcgactgctgttgagttcgtcaccacgtcagttctggaggatgtcatacaccacaagggaagcttccatttcctcaccagggaagaaaacctccatgtttttcctgtagcgggcttccacgaagacgacgacggcaatctggagataccgcccatggtggttcgccgcttctcgcgtggtgggcgagattacggcggagccatcgctgttcgttacctggtggagtccggcgagaatctcctcatggtcgtcaggctcgttcctcatcctccccaactgccgccggggacatgggcgttcaaggtgttcgagatggtgcatgagacgcccatcaacaacgacggggcaccatacgcttggaaggagctggaatcgctgggtgggcggatgttgttcgtcgcgcgaggctgctccagatcgtacgacgcggacaagtatccgggcgccgagttcaacgagggcgtctacttcctggatgacgggagactctacgatgaggcgttccaaatcttgaatccctttgcccagttcccctgcagcgacaacggcaagtggctgccgccggcggcggcggcggcggcggaggcggttaccggccgcgtggacaagctcttgccggagcaaggcccgtcgtactacacgccgccggtttggattctgccgtgagactgccatgttcttagttagattgtctgatgacttgttgtcgtgttgatatggtttgttgatttgtgcaatcgatgatgtgttctcgagatccatgtgtgcttgcaattgcttgatccatcatagcatctcttcagtactctgctattttcaccatgttagactaatgcagaaattgttggttctcatgactcagattgcattaattagtgaatcattatattgcaacgaacaatgattcagtgtgggggatcctgttcatgccaatttttcaggctaatcctcctcttccctcgccgaaagtcgcttaatcagcatccacagtgacagttatgctgaatcagcttgattcatgtcgaatttcccatgggtcaataacttgagactcgtattattttaattttctggagtctgtgagttcttatcactttttgtttattgagttccagactgaacagtaaagaatctgcaagtgatacatcgaagtcgtagtgaactgccaaaattttctcgtggttattgctggtgattaaccaaccaaccatctaaattttaccaacattttcttaccatcattcacaagatcctgagtgcaaattcagaaaaatgaacgggcaatgcagagataattatcctcctctccgcgtgtcaactttttctctcatttgatccactcttctgtagagcagggagggcagaagaacatcataatctgatcagtagttcagtactagtgaacagaataccatgacgcctaacatcaggctgtgttactgaagtaatgcctaaatgctgataactttgggtgaataaccatctgttaactgtttaaccattcttcacaacgttctaccttatgcaccgtcccgtactgccgaagcgccgccgccgtccgagaagggagaggcggtgtagcgaaaagaggggggggggggggaagggacgcggacgacgacgacgacatggagatggcgcggagctggaggggattgcctgcacgccgccgccgccgatccggtggggaagagaaaagtgagagaagggagagagagagagagggggaggaataaaggatgatatgtgggccccacatgtcagtaggtctcacatatatttttttaaaattttaatgctatataagcgtcacgtggcatgaagaccagatcaacacccccacgacaacaaaaccacccttcaaaattgctagagaattcaaattacactggtttcaatagttcggtcttacccgatattttagttaagggtcacgaattagatttgatgaacagttaaggaagttaaagtggatttttttccgaaggtaaaatgtctttctacatttgagcccattaatcttcctcacggggaagatgcacttgggggcttggggcccaagaaagctagccctataaatgaggcccagtctgatcgcatgctggcccacccaccctcttcttccaaaccaagccgtcatctccacccgcttccagaaggaattttttcgtttttagatttttttttaatatttacagaaataatctatcgaccaaaaaaattgcagaaatagcccctgccgcccaaatggtgggcggcaagctgacgtagcagacggtgggtcgaccgcgccgtctgccgccgtcggccaaaattgcgattaggcccttgccgcccatacagagggcggcaaggggctaattgtaattttggccgcccattcagagcttgcggccatactttttcatctggg

SEQ ID NO: 21247 - DNA, 30987 bp, Oryza sativa
aagcgccttcctcgaatatcaggattcctcgaagccattagttggcatcgatcaccgcataggcagagaggacgctggcaccaaggtggtagtaggtatacacaaggatcgctacgccagtttggatcctcaacaccccggcgtctagccattgacgaaagccggtcggatttgtaatgaagcaagtggggaagagagtactgaatgtgactgagttctgaaagattgtgagggctcactctcaacaaaagcaaatgccaaaggcaatacctgattgttcccatctacccctattgctgttagtatctggccccgatactttcctgtcaagaatgtcccatcaatgcagagaacaggacgacagttcacgaatgccatcttgcatgcatgtagagctaagaacgccctttgcagcacactcttgccaggatgttcaattgaggggaatttcttcacttcgtaagagctcccagggtttctttcctcgataacaccaagcaggcgtggcaaattatcatacgaggcttcgtaagttccaaatctcatctctattattttctgtttggccctccaggccttggcatagctaatagtatacttgtatgtctcttcaatgtgtcggattattgaccttggttcatatgtgagattatcgatgacatgcgcatacatctcagatgcaacaaatgcacatgtaatgttcatgtggtatttctgaacactaggtagaaaacatgtatgcttggtaacaactgacactgtccaataatccttccatttccccttatacgcgtgcactctccagggacaaccatctttttccttaacacaccgaacttcatattgcgaccggttcgacttggcaacccaaaactctctatgaagtgacactgcaaaatgttttaccgcctccttcatatcttctgctctactataaatcgctccctgaataacctcattttctttgtactcccatctcacactatcctcttcagagacgatcagcctagaaaaatcctcactagcccattctgctggattaatatccgtctcatcatctgacgaatcaacttcctctacacgctcgttgtcagaatcctccctctccatttcatccacaatggcaccgacagtctccccctcgtcagccactccacctggttgaatgcccactggagctactacgcccccgtcctctcgtgcgttgacctcctccacagaagtctcgtttacttcagcacttggtccctcgccatcatccatgttcgtctgcacacctggatccttcgggtgaacaaacggaaccaaagctagaggccacccgcgttgcaatgcattttccaaataccatctccacactcgagagttttgaactggcattagttcccaataaaaaccctcagttgcccgacttactataacattgattgttatgtcacttgtctgtggatcaactctcaagcccctcattaaccatccttttatagaaggtacactcctctcagccggtctctcaattcccctttctgatacaataaaatctgacagatctaccccagttggcccgtaacggacgtttcctggtccatggtaaacttggaatatttgtttgttcgacatatctgtcaacgaaataactagatcatattactctttcatgcaataaacatctacaacgtaatatcttcttgtgtaagccaatgcaacggtaatgtattaattccaaactagcagatctacgtagttaccgatatctacaatacgcacttctagattagtacaactaaaaccctaaaaatataatgcatttattcaaacaaatttttaaagaatacacactatttaactcaatagtcacatataggatctatgaatattacctgaaatcggcgtctgaatccggcagggcttcgccccttcttctcttctcctcccctctcttctttttttttcactggaattgaggagagaagaatgagggctgggggctgggcagcaggccttttataggcagcgaggcctgccgcccggccagagggcggcaaggggccgcctgcaaaatagccggccccgactggcttttttgcattcgggccccttgccgccccaccagagggcggcaagggttttcctgcaaaaaaccctccctccgtcaccgtccgttcctcccccgtttgccacgtcagcttgccgccccagaggtgggcggcaggggctatttctgcaatttttttggtcgatagattatttctgtaaatatttaaaaaaaaatctaaatccgaaaaaaattccttccagaagcagaggaacccattccccacacacacacacctcgccaccggcaagccgcgcctccgcctctcgagccctctccaatggacgcgccatggttctacctcaacgccgacgtcctccgcctcgtccacaagcgcctcccgtgcctcgtcgaccgccgccgcatggcccgagtctgccacaactggcgcgtcgccgtcgcgccgcagccgcagccgccgccggggacgaggccgctcccgtcgatactcgtccggcgcgcatacaggacgtccttcgcgtgcgccctagccggctgcgccacccacggcttcggccacccgctcccggccgacgcacgcgccgcgcgctacttcggcgcctacgacggtggctgggtcttcgtctgcttctaccgcaccctggactatgcgctcctcagcctccgcggcgacgagaaattacccctcgctgacgtcgagacgctcacggacatggtggccgcgacgctctcttcgccaccggacgacgaacactgcctcgctgccgccatcggccacagctgcgtgatgtacgatccacgcgttcatgtgttctggcgcatggagcatcaagttgaggagaaggcgactgctgttgagtccgtcaccacgtcagttctggaggatgtcatacaccacaagaaagccttccatttcctcacgaaagaagaaaacctccatgttttttcggtaccgggcttccacgaagacgacgacggcaatctggagataccggccaaggaggttcgccgcttctcgcgtggtgggcgagattacggcggaggcttcgctgttcgttacctggtggagtccggcgagagtctcctcatggtcgtcaggctcgttcctcatcctcccctctttccgccgacgacatgggcgttcaaggtgttcgagatggtggagacgccgctggggactcccatcaacaacgacgaggcaccatacgcttggaaggagctggaatcgctgggtgggcggatgctgttcgtctcgcgaggctgctccagatcgtacgatgcgaacaagtatccgggcgatgagttcaaggagggcgtctacttcctggatgacgggagactctacgatgaggcgtcccaattcgtgaatccccttccccagtacccctgcagcgacaacggcaagtggctgccgccgccgccggcggcggcggcggaggcggttaccggccgcgtggacaagctcttgccggagcaaggcccgtcgtactacacgtcgccggtttggattctgccgtgagactgccatgttcttagttagatcgtctgatgacttgttgtcgtgctgatatggtggttgttgatttgtccagttaatcgatgatgtgttctcgagatccatgtgtacctgcaattgcttgatccatcataacatctcttcagtactctgctattttcaccatgttagactaatgcagaaattgttggttctcatgactcagattgcattaattgcatcattatattgcaacgaacaatgattcagtctgggggattgcatcattatcctgttcatgctaatttttcaatttttcaggctaatcctcctcttccctcttcgaaagtcgcttaatcagcatggcatctaccgtgacagttatgctcaatcagcttgattcatgtcgaatttcccatggaccaataacttgagacccgtgttattttaattttccggagtctgtgagttcttatgactttttgtttattgagttccagactgaacagtaaagaatctgcaagtgatgcatcaaagtcgtagtgaactgccaaaattttctcgtggttaatgctggtgattaaccaaccaaccatctaaattgtaccaacaatttcttaccatcaatcacaagatcctgcatgcaaattcagaaaaatgaacgggcaatgcagagataatcatcctcctctccgcgtgtcaactttttctctcatttaatccagtcttctgtagagcagggagggcagaagaacatcatcatctgatcagtagttcagtactagtgaacagattaccatgacgcctaacatcaggctgtgttactgaagtaatgcctaaatgctgataactttggattaataaccatctgttaactgtttaaccattcttctgctactaaaacatacacaacgttctaccttatgcacagaataaaggaatacattgtggtgcagtaaataaattcagtagaatcaatagtactccactaagattcagacgattatacaacaacagaaccgagcaactagtatcaagaacaaacaggtaaactatcggcatctttcacagctagctgaaaccgatgtgtatcagtaatttggtaaacttaacatgctacattatgagttaggaaaatatgtagcagccatcgaaaattctgctaaaatccactgaagagtggcactacctcagcccatcctggactgtcagcaagcaactgaaattcagctaacttatgaacaagtgaatagttaattcagttaggaacatgtgtagcagccattgaaaattcagccaagtccatcttgcactgtcagcaagcaactgaaagcaggctgcagaagcaaattcagcttcactgtaaaatacatttgatgcaaaacatgcttctatcctgaaaaataagcactgaaaattacacattgcaatcttaccgactaatgaaatccaagccaagaatggcaaccattgtaattcatgtagaattcatcagatcacatattcatgctgagttgaatatactgcattcattattcatgtaattctggcttgcatactctttctgatagaagaggagaatttaccaagtacaatctccactgctccagcattgtagcagctgtaccaatccacgattatgacatcaaatctggactgaaactacactaatcgatcgcagcaagaggagacgggacagagtacaacggctgcaagctaaaccacatctcgggggatcgaatcgacagcaagcaaaaacctgtagctcgacggcaatctcaggggagaagccacgccggcggcgagtagctcgacggggcttgctccggcaagaactcgaccactcggggattcgcctccgccgctggcaaccacttgccggtgtctctgcagggatactcccggaaatcgggctcaccgagcatcaactcctcgtcgtagagtctcccgtcatccaggaagtagacgccctcgctgaactcggagcccggattgttgttcgcgtcgtacgatctggagcagcctcgcgcgacgaacagcatccgcccacccagcgattccagctcgttccaggcgtatggtgcctcgtcgttgttgatgggagtccccagcggcggctccaccatctcgaacaccttgaacgccgacgtcctcggcggcaattggggaggatggggaacgagcctgacgaccatgaggagattctcgccggactccaccaggtagcgaacagcgttgttttggccgtaatctcgcccgccacgcgagaagcgatgaacctccacgggcggtatctccagattgccctcgtcgtcttcgcggaagcccgctaccggaaaaacatggaggttttcttctctcgtgaggaaatggaaggcgtcgtcgtggtgtacgacatcctccagagcgtggccgctgatgacctttgcaggtttcgccgccttctccggcgcagccgcagattgacgccgcatgggccagaacgcgtgagtgcgtagatcgtcaatcaggaaggagaggttgatggcggcggcgaggcagcgttcgtcgtccggcggtgaggagagggtggcggccaccacggccatgccgatgtcggggatgtggagccggtcgccgtcgcggaggctgaggagcgcgtagcccacggtgtggccgaaggcgacgaacgcccagccgccgtcgtaggcgccgaagtagcgcgcggcgcgcgcgtcgtccttgagcgggtgggcgaagccgtgggtggcgcagcagccggcgagggcgcacgcgaaggacgggccgtccgcgcgcggcacgaggatcgacgggagcttgctgcgctgcctctccgcgacggcgaggtgccaactgtggcagacccggcccatgcggcggcggtcgacgaggcacggcaggcggctgtggatgaggcggatcacgtcgtggtggagcgactccattggagaggaagcgaagcgaggtgaggcgaggcgatcgattgcgacgatgtggctgcgtgggattgattgctctgtttctcgaagcgggaggtgggagatgggtggctttggtttggaagaggcagggggttgggctggggaacgaagctatcagactgggcattatttattgggccagttttcgtgggccccacggttttactttttcactgggccaatagggccagcctgctcgatatttcaaaacccatattccaatgtactcgtatcataatctctcaaattcaacacgcattttttcggagtaaaacgaaacagaaatactgaaatagggtgaccattgctattctgcatcaaccgggtgaacacaaattattcagaatcaaaatttcaaaactcaagcagggagatgggtgtcaatgtgtcattctcggcaaaagcattgcttggcgttttaccatataggtactgagaaaggggaaacaaccgtctgaagaacttttttttggtggtaccactaccatcagactatgctacaatttcagaatgaccaaatgagcaaccaatttttcctgtagagcagatgaccaaatgagcagaacatcctctgttcagtagcagtgaactgattaatgaaacagttatcaacatacatgtatctgtgtggtactatactgatagtaccactgaatttgtttttcccgtgccacgatctattcctacagaagaacaaataacacaaggtagattatttactaccccgatgcaactgatcataaagcaactaactagtcctatgaagaaagcaaagataaacgatctacttcttatacggaaactgaaaatccgtttgatccgaagcactgctgcaaatatgcaatctaagccattaacaccaaccattttctggacagcaactgaaatcatgaagtgaagtattgaagagatgttatggcagatcaaacaattgcaagtacactgcacacatggacgaaacatcacagactgaagtaaccggacaatcaacaactgtcatatctgaagttcagaactggctcaaagaaaaaagttgctatgaaacaactagtatgaagaaagagaagagaaacaatctgcatgtttcccagcagcaatttgagaagcccattaaaaattcagctaacttatggaaaagtgaatagataataaagttatgaaatgtgtgggagccattgaaaattcagctaactccatcttggactgctagcaagcaactgaaagcagggtgcagaagcaaattcagcttcactgtaaaatccatttgatgcaaaacatgcttctatcaggaaaaataagcactgaaaattacacattccattactattgactgcaatatcattgctgcatagatgtaattcatcagaccacactgcatttctgctacaaaaggagaatttactaggtagctccagcatagtagcaactgtaccaaccgacaattatcacaccaatcttgacggaaacatcaaactgttgactgaaactacactatagcacatttcagacaggtgaaactaacatgagcactctcaggggagaagccaagccagcggtgagtagttcaacgggccttgctccggcaagaacttgtccatgctgctacccgccgccgccgccgtccacttgccgttgtctctgcaggggtattctggggaatcgggagccaagaacgataacccctcacggtagagtctcccatcatccaagaagtagacgccctcgttgaactcagcgtccgggtagttgttcttgctgtacgatctggagcagcctcgcgcgacgaacagcatccgcccacccagcgattccagctccttccaagcgaatgcgggctccttgtcgtggatgggagtcctcgtcggtggctccaccatctcgaacaccttgaacgccgacgtcctcgtcggcaagagaagaggatcggtgacgagcctgacgaccatgaggagattcccgccggactccacgaggtagcgaacagcgacggctccgccgtaatctcgcccgccacgcgagaagcgatgaacctccacgggcggtatctcaagattgccgttgacgtcttcgtggaagcccgctacaggaaaaacatggaggttttcttctcttgtgaggaatttgaaggctttgttgtggtgtatgacatcctccagaactgacgtggtgacgaactcagcaggatcatgagtcgcctcctccgcaactcgatgcctcaggatcccgaatgcatggattcgtggattgtccatcatgcaggaatggctgatggcggcggcgacgcagcgttcgtcgcccggaggcgaagagagggtcgcggccaccatgcccatgctcatgtcggggacgtggaatcgcgtgccgttgcggaggctgagtagcgcgtactccagaattcggccgaaggcgacgaagacccagccaccgtcgtaggcgccgaagtagcgcgcagcgcgtgcttcggccgggagcgggtggccgaagccgtgggtggcgcagccggcgagggcgcacgcgaaggaaggcccgtcggcgcgcgggacgaggatcgacgggagcggcctcgtccccggcggcggctgcggctgcggctgcggcttgacggcgacgcgccagttgtggcagactcgggccatgcggcggcggtcgacgaggcacgggaggcgcttgtggacgaggcggaggacgtcggcgttgaggttgaaccatggcgcgtccattggagagggcgagaggcggaggcgcggcttgccggtggcgaggtgtgtgtgggattgattcctctgcttctggaagcgggtggagatgacggcttcgtttggaagaagaaggtgggtgggccagcacgcgatcagtttggacctcttttatagggctagctttcttgggccccaagtgtatctccctcgtgaggcagattaatgggctcaaatgtataatgggcctcatttattctctatgggcttttagatggccttttatgtagcccacgaggccatgaacgcccaatgcgagaaggatcagacgatcagtatcatgtcctcctagtctcctactgatgtgtgcaatttttcctactctgaatcagcctcgtctaagataatttttctcgtctaagataattcctaatcctaataaaaaatttcaaaactaaaacaggggagtcggttgtgacgccaactcgtcatgcctagtgttttgaggtcggatgggtgccatgtctagtgttttgtgtagcacttttttaacgaaccggcacttttgagtagcattgaaaggaaacatattgaatgatgttgaaataagaaactatgcgaagtaaaatatagaaaagactcctaactaaatacaaagtaattatattgagaggagaaagtaattttctttatttggaagtaatcactataaatattttgtaaagagtaatttagcgtcatatagaaaataactctttaggtattcaaagtaattacacacttggaagaaaataatctttttataaaaagaatagaagtaactttttatggtgttagatgtaagtacacttctagagggaagtaaaactgataagatagaagtactttttatgggattagaaaaaactttgaagaaatagaagtagcttttaacattactagagtaactatattgctagaaaaaaaagcaagtctggagaaatagaagttactcttcacggtattagaagtaactcagtgctagaggaaagtaactctaaaaacaaaataaaagcaaatatttaccccacgttactagaaataactatattgctgtaagaaagtaacttttcatggtatctaaagtaactacactgctataagagctaagaacaagaatacaattttaaaataatttaaatatattaaatattggacttgttttatcacatattttgagcggagtacaataggtcaaacggatgttaaaaataatatatctctatctctactattataaaaattgaagatgtttttaccggtattttggtaagtcatccgtatttgaatcggttattaagttcgttctattttggaaatacatatccatgtttgagtcggattttaagtctgtttgctttagaaaatacaaaagaagtcatataaaaaatttctttaaaaaaacttgtatggtcacttgagagtaaagttggactcctaattataactcatgattttctaaaaaaatattcaagcgaattcacacagtgaatttcatcccatgtaaatcgtataacaataataggattaaaataacattcacctgttgcaatgttgcaacgcacatgcattttttctagtaatttaaaagatataagtggagaagaacagcaaattaatagttatgaacttaatatgtagcatccgcttaaatggatcctgagaattgaagcaactgaaaccaatctcaagaagcaattcatcgatcttcactgcaaatcggttttgatgcaatgcaatgcattcttttaacagaaaaaacgctaagtaatgttgagtaaacacatcgcagaaaatgcattactaactacaacacgacgatgatccactaagcatgtgtttggtgtcgggactagatgggatgggatgaaaccattcatccctaattttggggttgggatgattccactcacatgtttggtttgtaggatgggacaatcccaatttttttgtttggttgaagggatgagggagaaatgggatggacgctgtttgccatcaccgtcaacgaccgttgactgcgccacctgcatccacgcgtggaacaaccggatcaagcacaacggcagcagcaagacggccaccaccgccggagcacccaacccgctggcccaccgtcgtcaccgcggctggatcgggagatcccctgcgccagatccgccgccaccgctctccctaccttcaagtttcgccgccgccgagtccccctcctctggatctgccgccgccgccctccctacctccaagcttcgccgccactcgagcccgccgcgtcgacatcaccgcagccgctctcgtcgagcatcgcgatgagtggcgggatggtgccgagcatctcgctcgtggcggcgaccagtgttgaggcagggggtcgtggaggagcgtcggcggtcgtggaggagcgtcggcggtcgtggaggtggtggcaggcggtcgtggcggagcgccggcggtcgccgaggagacactgtgtgctccgtccaagtgggacgagctcgtccggccaattttgccggatgggtttgtcccggatctgggaggaatattcctctctagagaccaacccattccactcgcccctcaacaaaacacctctaaaagtaagttcgtcccatcccgtcccatcccatcctattccaccaaccaaacattacctaatgcaatcgaactatcgaagacatgaacaccaaccaccatgaggctggccttctctgactctgcctcttcttccaaaccaagccactctgtgtctcttctcttcccctgcttccacaagccaagttcaaacatggcgcacacgattctgcaccatgtacatccaaactttacgttctaaaaaaaaaggggaacatttaggcccaagaagaaacgctcagcaaagagcagcgatccaaacttcaggcccaagaaaaccggcactataaattgggcccaaccactttctcggctggcaaaaggcttggccttctctgcttcttccaaacctcccattcactctgttcccctctcttcccctgcttccagaagccaagttcaaacatggcgcacaacgacgaagcgtcctcgtcgcgttccaccacctcctccgccgcccaaccctcgccaccatcacgcctcgcccccgcctccgccttcgcctctcccatggacgcggcggcgcccgcgcgtgacttcatggcggaagccctccgcctcgtccacaaccgcctcacgtgcctcgtcgaccgccgcaccatggcccgcgtctgccacgactggcgcgtcgccgtcaagccgctgcagcacgcgccgcatcgccgcccgctcccgtggatcctcgtcccgcgcgccgacggcccttccttctcgtgcgccctccgcggctgcggcggacacggcctcggcgtcccgcacgacgcccgcgccgcgcgctgcttcggcgcctacgacggtggctggctcttcctcgccttccgcgagaccttccgccacaagctcctcagcctccgcgacgttcagctgcgcctccgcctccccttctttgtccgcccggacatgacggctgctgaattggggcggcctgtcccttacattggtatggtcatgctcgccgcgaccctctcttcgccaccggaggacgaggattgcgtcggcgccgccatcatcacctacgggccctacgaggctggtcgacgcactcacgcattctggcgcgtgcagtcagcgaaggctttcccggatcaggctgcggcgatgggtcatggctccgatgccatcgacgagccagctctggaggatgtcatacaccacaagggggccttccttttcctcatcacagaagaagacctccatgttttcgcagtacgggatttccatgaagacggcaaaggcaacatgaagatggcgcccagggcgattcgtcgcttctcgcgaggtgggcgcgattatggcggagacatcgttgtccgctacctggtggagtcccgcggcaatctcctcatggtggtcaggcgcgttcctgatcgtctacacgcgccgccgaggacgtccgcgttcaaggtgttcgagatggtggagccgccgtcggggacgcgcatcgaggccctgtacgcgtggaacgagctggaatcgctgggtgggcggatgctgttcgtcgcgcgaggctgctccagatcgtacgacgcgggcgactatccgggcgatgagttcggcgagggcgtctacttcctggatgacgggaggctctaccgcgagtcggcagtgttcacggctcggcggcggcgacggcgatatccctgcagagacaccggcaagtggctaccggcggcggatgcggcgggggttcctcgtgtggacaagttcttgccggagcaaggcccgtcggactactcaccgccggggtggcttctcccctgagattgctcatgttacttttgatcgtcctggtacaggtatgattcgctgttgatttgatcctccgagatgtggtttagtttgcagccgttgtactttgtcccgtcccgtctcctcttgctgcgatggattagtgtagtttcagtcaacagttgcagtttcagtctagatttgatgtcataatcatggattggtagttgctatgatgctggagaaattctccttttgtagcagaaaatgttttcaagtcagaactacatgaatcgtgaacgcagtatgaaactatgaatttgtgtgatctgatgctgcagtgaatcaagaacgcaatatgcttccaatggttgccgttcgtcatgacttggattgcattagtacatcgttatgctgcagtcaataacaatgcaatgtgtcacttgcagtggctagttttcctgatagaagtatgttttgcatcaaacggttttgcagtgaatctgaattgcttctgcgtcctgttttgagtttcttgctgacagtccaagatgaactgaggtaggctagtgccactcttcagaggatcgagaaatgcccaggggtcttccggctagctccacaaggtggtgggctagacgacctggattcaaagcctcacccctcctaattatttgatattaggtccttccctaatattctagttttttttttctcttcagaggatctgttcctatgttatgtgcataatgtaaaatgtggagtatatttcttcagtcaagaggtatttcttcagatcctaagttatcagcatttcttcagtaacacagatgataggcagcgtgttaatatgatcactagtactgatcagatgatgttatactatcagcatttcttcggtaacacagcctgatggctgatggtaggttggtaggcatcatatctgttaatctgtacgggtagttttaccatcatatctgtgttactaaagatgatgatcacattggaccaataaatctctccttttctttttcctctcttttttatttttggccgggaggaccaataaccatctgtccaactctacatgctcccatgtgtccatatgaatcaacctagtgaatccgcatgcttgaatatgaatgcattttcctcaaaatcacggcttggcgttcccagtaagtaattaagcaatgaactggttttaactgcaccattggacaggatgccacaaagttgagaaaagtaaacaatgaatgcagaatttctgaatttctgattagatcctcagaagagatttgaagcaaaccgaaagcaagctgcactgctgcagaagcagtttcgtcttccctgcaatctgagtcatgaacaccaacaatttctgcattagtctaacatggtgaaaaatagcagagagtactgaagagatgttattatggatcaagcaattgcaagcacacatggatctcgagaacgcatcatcaactgccctaactgggcaaatcaacaaccaccatatcaaatcaagacgcgaaggaagggccgtcggcgcgcgggacgaggatcgatgggagcggcctcgtctccggcagcggctgctgcggcgcgacggcgaggcgccagttgtggcagactcgtgccatgcggctgcggtcgacgaggcggaggacgtcggcgtcgaggtcgcgccatggcgcgtcgtccattggagaggcggaggcgcggcttgccggtggcaaggcgaggaggcgatgcgctattccgctgtgtgcgcgccctcgccgggattggttcctctgcttctcggcacaggaggacatggaagaagtgggtgggctaccgtgcgatccgactgggcttcatttaaaaggtccactctctcgggccccaagagtactccgtagcttcctcgtgtggcagataaatgggctaaaatgtatgaaggctttacttttttttaatcactagaaaaaggaataagttcactctggtccctctatttgtcaaccagtccgattttcgtcccttgaccgcaaaaccagatacgacccgtcccccaacttacggggcaaacgagatctcttgacagttttgatagcggttttggctgacatagcgtctacgtggctaatttgactcggtcttcatctgacgtggcggcaattcaatccgaaaaaataataaaaccgtgggactcacgtaaaacaataaaaaaatggtgggacccacgtgggctccacatgtccctcatcttcttcctcctccctctccctctcccctctctctaactctctctcctcctctctccagcctccaggcgccacggcccacggggtcacggggaggtccggcggtggcggccggcgacgcgacagccggcgtcgccggcgagctccacctctcggcgcagccgtgcagccgttcccggcgcctcctcggatgccgcgcgcgtttctgaccccgccgcggcggacgcggagcaggaaccttcttggcggtcaggatgccggacctggtcacgaactcgaccatggcggcgtgctgctgcttcgctaggacggtggtgaagaggaagtgggcggatgccagcgtcgcgtggccgcagagatccacctgaagacgacgacgcgtgcggatgaacacacagaacacgagtaacaggaaacctagggttgggggaaggggaggcaacctcggcggcgggggtgaaccagcggaggcgtccggttcctacttcctactagcagtctctgatctgcttgacgatctgtttcgcaggcgtgatttctgttcctggatctctctctgatgaatggattgttttgcgcagatcctgacactgtggtacagggctcccgaggttcttcttggcgcaacacactactccactccggttgacatctggtctgtgggctgcattttttggtatggtgaactgatattttagccactgtaaattattatttcttcaggattcatgccttgacagtgttgatatatcttgtgcatttcagctgagttggtcactactcaacctcttttcgctggagattccgaggttcagcagcttctgcacattttcaagtactgtgcctgtttcctcatcaattgttctttgtgttcgctggcaaacttaaggggcataatcgtgtattcatggtggtgatttatcttgattgtttggttccaggttgctgggcaccccaaatgagcaagtttggccaggagtgagcaagctaccgaactggcacgagtacccccagtggaatccctcgaaagtgtctgatcttgtccatggtctcgatgctgatgctgtactcaacgacgtgaacaaggagctctactgaacgtctgcacggctgcgccgagaggtggagctcgccgccggcggcggctgtcgcgtcgccggccgccaccgccggacctcccctgaccccgtgggccgtggtgcttggaggctggagagaggaggggagagagttggagagaggggagagggaaaggtaggaggaagatgagggggtgagtatgacatgtggggcctacgtgggtcccactattttttattgttttatgtgtgaaaatgacatgtgggtcccacagctttattatttttccagatcaaattgtcacgtaagcgccacgttagatgaagaccgagtcaaattagccacgtaggcgtcacgtcagccaaaaccgttgagggacctcgtttgcctggttttcataagttgggggacgggtcgtacctggttttgcggtcaagggacgaaaatcggactgaacaacgaatagagggacccaaagtgaacttattccctagaaaaatgtctgtgcgctgcaacgggtgaaatctattttaatcttatatatttggtttagttaaaatgaaatttaacgtgggagttcgcttggatatatatatttttagaaaatcatgagatgtacttgggagtccgatcgtcccaagttagcatgcgagtttttttaaacatatttcttatatgattccttatatattaccaaaagtgaacgatcttaaaaccgactcaaatatatggatatgtctacgccgccgatgcgagcgtagacgaccctggcgccgccccggaccgcgtcggcgatgcctcccagggctgacgacggcacgtgccctcgtagggtgccgatctcgtccacgaaagggacccagaagaagttgttaggaactcccaacgattatctctcaggaactggaattaatcacgaattgcgcatataagatttctcaaccccgaaggatcgagccgccgccgcctacgccaccgcgcatattccagttcttagcccccttctacttgttcttcgttgatgtttatattacatagcttcggctgatctctctctcagacagctcatgctagctggttgtttactggacccattggtcccccttgtagcgtggattgggcctccttgctcttggcccaagctggactggtacttgcttcttcttagtcttgaagtctggttttcctccttgctcctgggcatcagcttccttgtcgtcaggctccagcacctcttcctcctctgctcctccttgtatcatctcttctgtatcttctcttgctcttggtggagatggaggcctgacagaagtgctcgcaattctccgcagatagcttcggaacatacatcttcacggaggaggacgacgaggtcaattcaacacacagaactaacaagcaatggttgcaagcatttcgatgcgagttggtgtgtgcgcatacctgcaaaccgtcgccgtcgtcgccgccgccgccgccatctccaccggcataggcagccagaggggctacctcaagtagcaccagctgtccccggatgcgcgccaccacgcgacctccgccgaggccatcgacgacgtcggcgtacacgaccctggcgccgtcgcggaccgcctcagcgatgccgcgaacgtccggtaaacgcaggtctccgcggtggactcccttcgcgtcgaccaaaggcagccagaaatagaggtcgctgttgcagttgttgccgtggagaattgggacggggacgccggtgcggcgccggcggggcggagtctggggcggaggtggaggctcatggagaagaggagcgcctcccagctcgtcctccatgtcttcgagaggaggcccgaggtggacgatgtcctccgcgcgcgcgcgcgcggcggcaaagcagctcgacgaagaagagagaggcgttacggcttgggtgggcccaccgaatcggcctttcctgcttccagaagcttcgagagccaagtgcgctctgctcgctgtgcttgatcatggcggtctccatcctctgcatcagctgtcgatttgatgccgttgtactctgtcccgtctcctcttgctgcgatggattagtgcagtttcagtttcagtccagatttgatgtcataatcatggattggtagttgctataatgctggagaatttctccttttatagcagaaaatgttttcaagtcagaactacgtgaatcatgaacgcagtatgaaactatgaatttgtgtgatctgatgctgcagtgaatcaagaacgcaatatgcttcaaatggttgccgttcatcacgacttggattgcattaatatatgctatgccgcaataaaaaaacaattcaatgtttaactaacttgcagtggttagttttcctgatagaagtatgttttgcatcaaacggttttacagtgaatctgaattgcttctgcgtcctgttttgagttcctcgctgacagtccaacatgaactggggtaggatggtgccactctttagaggatcttagctgaattttcaatctctgctatatattttccttgattcatttataatcttcttccattgttcataatatagcatgccaagcttctgacattacttgtacacaccggtttcagacttttagctagctgtgaaagatgcagatcgtttactttttgtttcctgttgttgtacgatcatctggattttatttgatcttcttagggactacttgtttccgctacagaattttttttttgtgccaggatggcacgatttgttcctagattatgtgcataatgtaaaatgttgagtatatttctcttgtcaagaggtattccttcagatcccaagttatcagcatttcttcagtaacacagatgataggcatcgtgttaatctgatcactagtactgatcagatgatgttctgctatcagcatttcttcagtaacacagcctgatggctgatggtagattggtagtaggtctgtacactaatactgatcagatgattttctgctaaatgctctacttaagtgtagaaatgagaggataagttgggacacggagaggtggatgtttatctccgcattgcccatttatttttctgaatttgcagcatctgatgatgactgatggttggatactcgttactagtattaacttgattaaaattgggaagttaggtaataacttgtttaattactgttcaggccgtaactcgataaacaaaagtgatgaactgataagcactcgcatcagagactccagggtaagttcttaaccgaaaggaaattccacgtgaatgaagctattatttgagaatatgcataaggtttgcatatctttgtatgaggactttatacatcagctataagcagaaaaggagagaaaatgttgtgactagaaggatcctgctactccactccaggacctcaacttgcaaaaattagtcatgactcagcggttttctgtcgtttgacgtcgtttagacatcctcctgtcgaaaccactcgaacaattggtgcaagcacgctctaggatagagttgggctttgtgttgattgtaatggcatttttttgggcgttctcgtctgtgttcctttgttggcctagcggcggtcggtcacacttagcggcggccggtccggtgctagccttctcccgaacctgtgttttggcgctgtcggtgtgtgggtggtggtattttttttccttttttctggttacgaccttttagggttgtaatcttgtagtttttttctactctatcaaatgaacttcgcactgtcttacgtgagtcgttcaaaaaaattagtcatgactaaattaatagttatgaaactaatttgtgtcatctactgaggattctgattggatcccgagaagagaagcaactgaaaccagtctcaagaagcaattaatgcaatccaagtcatgaacaccagccattatgtaatccaagtacacacatcacacatggatctcagatgaaacattcctgtgtggataacattcactcttcacgcgacgctcaagggagagaacttgtggcccaagccaattggcccaatataaggcctagtctcatcgcttggtggcccacgcctcccacctctacttcttccaaaccaaaattctctccttccgcttctagaagtaagcagaggaatcaatccccacacacacagcgcgcctctgcctcctcgccgccggccagccgcgccaccgcctctcgccaccggcctctccaatggacgcgcgatggtgcgacctcaacgccgacgtcctccgcctcgtccacaagcgcctcccgtgcctcgtcgaccggcgcaacatgcgccgagcctgcaagtcctggcgcgcggccgtcgcggcgccggcgccgccgcagcagcgcccgctcccgtggatcctcgtgccgagctccggcggccctaccttctcgtgcgccgtcggcggctgccgcagacacgacttcggcgtcccggactacgcgcgcgaagcacgctacttcggcacgtacagcggcggctggctcttcctcgacttcggcaacacccgcggccacggccggcacggcctcctcaacctccgcaccaagtactgcatcagcatccccggaatcgtctgcctcgacctgaatcctagcatcatcagggacatggtcatgatagccgcgaccctctcctcgccgccggaagacgagcactgcatcggcgccgccatcagctcgtactggcccgggatgaatggtgcacgcatgcacgcgttctggtacatgcggcgtcaggtcgcggtgatgccgactgctagcgagggcgtcttcggaccatttctggaggatgtcatacaccacaaggaagccttctatttcctcaccgcgcaagagcgcctccatgctttcgcggtaccggagttccgagtaggccgccgcggctatctggatataccacccaggaagattcccagcttcccgcatgatgggcgtgattacgacggacgcgacgttgctcgctacctggtggagtcccgcgagaatctcctgatggtggtcaggttcgtctctgatcctccccaaatgccaccgaggacgtcggcgttcaaggtgttcgagatggtggagctggccatcaacaacggcgaggcccagtacgcgtggaacgagctgcaatcgctgggtgggaggatgctgttcgtcgcgcgaggctgctcaaaatcatacaatgtggccgattacccggggttgggttcagcgccggcgtctacttcctggacgacgacagaatctacgacgagttcacggtcctcctcgatggcaccggacggcgctacccctgcagagacagcggcaagtggctgctgggggcggcggaggcggacaacttcttgccggagcaagccccgtcgagctactcaccgccggcttggcttctcccctgagagcgtgctcatgttagtttgatcgtcgtggcacaggtaatgtttgctgccgatcttgttgagatctgcttagcttagagcgagttttaacagttgctattttcattagtgagctgatttggcggctgttgatttgtgcagtaactacaatctatgatgtttcattcgatttcgagccttcgaggcccatgcgttcttgcaattgctcggtcatgttttctgtaccttctgctaattttcagaattgcattagtgcatcattgtattacagtcgattctgcagtgtgagaatgcgtttagttaacaccagcacttggctttttcctaatctaagcatgctttggatcaactgaatttcaacgaagatgaattgcatttgcattgttaatccttacaacgggtgctacaaatttcatactatgcagtcattttcacctgttcataatttccaacaggttctgaatttactgataattaacaatgagatgacatatacaaggagtattaatattgttcttaaggcttgctattacaggtatgcttgctgttgtactctatagtccgtagcagaaaacgcttccaaatcagatttacatgaatgcaatttgatatctgatctgatgaatttttttttagataatgggttaaaaacccggcctctacatccaacgggatgtacacagccaaccaagttcagacataagcattgaagctccacccattacatgggtaacaaaaacaaaataacttggaccacaaaaagagtcaagaacaaccaacaaaacagtaaaaccaccatccaggcacaccacatcaaacagacacgaagtgccaacctaatcttgaattctccttctgaagttccagccatagttggagtagaactctaaaactctcatctctaacattttgcagtattctttcaccaaagtgccatcctcttccttaagcaacaaggatcaaagtcttgcccaatatgtccccctgaaaatcacctgcaaaaaggagtaagcatttgatccattaaagaccacatcatttctactcaaccacaccgcccagcacaacgccgctatgcctacaaaaactcgatattttagcctaggattaacaccatttagccaactaccaagaagatgagacatattgagcagtggacgaatgccaaaggtaaaatgcaccgcactccaaatatatcttatcataggacaatcaaaaaacaggtgttgtatctgatgaattacatgaagtcataaatttgctgttcatgacatgaattgcattagcgcatcattgtattgccgtcagttataatgcaatgtgaaaatgtggtcaattagcagtgcttaattttccacatagaagcatgttttgcatgaaatatatttgcattgaaggtgaattattgattgtgcttctacagcctgctttcagtctcttgttaactgtccaagatgggactctgttttgagggacatggattgtatatatttcataactcaactgctagtcttcttcatttgttcataattgccatgccaagcttctcagaatattcgtactgagatattttcagcatcggtttcagctggctgtgcaagatgcagatcatttatctttgctttcttgctactagctgtgccactcttcctgtgttatctgctcttgcgatggcactactattgatgttactgaatctatttttctgtgacacaatttgttcatagattatgtgtgtgatgtagaatattgagtatattgtagcagcagaggaactggttaagatagttattgatctaaagtgatcgaatttttttcagtaacgcactggtattggtatgagaatgatctgctctcttgtcgacaggagagataaaatgagagtaaatattgatccacgggagagttgtttaaatctgcatttctcattcattttctgaacttgcagttgccggatctgtctaatgaacgattttttttttattttagcggggaggtacgaatttgttaacttgtttcagatggttggttgcttcattactagtgttaggatgattataattagacagttaagtactactatctgggttgatcagctataatagtcctacaagtacaagatcgctaggcacaagtgtaaagccaaattgcctatgccgattctttttatgtaagaaaaaggaaaaggataacaacaacaacgataaaacgatttctgattctgttcatgcgccgagctgcatgatgcacagatacggcattttgttgccattcccgtacgggatacgtatctgatacagggatacggccgatactcgcgcgatacggtatcagagaagtattggcgaataaaaagcgaaaaaaataatattttttaaacataaaaaatattttttaaaaaaattaataaaaataattgcttcggcatcccggagacccggacgccgcgcacgaggcgcgctacttcggctgcgtacagcggcggctggctcttcctcgccttccgccagatcgagcgccacgcgctcctcagcctccgccccgagcagcgctaaaagcaagctgaatttctggctagatcctcagaagagaattgaggcaactgaaagcaagctgcacaagcagtttcgtcttcactgcaaatccgatccaaagcatgcatgtgcactaatgcaatcccccacacagaatcattgttcattgcaatataatgatgcactaattcatgcatgagcaccaacaatttctgcattactctaacatggtgaaaatggcagagggtactgaggagaagttatgatatgatggatcaagcagttgcaagcacacttggatctcgagaaaacatcatcgactgcactaactggacaaatcaacaaccaccacatcaaatcagacggtgaattcgctgtaagccaagcacaatgccatgccagatcggcagcaagcaagcaatacctgtaccacgacaatgtaaccaagaacatggcagtctctcacgggagaatccaaaccggcggcgtgtagtgcgacgggccttgctccggcaagaacttgtccacgcggccggtaaccgccgccggcggcgccaccggcggcagccacttgccgtgatctctgcaggggtattcccggtactgggcaaagggattcaggatttggaacgcctcatcgtagagtctcccgtcatccaggaagtagatgccctcgttgaactcgtcgcctggatagtcgcccgcgtcgtacgatctggagcagcctcgcgcgacgaacagcacccgcccacccagcgattccagctccttccagtcgtatggtgccccgtcgttgttgatgggcgtctccaccatctcgaacaccttgaacgcccatgtcgtcggcggaaagaggggaggatgaggaaggagcctgacgaccatgaggagactcttgccggactccaccaggtagcgaacagcgaagcatccgccgtaatctcgcccgcctcgcgagaatcggcgaacctccatgggcggtatcaccagattaccgtcgtcgtcttcgtggaagtccggtaccgaaaaaacatggaggttttcttctcttgtgaggaagtggaaggctttcttgtggtgtacgacatcctccagagcatggccggtgaagaactcagcaggatcatgagtcgcctcctccacacctcgatgcctcaggatcccgaatgcatggattcgtggattgttcatcatgcaggaatggctgatggcggcggcgacgcagcgttcgtcgcccggtggcgaagagagggtcgcggccaccatgtccgtgcccgtgtcggggaagtggaatcgcgtgccgttgcggaggctgagtagcgcgtagtccaggatttggccgaaggcgacgaagacccagccaccgtcgtaggcgccgaagtagcgcgcggcgagtgcgtcggccgggagcgggtggccgaaggcgtgggtggcgcagcctgcgagagcgcacgcgaagcaatgcccgtcgtcggcgcgcgggacgagtatcgacgggagcggcctcgtccccggcggcggctgcggctgcggcgcgacggcgacgcgccagtcgtggcagactcgggccatgcggcgccggtcgacgaggcacgggaggcgcttgtggacgaggcgggggacgtcgccgacgaggtcgcgccacagcgcgtccatctgagaggcggaggcgcggcttgccgatggcgaggaggcgatgcgctgtgtgtgcgcgcggcgggaatggtttggaatggttcctctgcttctcgaaacggaaggagatggtggaatggtttggaagaagtgggtgggccactgtgagatcggactcggcctcatttgtagggccagctttcttggggcccaaaagtagcttcctctggaggcagattaatgggctgtactgtagaaagtctactttttcatgaccacattctgcatctagctatccccatgcaactgatcacaaaacaactagtatgtcaggagaacaaagacaaggcatcagcatgttgactggttagctgacaccgatgcaccgtgttatgtcagtatgattgaattagttatgaaactaatttgtgtcatacactgaggattctaattggatcccgataagagaagcgactgaaaccagtctcaagaagcaatccatcgatcttcactgcaaattccgtttgatgcaactgatcaaagaactcttctatgatgaggaaaacgcattactaacaacacaatatgatggtgcactaatgcaatccaagtcatgaacaccagccattctgcattgggtacacacatggatctcagatgaaacattattcctgtgtggcgtggataacattttctcttaactcgtggcccaagccaattggcccaatatataaggcctacatcgtttggtggcccaagcaacccacctctgcttcttccaaaccaaatcccccctttctccttccgcttcgagaagcagaggaggaatcaatcaatccccaacacacagcagcgcgcctccgcctcgcctcctcgccaccggcaagccgcgcctccgcctctccaatggacgacgcttcatggtgcggtctcaccgccgacgtcctccgcctcgtccacaagcgcctcccgtgcctcgtcgaccggcgccgcatggcccgcgtatgccgcacctggcgcgccgccgtcaagggggagcagcacccgccggagagcccgctcccgtggatcctcgtcccgcgcgacgcagacgggccttccttctcgtgccccattgccggctgccgcgggcacggcttcggcatcccggacgacgcgcgcgccgcgcgctacttcggcacgtacggcggcggctggctcttcctcgccttcggccagatcaagcgccacgcgctcctcagcctccgcaccgagcagcggttctacctacccgacatcgcccgctgggacttcgcggggagaccagccttcgacacggacatcgtcatggtcgccgcgaccctctcttcgccaccggaggacaagggctgcgtcggcgccgccatcgtctttcaccgggccagcttgtatagtccacgcgttcatgcattctggcgcatggggaagcagattgcagtggcgacgacctgtactaacaccattgctgggcgacttctggaggatgtcatacaccacaagggagccttctatttcctcaccgcgcaagagcacctccatgtttttgaagtagaagagttctacgaagacggcgatggcaatctgaagatagcacccatggtgtttcgtcgcttctcgcgcggtgggcgagattacggcggagccatcgctgttcgctacctggtggagtccggcgagaatctcctcatggtcgtcaggctcgttcctcatcctccccgactgccgccaaggacgtcggcgttcaaggtgttcgagatggtggagccgccgctggaaactcccatcaacaacgacgaggcaccatacggttggaacgagctggagtcgctgggtgggcggatgctgttcgtcgcgcgaggctgctccagatcgtacgacgcgaacaagtatccgggcgccgagttcaacgagggagtctacttcctggacgacgggaggctgtactgcgaggcggcggtgttcgtggatcaggctgccgccgccgccgccgatgagccgcgatgcccctgctggccctgcacagacagcggaaagtggctggcggccgccggggaggttccccgcgtggacaagttcttgccggagcaaggcccgtcgaaccactactcaccgccggcttggtttctccagtaagatcgagctttctgccgatcgatctggatgagatgtgcttgcctcacatcgacgtgtccgtgtgatgttgttgtggtgctgatcagtgatcagtgaacagttgttgttttcattccagttctgaacttcttcggtttttctttcagccagttctgaacttcagatatggcagttgttgttgattgtccagttagtacaatctgtgatgttccattgtatacttgcaaggatcgacctatgtcacctatcataacatctcttcagtacgttctgagtttctggtatgtttaccattatatacttcatgattacagaatgcagaaaacagttggtgttcatgagttggattgcattagtgcaccatgctgcatatatagaatgtattttcaatgaagaggaattgtttctgcagctttctttcagttgcttcaattcatttctgaggagatctagtcagaaattctgaatccttggtggatgctataaattagtttcaacactcagcttcttaatttgtcatactgagataacatcgtcatcttgcaagaatttgatcgtttctttgctttcttgatagtactagctgctttgtgatcaattgcatggtgtttcactcaagttaattacctcgtagtagtaaataatatgtctgttatttgttcttctgcaattactattattgttaccactggatttatttttcctgtgacataatttattcctggactatgtacatgatgtaaaaagttgagtgttagtaacaggtgagatggttatttgttcaatgtggtcatcatcttttgaaacacagccatacaggtatgtgataggtgctttgttgctctgttcactgaatcacagctactgaacagaggatgttctactcatctgttcagaaaaaaaagttaagtgctacacaatgagtatggttttctcagcgttgcccattacatttctgatttctctgaaagtagtagcatctgtctgatgtctctgatggtacaaaatagttctgcacgttcatgccaggagacaattgcgttaatcctgaaaagttcatacaagaacaccgcattgcagtggagcaggcggcggccaccaatgcaatccaagtcatgaacaccaaccattctacattgagtcatcatgaagttcatggtaaaaatgccagaaaagtactgaagagatgttatgaaaaggtagtactcctgcatacatgacacatggatctcagatgatgatgagatgaaacattccctcagcacaacattcctctgtagctaacattcatttctcggcatatataattacgaaagaataaacgggccaattaacttcatcatacagatccaaagttctttaggcccatgaagaaatgctcaacaaagtgcagctatcaaaacttcaggcccaagcaaaccgtcacgataaactgggcccaagcccaacttcttgctcggctggcaaaaggctggccttctctgcttcttcttccaaaccaaaccaccccaagcttcccctgcttccagaagccaagttcaaacatggcgcacaacgacgaagcgtcctcgtcgcgttccaccacctcctccgccgcccaaccctcgccaccgccacctccacgcctcgcctccgcctcctcctctcccatggacgcggtagcgcccgcgcgcgatttcatggcggaatccctccgcctcgtccacaaccgcctcacgtgcctcgtcgaccgccgcaccatggcccgcgtctgccacgcctggcgcgccgccgtcaagccgctgcatcctccgccggaggagaggcctctcccgtacatcctcctcccgggagatggggagcgctccttctcgtgcgctctccgcggctgcgccacccaccgcttccacattccggacatcccgcgcgacgcgcgctgcttcggcgcccaccccggcggctggctcttcttcgccgtcgcccagacaaccaagaacgcgatcctccgcgacgagttcccctcgggcatccccgacgtcctccacctcgacgatcggccgccggacaaggacacggacgtggtcatgttcgcggcgaccatctcgtcgcatccggaggaccaacgctgcatcggcgcggccatcctctcccacttccccgacgtcaccaacccgtccatctacgcgttcttccgcatgggagtcttgcccgcgatggtggcgaacggcgatgacgccagcaacgcggggtcggcatcaggcctggaggatctcatacactacgacgatgccttctacttcctcaccggaga

SEQ ID NO: 21248 - DNA, 9305 bp, Oryza sativa
cgttgtccgctacctggtggagtcccgcgggcgcctcctcatggtggccaggatcgctgctggcgctggtcctctccgcccctcgccgccgtcgccgacgacgacgtcggagttcagggtgttcgagatggcgaggcgatcgacggcattcgccgccaccaacaacgatggcgccgagtacgactgggtggagctggactcgctgggaggccgcatgctgttcgtcgcacgaggctgctcgacatcgtacgaggtggcgaggcatccggggttcgaggagggcgtctacttcctggacgacgggaggctctacggcgaggtggcaatgttcagggatccaaatctgcggcaatacccctgcagagacagcggcaggtggctggcgtcggcgccggaggcggttccacgcgtggacaacttcttgccggagcaagccccgtcgaactactcaccgccggcttggtttcttccctgagatttcccgtgttgagtttgatcgtcgtggtacaggtttgctttgctgttgatttgtctgagatgtgcttagtctccgatctgatggattacattagtgcagaaattatctgtttccatggctttgattgcattaatgctgcattatattgaagtcgattataatgtaatgtgaaaattatatgctcaattattcgtgcttttgttttcctgataaaatcgtgtgcattgcctgaaatggatttgcaatgaagctgaattgcttctggggactgatttcagttaatcagtttcaggcttttcagctagatgtgaaagatgcagatcgtttgtgttttatttgttcttctataggtactactgtagtactgtaccagtactacttttgatgctaccaattctactttctgtgccacgatttattcttatattatatgcatgatgtaatgttgagtacaatttagtagctgtggaattggctaaacagttaagagttggtatttatctgatgatatctgaagctttcagtaacacctgaatggcaaatttgagaatcatggagaggatgcttatctctgcattccccacgcatttttcttaacgtgtagcatctgtctaacagtacattttgtgattttgtcagactgcacattctcttgaaaagagagagaaccttttcgatgttccaaaactatgaatcaaccagatgtcggaaggggttttcagaaacgaataaaaaaactaatttcataactcgcctaaaaaccgcgagacgaatcttttgagcctaattaatccatcattagcacatgtgggttactgtagcacttatggctaatcatggactaattaggctcaaaagatttgtctcgcgatttcccccctaactgtgcaattagttttttaatttatctatatttaatactccatatatgtgtcaaagattcgatgtgatgtttttggaactaaacaggccctagttaactcgtatgggtgcatattcatgtattttcctcagcacggcctggcgttccaaataagtaattaagcagcgaacactccaatgaactgtttttactgcaccattggccaggatgcctcaaagttaagaaatgtaaacgaggaaattcagagaaagcatcctttcctctatgtgtatcagcttttctccttgtgtcgaagcagagcaggacattctctgttcagtagtagtgagatgatcacagtggaacaataacccatctcaaacgttaacccatccctatgtgttagtgcttactgacgtactcaacattctgcatcatgtatatgaatgaatcatagaacggacaaaaacaaattcagtgactaattacttgctacgaccgagtaacttgtgtatccatgaaatcgatcagaaatagtatcatcaagacagcaaagattttgggattttcatatatatttcataacatgggatatacgggtggatgcaactcttctcatatcctaactcatatttctttatagactcagatttgaaattggacagtatcagccatcccattttaatttctgtcgcatatttttcccataaacctctcgtcggacgtgcagtcggaaaatacctgtacccctacatatatggacacggcggttggccggtcagaaactctaagagtgtcaagagccaagactacgtacgaacgcacgaaacgcatcccatccgggaacatatcgcaccaacaaacacaatatacgatcgaaaagggtaaccgatcgatatatagtaagttccaatcagtctcgcgtcgcggcccccttaaaccttacgcacgccggcctccgcgttgcgccgtcgccgtcgccgtcgccgcggcggttgccgcgggagccctggtcatgcggcccggacgacggtggggatacaggcgcgtcgcggtcgcattggcggtgtgcgtccacgcggcggtgcttctctcggccgtcgtctacttgtcctccgtcctctctgcagctgggcctggggctagctcctcgtccctgcaggaaacggagatgatgagactgaccgccaagctggagcagatcatcggtaagttcatctctgtaattaattatcatacgcgatcacggcatcacgcgattgatcgatatcgattaaagctagccgctagctgcagcctgcatgcaacaacggctaatcaaattagttaccattgccattacgtgttgataattcatcgcgtccctatatactccttccgtttctaaatattttaggagtataatataagatgtttatgcagaaaaccaagacaaatacaactctgggatgatgcatggcttcgcaagtatgctgtccaaaaaccccggaatcattaaggagatgacttacagaatcaccaaccccgacgacacggtgagagttcaactggcggtgacaatgagagacgacgtccaggtccagcctctaagaattaatacttcaatttatttccgtgtgtatatatacttttattagcaaacgcactacttacgactccctcaattttatatataagatgttttgaatttttttaaaattaaaatttgaaaaatatagtaatatctataacaccgaactagcttattaaacccatcattgaatatattttaatactatatttgttttttaaaagtatttaagaattatattttgtctatgacatattatatagttttcgtttatcttcattataactgtgtgcattttattagcctctctatcccttgtttagattcactaatattcatataaattagactataaaacacataatagatgtatctgttgtttagattcgccaaacatgcatgcagtgagtataatgtaaaacagaggtagtagtattttaaaattgcataaggcatattgtaagttggcctccccagcatgtcgtgctgtgtggaccagggttttcatgtatgtttgtctttattccaaaagccatatcattttagctgacctctaaaaaaacttatattttaaagtataaagtaaatttatgagaaaacaactatgcggaaactgatattaatgagtagctttacctttctgccttttgtataattaagatttcattaattgaattcattttgttgttgaaattttgcgaccgctgatatatagaacacgtcttctccccagatatcaatcaatataatgttaattatgagagtgtttcaaatatccgataaacatgtcccttcatacgtattttcgaaaattagcctattgatttcactgaaactatacaaataaatatttaattgtttgcgtctttttcgatcactcacagaaggagacccaagagaagtgaagagaaggaaattggggcaacccttaatagcgaatagtcgtaggggagagaaatgacgagagagcgagagcctggggagctcgtcaacctgagcgtcggcggggcaaccgttaccggcgcccacagccctgcgcctctggtcactccgaccagggcggccaccgcacaaccgcgctcacctccccagtcacgccttcgccccaagcaagtcaggcctcgccactgctatccaagcccttgactggggaacggatgccgaggaggatgaggacgacgtcattgctccggagctacaccaacgttcagcggagacattcaatccgcaaaccgccaaagcacgcaaagcagcttctccatctccggcgtccaaggctttccatcaggaaatcaatgcccgaagccaggaagaggagctcgacattactgcagagagaggagagggacagagcgccattacgccccctccggaaaaggcacaagaggaagatgcagagaagaaggccagagaaaaagcaacattaaagtcgataatagtagccccggcaagagctacaagcaagtctcaaatcgaggcagaagaacaagatctttcatcaaaatggcaagcggtaaaaccaaagttttggtggcggaagcgccaaaatccttcttcatcaacctctcaggtcgtcttcaatcgcccagctacctccttcaatccactaaatctcagagaaaagttcaaggagatcttgcacggcaagtgcttccgctgcttcgcttcagatcaccaggcagcagcttgcagggatcccatccgctgctatacttgtagacgcagtggacacatctccttccgctgcccaaacaaatcaaagcaacccattcactcccgcctcaccttccccaagcaagccccctccattcaatcccgactcatcttcccaccacttcccagcaagaaccaacagcaaccaacaacaacccgccctggttcggttttccatcgtttgcacaaaccagcggtgaccatggatcacatacctggtctgccgaatcaacggccggcagtcggctatgcaacggtgccgatgacggagctcatgcagcacgagctggagcgccttcactatcatggcgcactcatctcggctgaggtcgagggacaggagacgtcccccagggaggtggcgcgtgcactgacccagcaggttgggatccccatctcggacctgcgagtcacgcgccatcacccggaagatttcttcgtcttcttcgatttcccagaggggcaggccgcggcagcgcggagaggcttcatcactctggatggaggaaggttcaccatcacgccatggagcgccgacaggcatgtgcaccacccgaactggtggtttcgtgtgcggctctgcctggagggattgccgcagtacgcatggaatagggcgggattggagggcgtcatgggtcccatctgcctcttcgatcgcatcgagcataagtcggttcagtggcagaacacggccatcttctcatgctggatgtggatgcggaatcctgatctcctgccatgaacagtgctctccaccttcttcccgccgggagctgggcgtgtcacctccggcatcacaccgccgcttccggacgagatcgcgctgccgccgagggggaggctgccgcatgtcatagtccatctggacgagatggaggactggactccaggaccgccccgctcgccttctttcggggtgagcggactgccctcctcggacttgtctgattcgggaggcccgatacccacggtgcgcaccttccagtggtacctgggctgcgccgacggaacccagcctcctcggcgacgggcggcagcgaggcggggatgcagggcaccgccacagagaagagaagacccggaggatgatgaggatgatgacgggcggcggcgccacgctgaggatattccaccacgccgccgctcgctgcgcgatgtcatcattggaaggggccggtcggttgagtcgcgggcggcggaaggggtgcgacaccggagccgcacgccgcatccttccggccgccagcgagcgcacggcgatggccgccaaggccgctcacagaccaggcacagctcccgatgctcctgccgctacagatcccgtcgcacgcgctccccaagctccttgactcctcgcgatcaggatggcacgggcgatgcaggctgcgcgacaaccaaggtggtcgctgtcagtggccaggctgatggcgaccagcagtgtagcgcccgttccgtcgtggcgcctagcgggaaaactatctcttaaaaaccctaattgcgaaatctgtttctttgcttgttgtctagtgtccgtgccatctcagatctcaaatccccgatcaatcgtcgagttcaatcccgaatccaaatccttcccgaaagtccctccgcaaaagtctattttgcctctctcgggttcgatgggccgaatctctctcggcccatcttcccctccctccccggctatctctctctctctctctctctcgctctcgctctccctcttctccgctctgcccgcgcgccacgcgcgcgtgcgcgtgagccgcgccgagccgagccctccctctccgctccctcgctgccgcttcccgcacgccgttgtccgcgtgcgcgcgcccacgtggtcgccgcccgtgccgcgcctgcgccgtctgcgccgtgagtcagcacgcgtgcccgagccgcgccgctcaaatcgccgcgccgcccgttgcttcccgcgcgcgcgtgccgtggtggccgaccgccgggtcgctgccgccgtcagcgcctgccgcgcctgcccgcgcctgtcacccgtgtcgccgcttcgctccacaccgcccccgccgtcatcgccgtcgtcatcgcccggcccccgccactccacgcgctagcctccaggggacggaggcagagctcctcctccctctgccgcgtcgcccccgctcccctcctccttttcccaaagaggcaaggggcaagccccctttctctccctccttttcccctttttcctcccgccggcccgcgtggcagccacgtaggcgccacgtcggcgccagctcggccaagaccgggtcgagccgaccccggtcagccgctccctccggccccgctcgcgggcgcggtccaccgcgagccgtgaggctgcgcgtgggcccgccgcatccgcgtccaccgcgaaccacgcgcatgcaccgtgccccgctccacaccctagcgccgcgccgcgtgctccctccgcacggtgagccgagccgctgacaagcgggtcccaccccggaccacgcgagatggactcggtccaccggcgccctctctctcccctccccgcgccctattgggccgtgtcctcttgggccggccggcccatttagctcggccgagccgccccttttctctcgggccgcgccctagccgcccgagggaagtctacttcccctccctcttccttttctttccaaaagggtttaattaaatcctttttcctttagaccaaaaatccaataatcttagaaattcaatatcttcccaaccgtaaatccgtttgactccgttcaacttccaaaattcctcaaatctcgagatctatctaatggcacgcttagggggtcattaatagggctttatttttgccgtttgttgagtcgtcccgttttgcgtgtagtttcggagcccgaagacccgcagtgcgaggatttcgaggatcaagctcaagatctcgagcaaggcaagccacctttgaacatcttgagcctatatttaaacttaattatgttgcttaaaaaatattatgcattgataggatcgcacttaattttcttgtcccgtctgcaaggcagattggcagacctacctagtttgctgcatttgatccctcatttgttaattgttataccatgttcccttgtaaccacccagttgcgcctcgaaaatcgtgcactctgcacgagtatcgacggacgccttcaaacttaaaatctgaaaaacatcttgggtaaaacgtgggttttacaaaagacttggaaaacccgacacctgggtcggtgcttgcgaactaaatgaatttccaaaaccgcggaccggggaacgtaccgggggtacggtttcccgctcttgcacttaaggaccgtttccttggaatttcatccgatcataagtcaagtacgaccacatggatggaatgggacacccctggctgagtaactagcttatcaggggagccttgatgccgagagacatgtggattcgctagggtggtgtcggggaggacccctgggcttcctggcacagtatggtctgggacctaacgtgttgttggtctgggacccctctcgtcggcatatggtaaacctgtgtcggctttcgaaatgccttgtcatgaaagcttggaggtctcccgacgtggctgatccccacgggctgggtgatccgggttagtaatgtcgtgtgggtaaagtgtaccccctctgcagaggttaataaactgtttgaacagccgtgcccacggtcatgggcggatgtgaggtgattcctagcgtagttttgtttgactactgccttgtgaaattgctgttgtgaaaaggggatcgatgtttggaaaaatctgcagctgatgggatcagctaggcccgggtggccgtttgaaagttgttggcccgggtggccgtttgaaagttgttggccgggtgccaatcttgaacaattctaaagactgatacattacacatactccgaccggacgagacgcactgtctcatccgtgtcgtttgagaagcactcacttagttgttttcagaaaagagttcaaataaaatcaattgcaaaaacaacagtctttccttgaagcctgcattaaacacttatttcccatggcttgctgagtactcccgtactcacccttgctctatataaataactcccccccagttgctgaagaagatgaagcggatcccgctgacgaggagttcttccaggagcaagccggctacgatgagttttagggtttcggcctagttcccaagtcgcgcctgtgatgtttggtccaagtctggcttccgtttcccttttgtaatgcagttgtgagctcgggatctatccgcagcccaacatgactgtactcctactctataataaagagacctctgttgctgtgatattctgtcttcctgtgatactagcactatttcctgggactggtatcggttaataggttaatttggagcgtcacgggctagttccgctcgggactagttcggggcgtgacaagagatggtatcagagcacaggcttggccctagggcgaaacccgatgcttaggacgaccctaaggatactcggttcaaaactacttgcgaaaagctaaggcttcttttggtttccttattttcaatagtttgtttctaaaatggttactgatcttttctccctctttcaaaattgtagatggcagtgaacgccagcttcagttccca

SEQ ID NO: 21249 - DNA, 4222 bp, Oryza sativa
caatctagactggaacaaggagaagaagctaaagctgctttgcttgagaggatagaacatctaacagaactaattctggtttccgcaaaggcaagtcggactactaaatcgtctcactgcccaaggcgaagacattcttttggtgaagaggaggtctgattactcaaataattttactaaatgttataattcgaatgaacttgtattgatattttgaatacagtgccatatttattatatttagtacctcaagttctttaaagtttgtgagctgcttataactgcagcttgcatatctcccatatgaaaggcaagacatcatactggataatgaaagcaatatgttgtttgttcctatcgaaggattcggtgaaaaatttaaaagctcccccaaggaggagacggaaaatcagaaaggacaccttaactggctgaatctacgggtatgcacatgaatgatgtttaatccactgcattttaaacactttctatcatagtgaagagttgtaccattttttttcatgtatcacttatattaagctatgaaggtttcagaggaatggttacctttaaggaatacaggggactgcgaatcacatattcacatccttactaatgttgctaacttccattatgacaatcctatactatgatagtgtaaccttgcatgtaatactcatattccgtggccatatgacatcatttgtttctaaatgattatgcaagttgaattcttcaaatgttctttgcagatttgtacttagattatggaaccaaaatataatgattgagtttgcttttgtttgttaggattcttcctcttactgacctttttgtgatttgactgcatgcagaagtgtgatagtggttctactaatctgacaagttcggatggtgaaaaccctagttcgaccaaatcattacctgccctttccacacctctggggatcggattttttaatgtcacatcagaacaaaggatgtcagattatatgcttgctgagaatgtaccggctaatctgttatgtgttggccatagagaatttccttctgacagccttcctgtccaggaaacacctttggtacaaaatttgtgctcaatgatttttcaatttgttgcttgacacctaatgttaatttctcattagctggacagaatttctatgccaaaaatatttataatctggtactgatgttcctctctagaacattttattttcaactaaacactgattattttttctcaaaaatttgccttttatctcacactagggaaggaataagtgaaccaacattgtgtaccgcctatttccaatcagagtaggactaaactgaaaattgtaaaggttgctatcaaacattcatagaagacattccacaattttgttagatttttttagaacattcattttttttttttgttaacaacaagcgtagatgtgttttctgtatatacaaatcagaaagaatggttaaagtttgagttcaagggagattgggagaaagagaaggctgagtaggagtaatggaacagcatggcagcaatagtctgggactcggattaattatttgatagatgtacattctattataaatgtctgagcagatatctgtaaaaaatagtgatggcatgatcttttatgtcaaataataacaggttagtagaaagacttcagatcatgtggacatattgagagagcaattcaatattttatcaggggaggttgcactccatcaaagtgttctaaagcgcctatcagaggaagctggaaaaaatgcaatgaatgaacagattgaggtaatctttctactgtccactggtgtgctctatgatatattattataagcgctcttgttttctaaaatgtgtttctgtctatgttaagatggaaatgaaggtggtcaatgatgaggttaagctcaataagcagaaaatagcatctttagaaaggcggatttctaattcaatgtcaaatagtcgaggcatgcatgataatttagaactctcactggtaatgtttacctgcacccaagtgtgatttccaactttgtgttcttctaactatatacatatcatattgttacattggttttggcgttgtgcagccttacattgaaatacctgagcaactcaatgagaaagcgtttcaacatgaggtgaaccaattgctctattatgcgtctgttctttggcagtgagcttcatgctcctggctggtaacattaaagcattgtgttctcctcttaatggaaagatacatcattctaaaaaaaagtattagatggaatgggaactgaagataaggttcttgtgggacaaaatggtaatacaattatacaagtactccaaggatctgcattgatgaaaataatagcatttcaaatttccatagtaacatcatgctagggcctttccatttaaagtggtacaatgttgtcgtactcctacaccatgcagtatctacaggaggatatggtattattggcatgaaagcacaaaaggtagaattttcagtgttccaaacagtgattgtagtgatgtactgatgttttcgcaaacagaatcttattttccttcaacaagatgatagcagtcacaaatctggctgttaatgctgtgaacattggttggttgtgggtttgaggactgagggtagggtagttgccttatggcgctttcgcaaccaaggctgcaaactctggtagatactctctttaaaatatatatctgcttgacctgtaagagatgcggttgaacgttttgactactaagaaacctatctctgttatcaagtagatatcctaatactcttatttcgagttggttaaaggcctaagaaaattgtaactaacagcataatttttgccggctgtttcttatttcttgccacccagcccacctttggaggctgcagtttccagtgcttacatctgctgcagtgcaccgcttgcgacaagccaaaaggcaaaagcctgtagcagctaaagattgaaaatttcattttctcatgtagatctttgatagcctgcaaatttgtgcaaagaagttttgctatagattacttcctccgttctaaagtataagcattttttgtatgtatctggacatcccttcatccaggtacatagccagaaatgcttatattttggaacgcaaggagtatttgtttccgtgttgttgactgtgttgcagagtcattttatgtctccattttgaacatcacttttttctttaattactgctggtaaaaacagcagacggcagattaatgaaagacgagcaaaagatgattagtaaaattcgtggagcaagacaaaagcttgtagtattacttatagttttccctgtttgctatcaggcaagtgagtgccaagagtttttgttgtcagaaagaaccacatttcagcacaacacaggcattgtccaagaaacaggatctcaagctcacaaaggaaagccattgcccagtgatgtatctgatgaatttctgaaaaaggcgtcacaggtttgccttttctctgcactctaggcctgctgtcctgcttccttccattctaacttcaagccagtgatatgtactccctccgtttcataatgtaatactttctagcattgcccacattcatatatatactaatgaatctagacacatatatatctagattcattagcatctatatgaatatgggcaatgctagaaagtcttacattatgaaatggaggaagtatattgtgattctcagggataaaatcgaaattaaactgttcctccagccatttattggctcatattagtcatatatcttgtttcttttctactgctttgcttcataagattgagtgattgaccaatgagaagcttgtagccaggtgattggtgctctgtacttaaaccatgctgtcctgtcatgatgatgtacacttgtgctgataattagtagtgttagtattcctatgggatgacatgggaattagtgcttcaaaacaaaggcaccggaagttgacatttgtgggaaggttttatcatgaaatgtgttagcatctaatactacctcccttttttaatagatggtgccgttgacttttaacatactgtttgatcatttgtcctattcaaaaattaaatgtaaatatgcaaaaaaaaaaaagtcaagcttaaagtttcttgttggataatgctacttgtattacctagaatggtgctcttatgttacacatttt

SEQ ID NO: 21250 - DNA, 11215 bp, Oryza sativa
  unsure (1)..(11215): unsure at all n locations
cagctccgcgtcctcctcatcctctccccgctgctgctcatcgtgcccgagcaggtatggccncagagacgaccacgcgccgccgccgaccgccgtggcgccggcggaggcctcatgtacctcctcgcgcagctgatgggcatgggcgacggcggcggctcgccgtacggccgttggcacggcggcggcggcggcgcgtcgtcgtcgccgtggggcgtggcgctggtgctggtgctggtgctgttcttggtgtcgtaccagtcgtcgttccagagctggtggttcccgctgctcagccgccgatgagaattgcaaaagctcgtgcatgtaaaaccatggtgaaaatatagcagaggcttcttggttaatcagagctaagctcggtgacgatcgagctatatataattgagcacaagggcggagctagagcgagatggagggatgccacttgtttaatttactctgttttatattaagtttaagctaatacgggtatttaaatttgtattgagagatgtgcacacatgatgaaaataggttaggtataactatattttttcttgaccgggttcctgggtacccccctcaatactctagctcgagcagatggcatttgggtgccgtgtaattatgcttgtccgatctccaatcatagtaactaaatccaatttacctgtgactttcgagcgaatttccggtattgatatatatactcttacatatttacctgaaggggtttctcctatttttggagaggtatcaaaactaattgtataagttagaatagaattgggaatccatctttatgactttattatgttctagatatttttcttccttttttgagaggtatatgcattttgtaccttatagtgcatagtgttaggagatgtatacctccaggatctatgcactatgagttatgtatactttctacgcctcccgaaaatcagaaaagtgttggccaactataagcttgtcttttattaagtttgattgttcttttttaacctctcaatcagttaggaggtatatacctctataaggatgggagaaaacattttcactaaattatgatggcaggtgaagaaacgaccggttttgatagtgaaagtattagttcaacttgttttcgactcattttcttctttgatttcaacatgttttgcaaactgcataaaaatgtaactatatatgttaacaatagttgatgcaaagctactacttctatgataatggtatttgtagtataatttttttgctgttattgttaagcatatacagtaacaagacaagatatggttatgtttgttaatgacatactatttgttgtttgatgctaatttatatatgtcaaactccatataatagtataaaagatgtcttgttactttataaatatgtggatagggttgggattgggattgagaatgaaatagtcccaattatccatctcttccatatccctataacaattccacctttttattacctagctacatccagacacacgataaggatctgcgaaagtatatatgaatatggtgagtgaactgaaagatataagtaaatgtgtaccacgatgaataaggtgagtgaattgaaagatataagtgagtgtgtaccgcgatgaataaggtgagtgaattgaaagatataagtgagtgtgtactgcgaggaacagtcaaaagcgttgtggtataagctatctgttcttctttttctaccagcttaatttagtttttaggtgaattaactagtacatacagctcaatatgatattataatcatgatgttttgagttcaaatatcatggttgacacaatatttcaagcttttagatgaacaatggtaaggtacataaaaaaggacccaagaatgttctaggtcaaaagttctttgttctgcgttatctagaatcttcttttgttggcaacagcacacaattcttgcctcatctttttcacttctgtttatacttataaatcaaaatttaaattttcaacttaaatctagagttaattttgaggttttttcatcgtagtttatttttcagcattcgcttttagatcgttaagaacacttacataaaaagttcatttacaatttttttttcgtttgcaaatataccatttgacttattttaagccgtacatcccaagcgatacaaagaagctcctgtctccatcttttctggtgctctttttcttttctctgctgaaatctagtaaaagctctggtattccggttgcgactagatatgatatgatatatgattacctcagccaaagcagaaaatgcaattttgattctcaaacacactctttcattacctggctttaagcagcattaccgtgcgatgatgttctagattttggagccttggaatattaatacgtacgatcaggtctaactgagcttgataccacaattatacagagtagttaaaattttgccttggagcttttggcatttctttattatgagatagttgcaagttgattaatcaaattagcatcgaagattacacaagcatgcgagggatagatatagatatagctagactaaataaaggaaggaagaatcttctaacttttgtcaacaatggtgccgtctcctctctttcggctctccttgataggtgaccaaagtgactttctgcgctaatcatacgtgtggggctctctccacacgtgccaccctgatcccagatattctgtgtgatcatgaggatataatcacttctctggacgataagactgtttttttatacgtgatgctgttactattcatcatattgaatatatatatatatatatatatatatatatatatatatatatatatatatatatatatatatatataagttatatttaaagtaacttcaataataaaacgaatcacgaaaataaataaattaattcattggatcttctccaatagacggctcacattcactcatatgtatatctaaataaaaaaaatagggattgtatctcgtttaaatgtggtgatatctaatcgatattatgtgatacttgtgatacttacgataccggttaggtattaggatataatatttcagatgtaccatttcgttcgaatggaataccgcacatagcattcctcgtaattaaagcaagtccagaggtagttcttaaaaagaatggtccaaaggggataaacatcaattaaaattcccttgggtagtactcgaccatgatcattctatacacacagaaattcataaatttaaaatggtccatcatcatgtggggatcgtcgtaccgcaaaatcattttaattcgatctctccactctccagattcgtagcgatcggcgattcattccgacggtgtacttaacgcctgcacgtgctctcgcgtgcatatcaccggaggattcgttgccgccgtgcgctacgacgttgagatcgatccgcttcatcgtcgtggtcgtcacgtcgtctcacggcgcgcgtcgttaaatttgtctcgcctcgttttggaccgaatctgcatgttggttacggcgccactgggctgggctcggtgttgcgcgcgcggcggaactgggcttttctcgtcctcgtttcggcccgaaactgcaaaatgtacagactgatatgccgccctccggcccaagcactaaggcctgagcattaaggttttcgtttttcaaacggtcaaacgatatattttatgaaaaaaaaactttctacgtagaaagatacaaatttatttttaagtttgtagcgagtaaaattcgattaagcatgcactagtggttttcttgttttccgtgtcctaactttatcttcatcttcattagaaatgaacaccactttaaaatataaaaccgttagaatttactgaaaaggccgtacggtccctgaaatcacgtctggttcctcgaggtaagtttgtacgctaacaatttgaagtatatttttatgtctcgactcaaatttatatttcgatttaaaatcgggtgtttttatgtttctacgttaaaaattaaagcttgaaaacaagtagtaaacaacatcttacgatggcccagacgcatgtggattaaatcgccaaaagtcaaccaagtttggcgaagttttaattgttcgtggatgacttgcatcatcattgtatgcgggcacatgatgattttcctgttggttcaagcttccgcaatctcactggtcactactgtccccagctgccatccctgatccctgtgtccgctaaccagaccgcacagcgaccgtccgtccctttcattcccccgcatgcgtgatcccccattctttccgagaaaaaaacccgcgtgatcgcgtgatcgcgtgatccgatccgatctccaattctccatcatgggctacgactctgacgccgcgcgttgcctctccgatctcggtgagtccgccccttctctattctcccctccatgctccattttttttttattttttagacctttttaatttttagttttgcaacgggtaaaggtaattttaatcatgtatactggtgggaaaaaaatataaaataataataataataataatgaaataaaattacagtgacctttggtaaaaagataaaaatatataatcaattttccattaattccattagctaaaaataatataatacgaagtaggaaagttattctcaaattttagcaattttcaaaaagcttaaatagagcaaactaattatataaatgaaaacaaatttaattacctaaataaaacaattagacctgtaattgaaaatctgttgccggtttagttaaaataagcctgtgggtgtgtgtggtatatatctctcactcgtatgtcgtggtctttttttttacatagaaaaaatgcccgtgcgttgcgacgggtaattaaaattataacaaatataaaaatattatatgattaaggtttagtttcacatgatatgagctctttaagaaaatatatttataatgaaataaaaaagttcagctgaagtgacctaaagtgaacttgttccatacggagcatacacatggtccatgaggcggccaaatagtgtggacggcctagaaatagaatcggggaggaacaacttaagcgacctaaagtgaacttatttcgtgtgggcggtctgggaatggcgttcggcctgacgcgggagaagccagagccgtccaatctgatagacggtcatcccgacctatataaaagttcaacagcccaaaccctaaccctaaaatcatttccccttccccctctctctcaaaacaatgtggcggcggcccgacataccgatatccctgcgacggcggtggcggttcagcagcgacggcgacatcctcccctttcggcgtcggcgttttcttagtgttcttgaatctgatcttgtattcttgtagtagtgttttctttagaatttaggtctaaacttgatgcggtctctcatttttttttcattcttttcttttttttttattatttttcatcggagagggattaaagcgggatcaatcgcacgtgcaatggaattttttttatggacgaaaactataacccataagccatacaaatttttttaattaggtatatatagatattgaatcagattttccttttttttttcatttttttcgtccttttttcgttactacagatgtcagaaacgtctttaatttttttttaccgcgtcagatataatcagattcgattttttttgtcgatttctttttcacgctttttttcacgggtggacgacggaaacactttttaatttttaagtagtagagattgagatagagatacagatagagatagagatagagaaacggaaaactttttttgaaactttttttttggaaccggacagaaaaaattttacgtttgttttttaccgcatagatggaatcggattcaatttgtttttttaccacgccgtgtcacatataataggattcgattttctttggaatcggacaaatacttttttctttttggcccctttctttaccgcgtcgacagagtcggattcgtttaaattttttttccttttttcgcccttttttaccgtgtagaccgagtcagattcgtttctttttttttcctttttatcgcccctacttttggatcggacttacttttttcttttttttccggttttttttccttctttcgccctttttgatcggacatgtttgtttttttttcacacggttttttttcgcccgcagatttttctgtttgtttcgtccgtttttttatcggacatagttttttttcgcccgatttttttctcccatggttttttttgacggacgatggaagcacctcttatttttttaactactagtagagattaataaatattatcggaaactgaatttttttagccacgccaacactaccatgtcagctgcacgtggcgtgatagagttatttggccgcgccagacaggctggcgtgaccaaaagatttagatttagaaatactttttagagtgttctattaataaggctaaaaaataaaaactctcaaaattaaaagaaataaaaaaattttctccatgctctctctataggtatacatgcatgtatatactccctccgtttcagaatataagtttttttttgttggatatgatatttcttagtactataaatttggactctttgtctagattcgtaaaactaagacgtgtcatatccaataaaaagacttaaattctgggcagagagggtatgttatatacatggtatatgtgcatacaaagttatatacactatatataatttatgtatacgcatacaatgtgaatgtataaaaaatatatatacatgtattaaaaaaccaaaaaattagaaagaactgaaaaaaatggggaaaaaactagactgctctctccgcacatgccatgtggttgcgccgcacggagagagggcgtgcgatagcagtgaaatagctttttcgcgatctatttcgattatgggcctgttaagtttccaaacaaatatttttcatcatatcacattgaatgtttggacacatacgtagagtattaaatatagaaaaaaactaattacacaaattacatgtaaaaatagagacaaatcttttaagcctaattgctcaatgctttgacaatgtagtgttatagtaaacatttgctaatgacggattaattaggcttaataaattaatctcgttgtttttagacggaatctataatttattttattataagtatatgtataatacttcaaatatatatccgtatatccgatatgacacaaagaaaatttcattcgcgacctaaacaggccctatgtcacggtaccaaactatcacgccggttatgagctgcagttaattgattcgctggttgcttgctcacgcgccaacgtacaaacaaaacctgcgttttcgccgtgcactcaaaacggaaccgagcgatggagcgagcaggggttgttaatactctctcgttagcagcaggggaagttgccgagttgggcgttgctgctgaatcggcaaaggaaaatggtcagttatggcaactgactgactgtgacttgttcaaaaaaaaaaaaaaaactgactgactgtgaccgtctccgaccgagtgctgcctcatggctgtcagcttcaggtttgctcatcccatactgaacagagtgtatgttcgtactaatttcgttgtcaaacaccatcattcgtaatgacatggtggcccttgttattattgatgtggaaaaacttgacaatgtttgcagtttgttttgtcctgcgtgcaacatttgcagtttagtggtagtaccgcatcaactttggataagcaccgagaaaataaggggaccggaagtgtactcgttgcatgttacaattactccatccgtactataacgtagcaatcgaagatggataagcaccgaaaaaataaggggaccagaagtgtacttgtttaggatggacattatttattttaaattgttatattctgagatgaatgtgatatgttactaagaaaaacctgccgagtataatgatggagctctcgttttttttctctacacagaaatacgaacgctcgtttacgtaagcgatgacttatgaagcagccatggtgactccacatggataaagattagcaaaatcatttttgactagcatctgacttccgattcatgggtacacgaaaatttctgctaagttggattcgttttttctctctctctcgattttttgtggtcgcggagagttgtaatagtagcacgagtacgcgtgcgtaacgtaattacgtaaacgtgcctagaaaagacgacgagcaggaaattttccagcacggttccgttgtttggtattttacattacagaccttttataagatctatttcacaaatatgtcctataaacctaactgctaatgtggatcctggatcgatgccaagtgccattgaggttacatgttcttatgttggaaatgttggcaatatgcgtggcagccggggcacatcacgctgatgtacccaggagctaggtcaacaccgtacttcttggtggtgatgtctagctgacaagtcaagctcggaaatcacgtgaatggcagaaatacctatgaacccatatgtcagctctctcatatctcttctctctctatccactcatttcacactagttggtcagtgccatattgcatcaccgcctcgagccatggctagcgctgttgccaccatcgcagcccctgccgaagaggatgccgctgtgtgggagcgcgccattgcagcgaccgtcaagaacgccccaagaccctaaccctcgatggtatagtcaagtccaccatgggccgcctcccccccggaatgctagttcgcgcgcgcgttaccggcgcgcacttccggcccacaaggcccaccgcatacgcgcacgtctctttttttctttttctttttttcgcagtttttttctaccgctgtttcttctcttttttttcttttttccacagtttgctactgcatggataggagaaaaaatcataattagtttactagtgattagtttcctatttttactagtgattagtttactagtaatatttttaaatcttaacttaaaagttttcaaatttggacttgaaagtttttaaatctcgagttgaaagttttcaaatctcgagttgaaaattttcaaatctcaaattgaaagttttcaaaattttcaaatctgaatttgcgaatctcgagttgaaagctttcaaatctcaaattgaaaattttcaaatctcaagttggaagttttcaaattttcgaatctagagttgaaagttttcgaatctgagttgaaagttttttttaaaatttgactttaaaatttaaatcttaaatcgaaagtttttaaatctagcttaaaaattttcaatctattaataaaaaaatctccaacaaaaattttttaaaatctttcctaatactataactaatagaggaacttaaggggagtgcgcgctagcggcgcgtacacgccagctagccgcccccgcctccccctcggcgttgttccttggtcgctacctgttccttgaggagctcttcgtcgtcggggtatgcctttcctcattcgtaagcctcctgcacctctcggtgctccgccgtctctccctcccagacaatcgcctcacaaggcccaccttcctcgcagatgtcgtcgagccctacgacgccacactccgccaccttgatctcgggaagcgctcctacacggcggagatgcgatgcagcgccaaccaatcagtgtggaaggaggggacagagagaagagagatggaataactgacatgcaggtatagggatatttatgacatttcacgcgatttctctcttctctttaaccaaaaattattattttaataggtgtggtgtccagcagcaaatatctaacttctaagagtttattctccaaaagtcactccgtgcggtgtcttacaactaaaacagtgaagtcacgatattctttagcaaaatttgcatatcctcaattaattttttgagggtttatttacaaaataagtttatattaagatgcccaaatgtaagaaatccagctccatttcggccagactctcaagctggatttttcatattttgatccttttaaaaaacttatttcgcaaatagacccctgaaaaaatttatctcagaaatgatcctttttggggcgccagagtggctggcgccgtcatccaacgggacggcgccagcctctctggcgccgtcctcctgccaccgtggcgcacgcgaaccgacgtggcaggaggagggcgccagccatgctggcgccgtcccagggaggagggcgccagcatggcaaaaaaaatttaaactcgaactaccacttagctaagtccgaaaatatctagcataccacttagtttactttgcaccttcactaaaattagaccataactcctttagtaaaactttttgatcagcatgttaaacataatacactctaccactatatgaaattacttaatctaattaaaaatataaccacatgaaatgacatatgtaagttaaatagtacatagagatgcaattttttttatttttatttcatttttttgatatttttttcatacttaggagaacataggaaccaaccgtgtaaaaaataaactcaaacggacaaaatatgtgacatgtagaattttccaaaactctaccgaaacggacaaaatatgccatctattaaaataggcgtaactttctcatacggactcggaatcaggcaaataatatatgcacggacatctacagaaaaagttacatccgattctccctagctttgccgggttcggcgatattaaaacctccaaattccgcttgcaagattgtgttttcgaggagagaagtttttcggtggagctttggaaaattccacatgccacatatttcgtccgtttgagtttattttttacgtggttggtttctgtgagttcctaagtgtgaaaaaaatatcaaaaaaataaaataaaaataaaaaagttgcacatctctctcctctgcactagttcggagagaggagaggagaggaaaaattctacatgtcacatattacgtctatttgagtttaatttttctatggttggttcttgtgtatctctaagcgtgaaaaaaatatcaaacaaataaaacaaaaataaaaaatttcgggggggggggg

SEQ ID NO: 21251 - DNA, 12629 bp, Oryza sativa
ctccccctagccacctcagcatcgccccgccacgtcggcggtgggacggcgccaaagaggctggcgccatcctgttgaacgacggcgccagccactctggcgcccccaaaaggaccatttttgggataagtttttctagggatctacttgcaaaataagttttttaaaaggacaaaaatgtgaaaaatccaggactctcaagagtccaagagaaggccggcacgccgggctccgacccggccaaaaattcccaaatccaacctgtacgcgcctctctctattctgatccacaccaccccaccacgccgccaccacctacccaccaaataattccaactccaactacttctccttccttctcctcctcctgggcctccgctgccagcgatcaagccagcacgatccccccgcgcgcgcccccagtcaaccccggcggccgccgaggcaaatgccggctgcgggatcccggcggtgaaggagcggacgccgacatgggtgggcttcgtgtcgacctctccggcgcggagatccgcgtggaccccgcgtgcggcgccgccgccgacgatggcgggagcccgcccgtgttcctcccccgccagcccgccgcgcccccgctcctcgcgctcgacatcggaggtacgcgcgttttcctcgctctctcacgcgcgaagtagacgatcgtggtggatgaactcgctccggggtggtgtttttttttttttccgcagggactctgataaagctggtgtacacggcgagctgcggtggcggaggcgcggagctgcggttcgccaagttcgagaggcggaggatgcaggagtgcttcgacttcgtcagggcgcagggtctcgtccaccgcaatggtagtgcgtttttttgcgctgaattttggttgattctctagcgttctagctccatagtttttgagactgcaaaaactatggatggtaactgcctaactggcgtgggacttcaatacttgatgaggaattgttagttgctctcaatttaggactgtagcctgtaggagctcatcacatttgggaatttctgtggctattcatgctggcatctttgtctgttcgtgatcaacaaagcaagctcactgtggctgttggacatggccggtgacatttgcaagcgtttcactccatcatgccggcgtgaagaaggctatatatatgacgcgatttttactgcaaccaaaattacaatttctgttgttggagcttcctgtgttcgtgggaagaaaaatgttggaactatctgttgtgagcttaattatatttttttaattacaggatcaactatgggttcaagcaaagaaaatatagcattgaaggtatgatttttcttgtgctatgtattagtggtccggaaaatcaagatatcaatgcaagtggagaccattccagcaatctgctgtttcctctacatttatttgcatgttcatatgaatgttttacctattatcatacccaaagaaaaatcaagagctttgaatggcttcattattgctcactagtgatagcggatgtatgatgggctttgtatggcattcaatagtttactatcatatgattggatgttgctgctacaatccattgaaatcatatttattcggtggaattcaaaaaatacaaacatagaaattagttgcttacattttgtatatcatattagttgcatttaattgacacaactaattctcgaatttaattcatggagttgcattgccaaccgatgcagagttacagaaacaatgttgcagtatccccaagcagcggagtataactttttatcattattatttgaatattattttatttagcaaatcagggctttctcctccttggtatggtatcactacatcattatagatgttggcaagtatgcttttcgagcatttaatgcacagctttgtgtgaagacgtgaaacattgttgaatatatgatttagcagccttagttattgatctaacatatatgatattatcatcatctttttctttgttgacctgaatagaatttaatgtgatcaacactgtctgcaggcctcaggtggtggagcatataaatatactgaagattttcgtgagaaattaggagtttgtcttgacaaggttgatgaaatggatagtgttgtttctggagcaaactttttgttacaggtcagtcatatgcatctatattcattgtggccgttaaataaatcactgcacatcttgaccactctgtagattttcaatttgtattttggatgggaccaccaaattcttgagaaaattgcaggcaacttatcgtctgtatcgtctggatatttatttcttatttggagattgttttggttaaactgatactttcttgcagagtgttcctggagcagccttcacacacatgaatggaaagaaaagttctgttgatatttccccaaataacttgtttccttaccttcttgtcaacattggctctggagttagcatattaaaggttgcacttcttcctcatgatacctgtatggaaatgccttacaatgcagctcatataaacatgttttatcaagtttaatgtaggtcactggaaataggaaatttgaaagggtaactgggacacatattggtggcggaacaatgtttggtttagcaaaacttttaacaggctgtaagaggtaatccctatacttttatgtcatatattgtcttggctactgtttcctcactgatatggtataattctctagttatgacgagttcttacaattaagccagaaaggggacaattttgttcttgatctaattgtgaaggatatatgtggggaacttgtttgccagaaggtttgcctttacccttttcttgttttatttgattgaccaagacctcttgtcttgcaaatttaattttcactttgtccttgtttcttttgttttagttttggtaggccagtcgtgcttttgcatgcgggctaactctaccatacttgattgtatttatttatatgcaacagatttattcttttagcatcattaacaaagcagtatgacttctaggattattataattattaatgacatgcacctatttatttatcttcagctatcttttaagttttgaagtgttgatcctttcatttcatcattgaatatttgttcttacatcttatgggtcccttcttatatgctccagcaaggactttcaacttcaactcttgcttctagttttgggaaagttatcacttctaagaagaagttaacagattacagacctgaagatctagcatccacattgttgagcgcttttacctataacattgcacaagtgagtttttgttcgatctttacctataacattgcacaagtgagtttttgttcgatctttcttctagctattaagtcactacagattatgttggaagtggataacgtaagacagaggagcttagttaaattctcttggttccttcctcagctgtgtgcatctatggtacaaccacactagttaacagcactttcttgaaagaaattacctgggaatatgcagttataatttggaataagaaaagcacagtaaccaacggtttcttctgaacctaggtagggataaaagaaacatgtttaaacttaagaatgtttcagcagaaagcagtctaggcaaatgacctcaaacatgctggtaaaactttatcagaaagaactcttgttttacctttcaacttatgcggttctgttgttactatgttttcagttactggttgtggtaaaataatcatggtatttgtcattcagatttctttccttgttgcatcaatcttgcatctcagaagagtgttctttggtggatcttatatacgtggacataagagcacgatgcaaaatatttcttatgcaattgacttctggtaaatacttaaaacttcctaaaattttaagtgtatcaatgtggatgtcatttttcttcaaaaagttatataaaactgtatattcataattgcaatattccatttgttgggactttaatatgcgaggtctgttattcaggtcgcagagtaaaatgcaagctgtcttcttgcaacatgaagggtatttaggagctcttggtgccttaatgagttatggtgattctggagataaaaacatgaaccttgaggaaatgaaagaggaggtgagttagtgagttactaagaaaatactgttgactgtttatcattgtcctactactccaaaaagaaagaaaacaaatttggctctcattctttatgtttttttatctaagaaaaagtttatgtgctactagatacaaattacacaaaatctagagtaattcacaagtggaggtgttatctgcatcagtctatttgcaacacatgtccttttgtaaactgtttgatattttccaataggtgtttatgtcattaggattatttctaattccaagctcaaacgtgggagtttcttgtgctctattttatgttgctgtaggagaacatccatgaatcagcaacacctattgatgagacatcaacagatgaacataatgatggaaacatatttccttatctccttgttaatattggatcaggtgtcagcatgatagaggtttgccaatacacagcttctcattgcatttagtattttatttacaggacagttgttaatagagcattgttttgtgaggcaggtaactggaaatgggaagtttgagcggattataggatctcacctaggtgggggcactatccttggtctggcgaggcttttgactggttgttcaaggtaatattcagtattcattatgatttgtttattttatattaatattgggattttatttcatactgattaattgctttttttttgttattagttatgatgaattcttggagttgagccagagaggcaataatttagctgttgatttgactgttggtgacattatggggagcatggttacccaaaggtacatatacccatactctgacaaaaggatttttttttttggtgaaacgcctgtgggatgttaatcattactatgccgaccgacttactaagagtacaatacatatattagctatttgccaccctgagatctttggtggaagaagccatagcttggttagcaaatgcaagcatatgtcacttatgtccaccattttatttgcatatgcatatgtcatcgactctggtgcttggttacattactctaatgatcgaaaatcacaatgaccacttgttatcctatggatgttaaatggggcttccttgcgtcactactgcagctagctttggaaaagtgagttcaagtagactttcggaatacaaagtagaggatcttgcggcagctctattgaattctttcacctacaacattgggcaggtatttccagatatctgagttactaggtgtcattcaccaataatgtgctgacctcattttgtttctcttttagatagcctactttgtagctaatctttctggtctgaagagaattttcttccgaggtgcttatatctgtggccatgagaagactatggacaagatttcccattccctcaagtattggtaagaaattcctgttaagtttgctatccaggaacactttaatgctcagttcaatgcgattgacttgttactagttcattacaatttttcttgctctcaggtccaaaggccaagttcaaacaacatttctgtgccatgaggggttcttgggaacactaggtgcattttggagctatgagaacatgggtattgacggcttggcagcacatgaagtcataagggaggtcttgcttggcgctccttacactgggcagcttccatctctgcctctgactcaccaacaggacaatgtaaatatttgacactgacacgtttagctgcgtagtttaattaccctatgttatttttccttcaagagtgcaaaaccttaatactctctctctctctctctctctctctctctctctctctctctctgctgtttttagggagaagatacgaccattgaaggagaagtagaacggcttcgacatgacaatgctgtgctgaaggctgagcttgaacggttacaaagggagaacacagagctcaaagcgaagctggtaaaatctggcaaaccaaataccttttatcattaaacataggatgcagtagtgaagcatgattccatggcaacaagagaaggtgtttgagggcaaaagttcaatggccttgttatggagatcggagaggcagaggctgttcaaccaacccaccacctggttcaagtcttatcaactactccggtacggccccaatttgttaaaagactgaggtgtgtgatccacatggaaacagatgcaactaacagcctaatactgaggtgtagaaagttgttgtaaacttgttacactttagcaataacttttattccaacatgatttttacagaggaagtgtgcacacaggtagttacccagttaacattgctcatacatattgagctgatgttgtatatttatttatttttctttacttatttttgttggtgtaaccttttctctgttgttctgtatcttgtaaatatggaagcagccgtgataataaacatatatggtgtctttgtatattttgcgaagatgtctatattgtcatcaagaatagtacaatacagaaatgttcatgatacttgtcgagcagttgtcttccctattataaaccaaatcttaactattgaaaggtgaaactcaaaatgaaataaggatgagccacatcattcgataaatattagccgttggattcactacaagataaaagaggataaatgaatcttaatcgttggattagctggatagtaaaaataataatttaagaagtttccggggatgaaactactagaaggaaagaaagaaaggaggggaaaagctaaaagaataaacatatgaaggtataatgttatacatataatttacgatctgtaaccagtggcggatctagaaaaaaaattaagcctggacaaacctcataaagtaacaagtaaacacaaatactatagtattttataatgaatagaagcaaaattgggttgctggctaataactaaatatgataattagtgctaatctaatggcgcatgtgcagctagactaatggctaagcattttatttagctataatgtatggatgcatgtggcagggcctgttcactttgatgaaaaaaaaaaccttaccaaaatttggcaatgccaaaatttgccaaattttggcatagttgctaaaattttggtagaatttcttatataattaccaaaaattgacagcaaactaaatatagccacttttttttgacaattttactaaaatttggtaaggttgaaaatggcatcaaagtgaacaagcccgtagagcctgggcgcctgcccatgctggccgggcctcggctccaccactgtttgcatctattgtaaaaactattttacaaataaaccctcatcataactaaagattcatgggtcaagattgagctatttcgacttttcgagtatatacaaaatgtatgttcatttgattaattttgtttctaacaattatttttaatatatttgagaaaaattactataaagacatgcacagttatggtcaccgaatataagttaaatgattttcacacgaatttaaacgaaatcaaactcattccttaaaaacctacaaatatttgtgcatagcctataaaaagcatgtgccaataaaaagtaaggggtcatgcaaccacgaagaactgtaggacaataacttataaaatttgtaacaaatattaagttatttagtgtattatcataatattagtcagcctaacctatgtctaaactcagcctaacctatgtctaaactatgttttttatgagcaacgataaacctataaaaaaattaccactcccacgtaccacataataaaatgtctagagtcgtgcgaatgggcaatataggctagttcaaagtgaaacaagactgaaaacttggaaggactttgtatctatcctccatcacctgtacataaaacatgaatttcgtttttttagaaagaccaaaattctaattccatgatggcttcatttactgcgtattattctctgtataaagtggttcttttttctttaacaatttcacgatttactgcaaagtattctctgtataaagtagttcttttgtccgtaacgaacaaaattctttttttcccttaacaatttcaaaaaaaatattggcataaaggagtttatttttacttaacgattgtacgacaaaattattttattcttaacaatctcacaaaaaaaaaatattgccataaaggtggtacactgtaactgtgaaaacaaaaatttaaaaaaatgaaacataaccattgtcataaaggaggtaaaacaaaaattaaaaaaatgaaacataaccattgtcaaaaaggaggtacactggaactcccaacaaaaacaaacaaaaattcacgacgcctgagagattcgaactctcgcggggaaaccccatgtacttagcaggcacacgccttaaccactcggccaaagcgtcgtctgtgctaaaggtacaaagcgcttttatatgtcataaagcaattgcttttcacaaagcgagactctgaagacatgaagatatctgaatctgatcggatatccatctctcctgctatctgcactagaagaaatgagacgctagcaaaggacttgggatttgagaagcaagcatgacactgacgttataagccactgagcacttgcttggcttgcaagagctaacttgccttggaatactgcgtccagattaacctcctggccgccacgtgaactcacgctgtcctgccgttgggtttttgttcattctaaagctccagcagtccagcctccagcgcacaagaaaaaagctcaaaaaatggatcacctcatttcctttgccaattccagcttccttctgagaaaggtctaacgattagacgcaagagaacacttgcccgcacggaaaacggagcagcgattagcaggtgattaattaagtatttgcttttttttaaaaaaatagattaatttaatttttttaagcaactttcatatagaaattttttgcagaaacacgtacgcgtggaaaacgagagagatgagttgagaagatggtctggctctgctctatcaatgcatggcgaatagcatatcacctgacgttaacttcctgaaccaagcaaagtagtacaatagtacatgtcttcacacaatcaaacacattgacacatgtagtccctctgtggactagctttagtttagagcactcgcaataataaagtaagatgctctctataaaacatgtacatctcagcaatagactagattaatagtaaaccacctcaatagtatatctacatcggtatctatagctctctaatgcattgcctcgtttttctctatagactatctccaagttagcagatagctttgctctctctctttatttaatatcttccaagtagaaaaatatgctgacatggatctcttgtagagagcctatagataaccattacgggtgcccttagaaaaaccgaaatcttgaaccgccccactccatgtagtaaggggttgtttggtttacaactaaatttgctacatctaatcttaaggcaagccacactttttgatagacagcgtttggtttctgccacaattttactttacctaactcctagctacttggcatacatgtcatatactctatggtactcttttttttttttgcctaactttgcctaagcttagtttgtcattttgtttgccataaaagtttggcaagattaaacttagccaccttagcaaaaaaaaaatatgtgacaaatttagttgccagccaaacaagccctaaggctctattctttccttattaggggcaattgtaaatttaccatagctttaaatcgttattgcaagattgtcattagaaaattgcaaaaacaccactagaattgtcatttgagtggcatccttgtaaaattgaaaaaacttgtggaaaatttgcaaatgcccctttttattgagatgagaattttatctcgatttttattagcacatattttaaacagctaaacggtatattttgtgttaaaatttcttatatataattgttttaaaataatagataaattctttttttcaactttgaaacgattaaaacctaattaatcatcctctaatggttttttcattttacacgctcgtacttaatcttcattttcattaaactcaaacgaattattctaactaatcttaaaaattaaatatcctagttataagctgtcccctccatagttagtactataagttatgagttatatgagttatgagttataggattgagattctctacagtcgaatgcacggtgcttttgtcactgacatatggactcagggattattgggtccacatgagttataggattgagattctctacagtcgaatgcacggtgcttttgtcactgacatatggactcagggattattgggtccacatgttaacaaagtcacgtgattttaactgcagaggatcctgaattcctgatcctgagttttgagcagttgagcactcatgttcagacagagaatttaaccgaattcagacagagaatgaatgatgattgatgggtcatggcacaaggacgctaaaccgaagttcaggtgtgggaacgaaacgtgcaggcttgttgcacctcatttcccttccttcacaaacctcagcacaaaaccgatcgaagccaaaggcaccgcgtatatctgctggactctggaatccagcacacttcaccggttgcgtgcaagcctcactccaatccaaatatccaatgacaccaacaccatcaatcctcaaatgctcattctctatataaaaaccaaacccaagaactcctccaaatcgactagctagcagtgcctctctagtctctatacaagaagaataagaaaatctcattctctcttggattgcaagctacagtgtctgctcggtgcagtcacagagctagtagcaatggtcgacatggcggaggcggcggcgtccatgtcgccggagctcgccgcggcgctggcgaaggtggccgtgttcgcggtcgtgcaggcgctggtgtacctcatcctgcgcaagtcgtcgggcgtcttctccccggacaggacggcggcggcggggtcgaggtccctcagcttccggccgatgcggagcatgagcgtccgccgcttcctggcggcgctctccgacgtccccgtcggcgtcacggaggacggtggctcgccggcgccggcgccggcgccgccgcatcgcgggcctgcagaccttgccgagtagttcattgttcagtggtttcagctaattaatgacagtagtatactcgtaatgcatttgttcatggctattgtgaagaaggaatcatttaacattagatatacttagtaagttagtatgtgctgtttgtgaattattatgatatagtttggctttgtacacattaataaatcttttattttactgtccatccaacagttacacgtatggtatactcgtgttttacagatcaatcaattaaactggatcattcagagactgattaaaatacgtagtagtactacctgactatatcaactgagcatattcagtacaaagttttcaagtctacatgtataaagcatctgaacccgaatacccccgtatgcaaatctggaaacagaaaatcacacaatagtgaagcattttgttcaatttggacgctactatccactaatattgtcttcttttatgcgccatcgtaaaaagataaatcgcatgtaaatagtaatgtaaaatgtttgaatgtacactgtttggaccatgaatttgtcttctttttctccacatgcaaatcaaattttgagttgattttttatggtactatatatgttacagtattctcggaatcttttcatattttattgtgattttttatgcacttttaaaacaggtagcacggtagctcatgagattatctcgtatgtgtgaggcccaaactaagtaaactttaattttctctactttccttgctatagttgttgggaataagttcactttggatccctcacgttgagagcgagtttgaaaaacagttgaaccgtaatactaaatataataagtccctaatattataaaactgaattaaatgaggtccgacattatagcacccagttttgtctgacatgacgctttgactatagtcagcgactcaggcactcagcgttgacgacttagcctaacttggtgtggggctatgctgagtctttacttctctccttccctcttccctctccctcccttgtttgtacatctccctgtgatggagcaagggcggttgcccaaagtagtgtagcggtgaggagagtggtgttgaggtgggggagagcgaaaccgctgatgccgttcacgaggaggcggaacatatgttgtggttgtgaagaaagtgcatgaggatggcgcaagtgagctcactggaggcgacgtcgaagtcgtgggaagctgatgtgggtgcggtggtagatgtagaggtcatgcggagcaatatcccaagggcagcacgactcgctagg

SEQ ID NO: 21252 - DNA, 4177 bp, Oryza sativa
attggcctcctggtggcagcgaacacccttctccttgccagctcctctcctgtcgatcgcgatccttctcctgccttctagccaacttctctcccatcggccatagcccttcccccgccacttgccgcacaccacccttcttctcgccagttcctctcccatcggccgtggtccttctccctgccgcccacagtgcatcacccttcttctcgctggttgatctccccaccgcttgctgtgcgccatcccttctgcctaccaattcctctcccgtcggccgccgcctcatccttctccccatcggccattgccctggagaggataggggagggagagagagagagagagaaatgaggaagaaaatgctgaccactaacatgtagggtccgcgtgggtcttgctgttgactcagccatgttgaccatagtcaactcgtcacgttagttataactaggcacaatactgtcctagaaggctagaacctcggataatccagttttgtatgttgagagacacgacgtgatccaaactcgacgtcaatattgggaccacctatacatttggcgacaaattttctcctaaaaatttgacagatgtaattgtaatacaatcgtagtgtaattacactgtaacttatatgtaattacactgtaacttgcatgtaactacagtgtaacttgtacgtaagtttcatgtaattttgaatcattatatctattacaagatttgttttgctgaggaagaaaaaaaatcacggcacacacatatgtataaggatttgttcccacaacctccattttaccgaaataacatattacagagagatttttgaaagttacatacaagttacactatagttacagtgtaattacatgcaagttacagtgtaattacactacgattgtactgtaattacatctgtcaaatttttgggagaaaatttgtcgacaaatatatagcaaaatcgtcaatattagggaacataagtgaacttattcctggtaggtagctcctaatgggccgtgaagcccctattcaagcccgatctggcttaacggatacacacacacaccccttacgtaaacctgcaacagcaaaggattggaaccggaaaagaaagatgccatttgcgtacatgtatacgcataacgaacacatgccacacacacacacactggcacactccatacccctcccgtaacgatcgaaaagcagttggagatggcgagagtaattgcgcaattgcgcaatgcgtatatatggtcccccggcgccggcatcacccgaacgtgccgtccatccatatataccaccaccgctgccaaaaggtcaacaccccactaaagtaaacaccactgccaccaggacgcgagagtgacacggacacttccacagacacggccgtctcccggtctcgtctctcgcccacgtttctcgtccatcccgacaacgagagccgatcgatcgatcgcgcgcgcgcagcggaaaccggcagtatcgctcgaacgacgtacggctcgcacaccgcgccctgcaccgacgcgccgcgagacgcgagaagccaaacccggtggagtccagcgcgcgggcggcaccggtggcgagcgggcaaatgcgctgcagatgccgcgttcgggcttggggtcccccgtgccgtgtgcctcaccatttttttcggtgatctgagcccgagggaggggtggggtccgtacgtccgggtactagctcgcctattggcctcaaaagctgtaagttggcgagctctgtttactcacctgtggccccctcggctgatggcacatagtgggcacgctacggcgactgcgaaaattcggtgatctctcggtaggctcctcgcaactggcatctggaattaactccaagtactacttattactacctctgtccaatagttgtatttttaggatttgaatttgtttcaaaataattatcacaataacatactaatggtttcattaatcacttctcattcaaatttctttctattttactgtcatttacccttccactcttacatacatatcatttaataagggtatcataatcttttttcttaaatcttaatatatgctaaacaacctgagtaatagtacttatttagtggacaagtatttattcagattaatagttagaaatagcttttttgcgaaacgagaggcaatcaatcattagtttggaaaaaataattaatccctccgttttaggttataagatgtttttgactttggttaaagtcaaactactttaaatttgattaagtttattgaaaaatataataatatatacattaccaaattaggtttattaaattaataattaaatatatttttatagtaaatttatcttgggtcaaaaataatactattttttctataaacttaaatttgtgtctgcattgtgcgttccaagtaactagcttgtcttttgtctcgcaagattcttccatcttttgctcatcgtcggtgggagatcgatcgaccgatcgatcaccagcatttctcgctttaaagccatggatatggatcgatcacagatcaggccatggtgcagtgcagcacagctccatgatcgatcacatgagcccattatatagagctcccacacatatgcctccttttatgcctacgctcatgtcgtcgcatggcattaagcaattagttggggagctttgctcgttttgctttaaccttttttacaatgctagtagtaccatacttgcaaagccaccattaaagcgccacgcccttgccttgcttcaaacgtactccatggatctgcatctttagtgtagtagtgataatagtacaaaaaactcttttcccttgggatgctaaattcatcatgattatgtccttttctttcgtcggatgaatcatgcttaaccttgtgaaatttataggatcgaatcacaagaactaagccaaccagagaggggggtgaatggttggtatacccaaaaaccgaaaacttttagcagaaataaaagttacccttaatttcgatgaagatcggtcttatcggagtagattagccggtctgaccgaagcgtagccaccggtctgaccggtgttgatcttccggttggactgccctggaatccttgccgcgcctgatgtcgccgccggtctgaccgcctcgctcccgccggtctgaccgccgatgagttaccggttagactgccgaaacccggtaaacacaaatcgaagaactcttaaagtagatgacaactttattgattctctctatgtttacaaagtgcaccaacagcactccttacaaaaatttctactaaactcgaaaccctaactcaaaactcaactcaattgctctcaaaagcgataccgggaagcctcacgctccccctctatttatacatgaggtaggcagcctaaagccacgaaccaaactcatattaagagtcctaaacaccttaggaaaccctcgaatacaagaaagaaactttacatagccaatcgtaccaaatttggactccttccaaattcgactccgtatcccatacgcacacaatacctccatcgtatgccatatggaatctccatcaaccacgtgcatcaactctagcctaagtatcccgcatgatctctgaccaccacggacgtcgtcttatccccaagccgactcccggtccatcaccgcaaatactctcccgaggcatcgagtcacctacacatgaaataaacaaaaaaaccatattccgagaccaagctatctccaacttgactgattagtaacaaacaacagtattacacacgtatagcatccatctagaagccataatcatgaaataatcacggatatccaaacaaacaacccaaaaccgaaaccgacacagcgtcggccggtcagaccgcgggctggccggtccgaccgctcgatcaccgccggtctgaccggcacacactgcccggtctgatcggtcacataaaataacgaacctgcgattcacctgtaaatccaatcatctccaaaaccacttcgtgaacaaaaccaataatctctaatacccaattattcatcacagaataataataaaaaacacctttgattttataatctcccccttgatgaacacattggcaaaccaataaaaaatgttttggtgtttggaaaaataaaaacaaaagtgataaaaagc

SEQ ID NO: 21253 - DNA, 1280 bp, Oryza sativa
ctgtttccagggattcggtacccattattttgctcacatcgaatacgtccttgttgtcaagactgtttccaaggattcggtattcatttttttttcatattttttattctctttttcacaatgagcaattaaagatatttgaggagtaacaattcaataaagcatatatagagagcatttataaatcaaaccatatgctagcatcaacattgcatatttgctcaattcaagtagaatttaagtgtcatgcatcatctcccttaaaagcaaaatctaaatctcatgaaaagactagaatacatacaagctatgctagagacaaataaaccttcaaagtattgctagcatgtacaagaaaataccatatgtataaataaagctctcttttctcaattttttcattgtcatattattgcttgataaaaccatgaggtacaaactccccctcaaattatgccaaaaggatgaattattcccaattcaccacgaagaaaagcaaaacgattaaaatccaaaggtttagtgaaaatatcagcaagttgcaactttgtgtccaaaaactgcaattcaacatctcccttctcaacatgatccctcaaaaaacgaaaacgaatatcaatgtgctttgtgcgtgagtgttgaacaggattcttagcaatgttaatagcactagtattatcacaaaagagaggtactttctcaaaagtaagaccataatctttcaaagtagataaaagccaaagaatctgtgaacagcaactacagcagcaacatattcagattcagcagttgattgagcaacactagattgtttcctagaagaccatgcaatcaatgatgtaccaagaaaatgacatgttccactagtacttttcctatcaattctacaaccaccaaaatcagcatcggaatatccacttaagcatatagaagatgaagtagaataccaaattctaaactcaagtgtatgattcaaatacctcattattcgcttgaccgcttgacaatgtgaagcacaagaagaagcttgaaagcgtgcacacaaacacacagcaaattgtatgtctggcctagaagcagttagatacaacaaagatccaatcatacttctatattccttttgatcaacagcttcaccatcttcattaggatccaacacagctgtagaaccaattggtgttaaaattggcttgcaattctccatcttaaaccgtctcaaaagatccttcgtgtacttcgtttgatgcacaaaagtaccttgaggtgtttgcttaatttgc

SEQ ID NO: 21254 - DNA, 1843 bp, Oryza sativa
cgcgttacatttttaaccagtagtatccagctgtatatggaaaggaggaaaggttccaacctccttcctaaatatctactcccttttttacccaaagcaatgggccactgttgtacttctggtccagctttttatcttttatatgcctttactgaccttactatcttttttattttcttcaattatctgatgcagcaaattagtacattagctggcaatttgatcccaagttactttgtatgggaagtaatattcactatggctattattggactggggttgttgcttttcgcattactcatagggtccatgcagaattttctccaagctcttggaaaaaggtgtgcagttgtaccacaagtttatcctatatgaagtgtactgatgagatgccaatgggtttagtatatatacatgtaaatgatgttacacatatgcacagaattgaagagaacacaaatagcaacaacaatcagtttgaataatagaaactgtgcggcactctggtagtgccttttcctaatgaagtctgataactaatgttccaaagggtatatgttttttttttgttttttttgcaggagactagagatgcaattaagaaggcgtgatgttgaacagtggatgagccataggcggctgccagaagatctgagaaggtcttatatcttccaaatcaaataactgagatatgaggaaactgacctttttttttaattttctttcctttcacattattaaagaagtaaacatcatattacctgaaaaggatataaatgttctcctagatctgtttacctagtgaaatgtccggtttcaggccttcagtggggtaaatgaacttcaatccaatttaaaatgtgactaagaatcgaaatggagaaaactgctaccatcatgttgttttagtaacaatttcgaacaagggggaatggatgagtattagagataaatgctggaattatatgcatacatatcttgataatgtaaaatggctaatatttcaagcagaagatataaatggttaataaatctgacttttattcatgagtgaagatagtaccattttttcttcgtgttagtactagtaaaatgttttgttatcaacaagctgtagtaagtagtaacacatcagtaacaaaccccaaatttctatgctgcaaggtgagaatgcctaaagctttgtgggtgtgcaggagggttagatctgccgagaggttcagctgggtagctactagaggagtgaatgaagaagagcttttgagcaatttgccagaagatattcaaaggggcatacgccgccatttctttgggttccttaagaaggtttgttgattgtgtctttgcaactgttttttcctctccatcttcaattagttgacacttgacactgggtaggtgcatattttaattattaatgcaagttttcctgatagcctggacatatccccgttcgcaattgcttcttgtctttcagataattattcatgtagtaacaactttactaggtaccggtatgagttcctgttactggtactggtttttttttttgaatgaatactggtagtggttttactcagtagatccttacacaggaaaggactgaaaacaaacttcctgtagaccaagttaatccaggtggtacaggtgtaaaatttcggttctgtgcggatgtcttcttttgaattttgctttatgaaaggaaacagcaagttttgcgatgtgtatatgcttaatgatttcctctgttttgccttcctttttcttgcgagaactctgtttttcttttaagaataatgatatgcgactctgtttttcttttaagaataatgatacgccacca

SEQ ID NO: 21255 - DNA, 13551 bp, Oryza sativa
agtattaggtatttaggttgaggaaaacccaaattaatctaagcaataaatcaaatcgaagatttagggcctatttggcacagctccacctccacctccacccctcctggagttggagctcagccaaacagtttcagctccaccaaaactgggagtggagttgggtggagttatctcacaaaatgtactagagttgtagagctgggtttaggcagctccacaactccactctagcctcaactcctagagcaatatttaggagttggagctgtaccaaacagacccttactcctacataatttcaagttctattatcgatgtgtgacaggaaatgtgcgaaaagtgtatttatttctcccaagtatatttgtctgttttccagcaaataacctttcaaaatatttatccattgaggagactaagacgtaccacctctgtagaattttatagggtgtattttaattgataaaactcttaaggtcacactttgacagtatattcctgatatctataaaactaacattttgtgaaagtatttgaaatataatatacttgtactactacttccatcacaaaatgagttcatttttcacccactttatcaaatcccatgtaattgtttttcactttatctactttcaatgcatttgtcccctacttttacaaattccaatgcaatgattgcttaaaaatgaacttattttgggacaaacgggagggggcaaaaaatatcttattttgggatagaggaagtataattttatacagtaaatatacttataatttgaataatcattagtcaaagttcacaaagtgacttctttttcaaatcaaaacacgtggagtgtgtagttattttagacttttttattttttgccctaactagttattttagacttttttattttttgccctaactagattctttgaaagacataattaggttatattatggcggtgtcgtcatgtttccttgttaactttttcttaattttttttttacttcatagatataggcacatggtgggatataaacatataaggtgaaacagatgaagtagtttattaatgaaaatgttttgagagctgcttatttgtgcatgatttatgtgatggatgagcattgctctctccatttaaaaatatagggcatataagctttgacacggtcttcaacatagaactttgactattagttcttttgcaaatattaccaacgactatgaaatgaatatcatacaaaggtattttcaaatatgaatttaatgatatcacatacgtaacacacaaatacacagcataaagacactcctcagatgcgcagtctattgtatcacataggaattttgaatttttcaattagtgtagctggagcctggaggatatcatattcccatggccctaacttactctgttcactgatgctttcgtgaacatgaaaaacaggtatgaatcaccttactggaagaaccttgcagcaaatcgcatccaagtcgcatggaggtatcggaaaaggcgactgaagagagctgagatgcaaaggttgcaatagaaatcaagtcggcaattttcggttgtacaatcacgatctacggggtatgcatagtcggacgtcatatagcgccatgtgcacaatcggcgtatgcatagtttgatacttggatgtgcatagcggactttagccattccactatttcttgtgtgggggaagtaggctgttagttttggtcttgtcggttttgtgcaggttcactaatttgtgtttcctcccgtataaaatgagatgtagaagacagccgatgtacataaaaaggaaaagaagttccctaaaaactgtagatgaaaaagaaaagtcaattgactaggaaagaggcttttcagatagttctctgttatgaaattgttactggtggtttaatcctttcctccccgaattttgtaaaacgtattgaagattgcaagtttgcaattggaaaggacgacccaactctaaacaatactttgctatgctatctatctacggtgcaagcgggcaggcccgcaatggttcgtgagtctacccacttgcacccttgtatctatctatctttttaagttggcaattttgccggcttatccttggaccacgtggcacccttaaaatttaagatagatctaggaattactgatggtaagaaaaaagagagacatttacaatgcaccagaaaaagtgaaaaagttaagaagggaggaatgaagaactttctcaaatgtgaactaaaatagtgatatctataaccttctaaaaactgatgaaaagaatcatagatcaggattcagggaaataatcgcagaaatctctacatctagactctccaaaagtaaaggggtagacaaatccgagctctaacaaaaggaaaaaaaaaaggcaagaacattgaggcgatgatcttttcccggcgcttctgcacagagaacgagatcctaatcctcggataaagctccacaaacgttggtgcatagcggacgtggtgcgtctatccccgccacacaccgcagcatagcgaaatggacgtggttgctatcgccctgagcaaagcggctgaagtaccactgacaagtaggtcccataatattttttactgttttatatgactaatatgtgggcctcatatattattttatttttttttagaactgctactgacatgtgggtcccattaagtttgtaatgccacgtaaatgccatgtagatgtaactgttatgtaggacaaatagacgctatgccagtaaaaacagccatcaatgattcaatactattccctattagattagagctatatttgagggacccacattagacattttcgaaaaatcatgtgaacgagggaactaataggctattcccaatcagattcgagctatttgacggactcacattagacatttctcaaagatcatgtggacggggaaactaataggtgatgatctggcccaaacagcccaattctcccctagcctacaacacacagcccatcgctcgccccaccgcagcacggcctactccacccaagaaagaggtagcctagcctgcccgcccatcacctcgcggagaggtagtagtacactagtagtctagtactacacgggccgccacgtttgggtgcggtgtcgtgatacacgctacacggccgcgttggagattccgcgacggcggaatgcccccactaccccgccgtcaccggtggtgtggtgcagttttgtcttttgcgtcactgcgcacccacctcggttttctcgcaccgtctacgtagcgtgcgttcggtgcagccatacacggaatatattttttttggggggagggggggcacaaaattactctggatttgttaaccatctcaccggattttacgaccagaagggagaaggcccccctccaaagatccgtactgttttttttcttttaccccatctgaattgcaccaaccacggcaacaattatttatgcaggcttgggtgggtggtggtggatacccattctcttttctctctcaggtgcaatcgtacgtgcaagtgacaatctttttctgcatggccgatggctcctgccactatttactcggaaaatcacggtgaaaatccaggtcctgctgctcgtgctaccaccgaccgacagttgaaaaggccaccgcaaaaatgcggcaagaattcacatcgccggcggccaaaatgtgcacccccaaataggaaggaattcgttgcgtcgcattaatggtgcgcgatatgattcgggcatggctcgtcggccttggaaggcggagcctccacgacggcggggttcctaaccgtcgccgacggcaggtgctcggtgcggccgagctggctggagccaccgcgtcccccgccgccgcaggtgacgctccgcatccttcccttgccgaggtggtgctcgcagagcgcgtagccgacgagcgtcggctggctgcaccgccaccctcgcccgttcacgcggctgcaccgtgacccctccatcagcaccgccggcgcgccaccacctcgccgcttcttggctccaccgccgccgccgccattgccgacgctcttctcctcctccttcacatccacgatcaccgccggtgcaaccgccgccgccggctccgacttgctgcccacctcgccgccggtgcatggcaatggcacgctgccattaagaacacaaaacgcatcatttgcacacacaaacaaacaaacaaaacatgaccaaaactgatcaaaaatgtgatcaaaatacaagtggcaatctagtgcattgcccctggaacttgttgtgccgaactcgctaggtgccaagcaagattacgcgagggtacaaccaaaccaaacaggctgtggcctgtgatgcgagcctgattgatcagcagagctagagccaaacaaaatccatccacccccaacaagaagtggcctaaatataattgaattattatgggtggatcgatgcgtccatcaatccatcatgcatgggtggtggacatgcctacagcccgttctgtctgacaggaagtgtactactaaatgtctaaaaccaatttataattgcacatttgcatcgtcacccactatgaaacagtagtagtagtagaaccaaagaaactaagaaaaacaacactaataaatgggagtagtaacctgattgaatgtgcatctactatcattctattgtagtgttgttcagtcaactcaaatttcaaacagactttgttctgtctgcattttttgcagttcttcagcactcttacctcctgtgagcatctccagctcctccatgttcttcaccaggtcccttgctgtcgctgcaatccactccattttcctgggatatcaatcgatcgagttgaggccaaaacacacaagttctttcgattcagctagatctaagccatctgatccaagagtgcaagaaccaaacaaaatctgcaagcagcacgcgtacctgctgcaacaatgccaggcgccgccttgccaccccggacgatttcttgccaagatccacattcccatggtggtgcagctggtgcagcctcctcccaacaccatcgccaccaccaccctcccggcttcttgctgccgcattctgggttgcagcggtggatgtggatggatctgagctctgcaacgaaacacactgtggcctcctcctaatcctcatcgatgagtgagaaagaaacaaagaaacaaagaaagagagaaagaaagagaatgagagagatggcaatggaggaggagaaggtcggagatttggggatggtgcaaattaaaggaggagagcttttggttttattatcttttggtgatttggttgatggtgcctttggtttttatggctcatcatgcttttgcctgcacttatttatggaggagagaaaccagtaaatagaatactagcagatggtgcagttttcagcactgccttgctgctgtctgtctggctttggctcggcttgcacatgcctcccgccgggacatcgccgcggccgtccgatcgagggaacggacggctcggatcgaccggatgcgtacgtcccccgtgatgggtggcaccggttttgtatccgcatgcgcaacgccatgtgcgctgggctagctagggagatgcattatattgccgtcgttcgcagaatttgcaatctggcacagtgtacatgttggttggtcaattagcaggatatgtgtccagtgaagatgacacgcaatcaaaatgttaggagatgaaaatgttcatgttcatgctcattatttttgcgtgtaattttttcaagctgttaaacggtatgtttttttaaaaattctatataaaagttactttaaaaaatcaattaatattttttaaaaaatagctaatacttaactaattatacgctaatcctcgctacccgaactcagcctaagacctcattcggaagtgtgcatattatgtgtgaggattttaaaggaatttcgtatgaccgtgttaaaattatggtaagcctacacgtgaaatcacgggttttgaaatgcaaatggttgttgtcgtaggaattattgggggctgttcgattcagctaggctgaggttgaatgatgcagtagactagcagaaattttgcttgctaggtctttgttgccccgtggctgcagcgtcagccgcagctagcgattctgaacacagcaattatatgtcaataggattgtaggattttgattatggttcaactgaataattggctataatctcttgagctaaaggctactaggatttatttccattacccaatgaaatgttagggagatggctacggtcatctttgaaatgtaggaattgtattttttttatggggttttcacataaactagttcagtttcagtagcattaacgtgaaatctaagacaaagctacaccaagttgatcatagaatagttcacctgatcctgccacttagaaacgcaagtggcttatgctaatgactaatatttttatgggttaacacacgatgggtatcttctttttttttttgcggggcacgatgggtatcttcttgttttttgtttgatactaaatggatcgtgcatggaacgaacgaacagtcagatcaagtgggggcagtgagaggggggcggtgattagtcagatttagaagtgggaggctgggaacaaaggctgtgtgttcagcgcaaagtttaaattttagttaaaattggacatgatgtgactgaaaaattgtgtgtgtataacaggttgatgtgatgaaaaatgactgaagtttggatccaaactttagatctaaacacagccaaacagggacgtaaagcaagcaaaatttgggtttgtgtcaggtcatggtcagggacatggtgtgtctatgcatccagcttttggccagcatggggggctcaaagaagccaatctcctgcagactctgggctatcggctgtccattgcacaggtgatggcctgatgtttccacacttgggtagtcatatcccttagctaatgcatgcttaattagcctggccgttttaatcaggttcatttcggtttagattttattcagttaatccctattaaaaaaagattgaggacgatttattttataccgtggaattattctccattaattcctttcaatcaccttgaagccgaataaggccttaggagattttttgttttaaataaaacgcagtatccaacaagttacacgtgagatctttattttaagatgtggcgtctactggaagacatgcattgacaggttaggttgttcctaattgtagcaaaacttgcatgtctttaatcattaaaagaaacagaatttggtatcaaaattcacaccataatggtgtggaaggaccttgatgtatgttttttttttttgaatgaaaagaccttgatgaatgaaaggaccttagacatatgagaaaaatatggtagtattatttttcacctaaccacaagaactgtgagctggtctattttttctgtcgtttcatacaacctctcgaatattaatcactctcccaaaacataactatttctagctgtttaacaggaaaacaaaagtagctatattatggaacacagagagtagatagttataaaataatcttttttttgtgtgtgggggattaaaaaagatacaacagtcatttataataaaaaaaatctcaattccaaatctgatctatgattggagaatatagatcaaatttaagcttacatattcatggaatgatatattatatacttctttcgtttcacaatgtaagtcattctagcatttcccatattcatattgatattaatgaatctatagatatatatgtctagattcattaacattaatataaatgtgggaaatactagaatgacttacattatgaaacggagggagtaatatgttagtttataaaaaaatgtgagtattgtaatggcatgcaaagatgaatgaacattcttaagggaggacgggttcaagttctaaacttgacacaagtactcgcatttactttacagctaattatttttttttagtgataggcgacgtaccagtcgatagcaaagcgcccgtggtgacttcgtcaatctcaaaatatactaatacaacctttcgaaaatgcttataggagtagggtgtgcttgtgtgtgttcgtagcgttgagtatgcgtgagttatgagcacctacatttgtactttgtttctaaaaaaatgattttcctggtttccccacgccacacaggctaggacatcaaatctttttggtccatgcgtcataggcacaactattcattgaccaagttttagaaattgagtgaaatgcaccgttaataccttgacttgcgaggtgggtgcaatttagtcgcacattttgtaaaatgctctaacaagtcacacatcttattttggggtgcaaattacataaaacatgtgtcgtatggagtgttcgcaatgaagatatatgctatgttaatttgttttgcaaacatggtcacacgatccataataatacaacgtgcaatactaccggtactagctaaaatccaattaaagatgaattttgttatggattgccaagtacaatatagtcgtgttcattgaaagcatgggaagtagcatatacatgaaaatataaatgttaatatgtaattttaatgcttatcctgcccacattggtaagaaatgcattatgttatgtcaatatgcactccaatttgaaaacaaacaatccgtgtgaaaatgtatttagtaacatttacaccatcgaagcaagttgagtgacttgtttaagcattttgcaagatgagtgactaaatgcacccacctcgcaagttgtgataccaccggtgcattttactcttagaaattcctttagagatgagtaaattacaaccctaacgaaattggctattcattgataagcattagagtaatgatggatttgtgggtgaatgaccgtacccccacggattttaaatcttggtgctgacaattacttacacgcagtggtggcttcatggggtgttccatgtaggccttagaccaccctacaatttagcatatttttatattcttattatattttgaggaaatgttgctatttctgtatcatattttgagcaacttttgctatatcagtatcatgttttgaacaaattatatatgtgatattgagttcgtgatgttatgatatgtagtaccgtgagcctgcgagtgttcatgtaatgaaaaagaaagtgtcactgttaaagaataaaaaggaaatggaaattaccaacaggactgagaacaaggctttgatgggcactaccaaaaggcactctcgtggactctccggcccaacaatttggtgctccccgtagcttcctgattgaatcgcagctactacttagcaagtcaacctcgatcaacctaccacgttaacagaaactgtttctcaaattactgaaggagtcagtttgtatcgattttcgaagatgggggagggattatactactcattttacgatgattttatggtgagggatgcacgatagacttattcctcctcacaccaaaaggcgctctcgtcatctcgtggactcttcggcccagcaattttgcgctcccgtagcttccgctaaacctgtcgactatactatttgctgttgcacaagctgacaggttggctcaggatatgtctgagttgatgaagcgtcgctgcctctttgggcgcaccgcgcaacagaaccaacagcatagccaccatcctcatctactccaatccgcgatatggcactcaatatatagcgtagagaaatgcagaactacacctgagctatacctgctgctgctgctgcatacacaaatacaacttagcagttccagaatgcaacgaggggaaatgagaaagtcacctgcatatttgctataaaaaaactggttgatgcaaacagggcagtaagactaacaaacagttgtaagaacatcttttacaatcttcaatcctcaaaagctgcaaagctggaccaaatcctttggatcccacatggacagcttaactatagagaaatgtcggcaaactcaagaggtcgctaagggcctaattgtctccagcaccaacagattggttgacagttgacacaccattgcaggcttatgagatactcaaagattcattttcacttggacaaaagtactggcatatgaggtcatcctatgtttcagatttgacaaaaataaaattccatcataagatgtcaatgctagggcatcaccatgtttttacaatccaataagcagtttcacctcatttccacatttaacattcgaaaatcgaaatacatcgaatggatattgtccaactcatgctatttaccacacaaatgaaaaaccatccacaaagtagtcaagtggcagtgtggtacctcgcatgttagggctgttcgttgtcacgcagcatgaggttcatgataaagtcacagatgagattatattgtatatccttaaatacaaaataaatgccaggaactgccaaaaaaggaataatttttatatcatagcatctatactattgtctattactcattagaactacacatgaactttacaatatgaagtcctagaagcctctaacacaagaatttgtgtgcgtattgagagatctcatcaactggcaactttactctctatagggatttcaaaatccctaggtctctatcgaccttacttttggtaatcgtgttgattattatcatggcgaacagttcatatacaactacaagcaccctcatccagaaaaccccatacttgcctttattgttggagcatttgatgctgtttgatcaaaagttgggcataaagcagctcgttccaggaatccggtactccaggaaggcaccagtggctgcagtcctggtatctctctggtgatcttctctcgtcctcagtcaggttccgtttgcgatagattgaaggatgtgcatcctttctatagtcagtcatccttgttatattcaagtaaacaactggagttttcatcttgtggatcacatcctctaaaatgctcatctttggtgggtaggttgacaggtactgttcatttcttattggttctgtctctttgtcacagctaccacctgaattccattgcccaccactgcatatttgagagcacaacaaaattcagtcaagacccgagattcgtcaaattttcgcaaaacaaaaaggcgatatatacctgaaatgggatgctgaatagcctctgaacaacacagtggttttcttgggatttacattcgcatcaatccacctggaccaggtgacaagagctttgtgaaaggcatccacaacattgagctcactatacacgtgattaccttcctgatagtaatccttcctgtgtcacatagaacatatctttaatgttcaacaagaagaatgaaatagagatgattgtccagcccaaatagcagtgaagataccaagataagttaccctagagaagtcttctcatgtgtccaccagtgtccagtattgaaaattagaaaatctgcatccttatactttggtgatgattgctcgactatatcaagcctaagagtttcttttttctttccattgctcactttcatctcccattcttggactaggaaaggggagcgaaaaaactccacactgcagttatagtcctaaatgacaagaatttgcattaaacaacacttccaatttctgaaatggatgcagtgtatagtaaaacagaatcaatccaagctaggaaatacataccgtgaacaggaaagagtatgagccctcagtcttaaactcatgcctaccagatgcctcaaaaaccttcctcttatccttaacggagttccttaagatgcagaccagggattcccacatgttcctattaagtgaatcaccaacgaaaaccagtcttttccccctcagcctctccaacatatcagttggattcaatctaatataacaagaatataattaggcatgttatgcactaagatggaataaaaattcaccaaaattgattgcctgctctagtaacttttcctcacctcgggatgttgcagctactaggttgccaccggagcttctggtaggctcgatctggccggccattgagataacagtcgaagggctcatcaatgtgagggcatgatccctcagggtagagagggtacgactcatcccgaacccaattcccatggaacatatcacagctggccatctccttgatccagtcaacctttttatcaggctgtttttgtgatgcctgttttgttgatgatccattccccttcaccagcacttcgctgtagttgctagtttttgagttgattgcttgggcaggatgatccttagatgaaccaacactaccctgcgaagttgtttcctcctgcttacttgttgtaccactacttccaccagaagcaactccagcactagtctggttctgattcttcgaatttgtcgatgctacagatgtctgattcttgcttggggatccacccgctttctttgcgaccattgcagtactagcagtctgattactagttgaagccacattcccactcgctttatttgtatcagctccgccatctttagcatttcccttcgccggactaacagtcacatctgatgtatggttggaatgtccacttccactcgctggcggagtatctgatctgttactcaaatcggccttcacatctgagacacttccggcagaatcagtactcgtagcaacgactacgtcttttgcatctgtctttaccgcagtgctattcacagcagcagaagaaacactacttgcaacaccatttccacttcctgcactgctattagatccaacattagattcaccctttgctgaacttccagttccagtagaattatcactggatgctttaacagcaacttcggtatcggccttcgccgtgctgttcttcttgtcagaaacggcatcgccattgctgggagcttcacctccacttcctgactgcttattggacttatctacactctcctcgccggtgttcgcggaggatgattttccggcagaactactggctgtggatggggatccacccccatctccggccgggctactctgctccaccgcgctgttcgccggggcgccgccacttgtggaattattcgccggagcgccgccgccgtcgccgccgcttccctttgcaggtggagtgccacttcctgccaaattgccgggcggaggcgcactcccaccaccgccattgttgcttgccgcaccacctccacctccacttcccgaatgcttggtagacgcagctggatcgacagggacgctgtgcgctgcgccgctccgcacccgcgcgtgctcatcgatcccatggctactcacctggccgcctccctcgccgcggcgcggcggcggcggctgctgctccggcgagggggtggaggagccggtggggaagatggacgagaagaaccccgagacctgcgcgcggtacggcgccgtggacgcgtacaccccgccgaaccacgacgcgccctccc

SEQ ID NO: 21256 - DNA, 6113 bp, Oryza sativa
gtgtgggtttagaaatttaagagagggggggaatttaactaatcagccgctaaatttgtttagattttgcatgggggttcagccagtaacttgcagttgcatctgaatctttttattcaacgagtcaaggatgttcaaaggagtatttaacactttgataaggaataaaataggagaccacagcaccaaaaatattttttcttgtttgactacttttttgctgttagttgatgggaattttattgtctggtttgaccttaaacataggcattttctgacttagatatttttgaacaataagataatcatgccaaatgtcaatcatatactccctctgtatcatattataagtcgtttaactttttttcttaatcaagcttcttagaatttgatcatatttgtagcaaaatatagtaacattttcaatacaaaataaactttatatcaaaaatatatttgatgttaaatttaatgacactaatttagtgtcgtaggtattgctatttttttctataaatttggtcaaacctatagaactttgactaagaaaaatgtcaaatgacttataatataaaatggatggagtagcttttttttaatagaagttataattctacctgcctataaactgcaaggttaaaagtatactttcttaagaaggtataattcaacacatataacctacgtgtacacgtctgagttgtgcacgatatgtacacgcgaagtttgcatgcacaaaatacgttctccaaattacatcaccttcctcgattccaaaatataatatattcatagttttagaaaaaatctaacatccaaaactttgaactagcaataattaatcaaacaatagattacaaaagaaaaataataattataatcaagttataatgttattgaccgtgaaaaaggagctaataatacatcattacattggggatggaaggggtaacaaatagggacctatggtttggtccttggaaaaaaaaatgtaatgcaaaccatttgcgtagtggaaacctaaaaactattactggattcacgaatagacatctgaaatttgtcacgttatttactcccagaaaattgttcactcctagttaaatctaactgaaagtaaaacttttactcttaataagataaacaatgtttagatccaacgaaatgaatttcatatttctgctagatattgttcatctacccagtgactttgctcataattatagccagggtttacaaaaccgcacggttatcgtgcggtaaccttttaaaattttgaaaccacggtctggcgataaccgccgaatcatgaggtgacggtaacccccaccctaaacgattcggtaaagtctaggcatagcccagccccggatgctgcggcaaaccagtggcggatccaggatttgagcaaagggtattcaaagctgaaaaaaaaatcatacagaactcaaaaaattggactgggaaaatcatacaggagtggtaatgacatgtttaaagccttaaaggtacaaacagtagcacaatagtcaagatgtctatctccaactgcacacttggggacatatcactatcataggcattgggtgcttcaagtagtagctgaataggactagaaggggcattttctgggatctgaacttcactctcaatggttaatggttttggatcagaggtggaagctactttctgagacttggttgacctttcccacaaagacttcaaatctattgtcttcttcttcttcatttttcaaatttcaagacctacagttcaaatttctgactaatttaacttctaagcaatagcaattaagcaatggccaatcgcttggggaatttgacaagaggatttattttaccagtgccagtccactgtccagctgtctagggaccaaggggacgcgccgacgcgggggtgcgtcgccgcaaccggctgccgccgtgcgccgcagcgccgctgccgtccgtgcgaacctcagctgctcagcgtcgcccgtccccgaggaggcggcggcgtcgtcgcaggccacgccgcctccgcagcagcaggcccagggaccagggtccagggagatgaggctggtggcgattctggcgacgcgccgagccggcggccggcgccgccgagcgtcgagctctcgatgccccgtcgcccgtcggtggggatgagtggaggcgcggcggattggggctgggacgacagaaggcgtggggactggctgaccgggggatagggactagggttttgttcgtttttgggccagtgggcctattcgttgggccaagatggggaggaatgtatggtctgctgcgaataaatgggcttcttttcatttgggctatacatgctgtacttccttctaatttctcatgtatatatgcataacatacctatatatagttatttttttttaaattccatgggtattcaggtgaatacccatgaatcacatgggatccgcccctgcggcaaacattggaaccggcccctgagaaagctggccagccgtcacgctatttttgccgggccggtccgcaccgacggcggacgtgctatccctcgtgttttgtggtgcctgtgccacagccgcatcaaattgcgggaggcgccactgaatcgctgacatgtggagccgcaaccgggggggattgtcacggggccacgggactcgagaccgcgtgccggcgtgccgcgaggcgcgagctgtaggccggccgacgataacctaactgatgaattgaatgtggctgtgtgtcatacgccaaacatatcgttagcacgtacgtcttcctcgcggtttgcagcagactatcaggagatcgaccacatttagcttcatttattttaacgatagtgcgaaattcataacgatatagaaaaaaaataattacaagattataacatgggaggacgtaactagaaaaaaaagagaaagaagttttataggtgcatcgaacatgatgaataacaaaagaagaagcacacatgccgacatgcgtgatgccatgatgtacatacatgatacgtatgcatggacatatataggagtaatcatattgctgacaagttaggttttttttcactatcttattggtatcaaatgtggtaacatcgagatttttcacgaatgattttttttcccgattatactaaagacacctaagctcacatataccacacttgtacacacacagatattttctcttacacatgctttaaagatggagactactgataaatctctaatctcaacaaaacctatagatagtgcaatcgctcatgcgtagaaaagcttaggcatcagattttaaatcatagtggatggaacatggacccacgactatggcaccatgctaccagcactgaattaattttgcaacaaacacaaacgtttgtgttaaaaaattaaagtggctacataaatcgtaccaaacctggttttatgaaaagcttaaaatatttttgtttatcactttcaactctaaagcacctggataaatttaggtgtggatttcgactactcggtgttatgcaacatgtactaccaagggaagaattgtcccaacgaaaaataaaagaaccttgcaaactatggaaacaaattaaaacaattttacaaggtacaaatccaatcaccaacctaagcaggccagaatccgtttgtatttgcactttgcaaactatgtttgctgctaattgtggtcttaggctgcgttcgtttgggtgatagggagtgagaatgcacatcgttttccgcgtgcacgcttcccaaactactaaatggtgtgttttttgcaaaaaaaaattctatatgaaagttgctttaaaaaaaatcatattaatccatttttgaaatttaaaatagttaatactcaattaatcatgagttaatggctcacctcgttttacgtatcttcccaatctcctcaatccccttttcctcaaacacacccttacacgccatgtcatgtgaaatgtacgcaattctcagcgagagagccagagaggtttgggttgttattagtttcacatcaaaattgaaagtttgaagaaatcgaaacgatgtgacagaaaaattaaaagtttgtgtgtgtagaaaagttcgatgtgatggaaaagttagaagtttgttaaaaaaaattggaatctacaccgggccgtgtacaagcgagtctgcgacattgctttgccaagtcctctgccgaagaaggctgaagtcggtgtaggctggactttgggagacctggtccacaagcgtacggagtaatttaatactctatccgtctatttttgatagtcatatttccaaatctgaaaattttatttttgataggcatatttcaatctaacaacctatcctcttaatgattttctcgaatttaatgcgtgactctccattcttccacacatgattggctacatggatattgagaaatgtaaatattaattaatcgcttgtttacgaggaatgattagtagcatgtttaaatagatgataagtagaattacttatccttggtctacgtgtcaagatgaaatatgactatcaaaagttgatggagggagtatttagaaagcgatattagtattaaggttaaattgtgttatatattacactttcccaatttataatctctcgtttttcgcgtacacacttagtaatctgctaaatgacgtgtttcttttaaacacaacataaaaattgctatagaaaatcatattaattattttcaagtttttaatacataattaaccatgtattaatccgttgctccattatacgtaaaatgttataaatctcaaaatgaacacactaccggcacacagcccaagttttctcggagacaaatttggctactcttcttctgttcataaatatttatcggttttgattaaacatatataaaatataattattattttaagcgaccattagctctgaaagtaggatatatatatatacttagtaaaaaaaatcgattttagacctaatgctataagttcgatgctgcataatttgattttttaaaaagaaaaatattggcaaaatattgcttgatgacctaaaattaaaattacaagtatctgtgaacatagataatattaaataattaaatagttacaccgaaataacacatattataaaggtagcttcctccattcgtgtttactcggtcacttttggaccattatccacccacaaatacttgtccccaatatatattttacccagtttaccctatcaattttctccttactgttttatccgtcacatatttggtgggtttgggatgttctggttagttttgaagggtatagcatggccattcatatatccaagcaaattattgcctaaatatgcatgctataggttaaaagcgacgagtaaatgtgaatggagagagtaattctgagacaaatccatacataaaaaaaagggaattagctagattgctgtctagaagcgcagagatgaaaagaacgtgcacggaataaagatagtattgcaaaggagaaaattgacgcaattaggtacgaactcactcagatttaaagtgggcgcacggttgaatccactgtataattgctatatacagaaactccactctttcaattcggtggagcaattcggcagatttctactactcgcatgcatgcttgccactacagtacgtaccaaaattaacacccttgctaatgtacggcctgataattaacatgacccatggatgtaaccaagagccaagactaaagttgtactcctactgttactcctactattcagtactccctccattttaaattaatctacatatagttttttaattattcctaaatgatctatatatttatatttatttattaagtatattcgttatttgtgtattggagtaaataaacattgatgcatgcatccatgcacacaagtatttataactcacatgcaatatcttgatttgctattggctagaaaatagtggggatagagcatgtatcgagtttgttgctagagtaaatatggtatgagagagttattagcttttttttttgtctttgtgtacctatgaaatatgtatatcaatttagaatgaaggaagtagtaattatga

SEQ ID NO: 21257 - DNA, 25766 bp, Oryza sativa
tatttgtgttgtaaaattttcagccaggaactccaccagctcggccatatgaagcacccacacctggatcagggtgggcaaatacgccaggagttagctataatgacgctccaactcccagggagagcaactacggtagtgaaacatattctgtttttatttaccatatactgatacatatcatgctataatgcatcaacgtttctgttctaatactgtttttctactgtctcttaggaaatgctccaagcccatatgtgccttccactcctgtaggtcaaccaatgacaccgaattctgcctcgtaccttcctggtacacctggtggtcaaccgatgactccaggcaatgttggaatggacataatgtcgcctataataggtgtggtgtcatttctactgttgcatccataaagctcctatgtattgtgctgctatctgcgtaacacagaagcaggcacgagtacatctaattacatgtcaaaatgtctgcaggtggtgaaggtgaaggtaactggctgttgccagatgttttggttaatgtgttgagggcaggcgatgatggtcctggtgtggtgagggaagttcttgcggtatgtatttgggctcttcacaatttctctgcaattcttgctgtctcctgagctgatgattgatgccactgggcaatctaaacttgcaggatggatcttgtcgcgtcgcccttgggtcatcaggtaatggtgagatcgtgacggttcttccaaccgagctcgaggttattcggccaaagaagagcgacaagatcaagataatgaacggcaatttccgtggatactctggaaagctcataggtatagatggttccgacggcattgtgaagcttgatgacacatacgaagtcaagatcttagatatggtgattttggccaaactggcgagttgagatggatgtatattttgtacgagtccatcgtatagccaaatgtttgtaacagataccctttgtagtcaataaaacgttttgttatttattccattatttagttgtatccagattttgacatcgaaagaaaacttgccttaagaaaaccgtctgtctgctatcccagttatctcgttactcttctcatcatcacagcaaaaatgccaaaaaagtataaccaactactcactccattgacttttttaaatatgtttgatcattcgtcttatttgaaatatttaagtaattaattcttttctatcatttgattcattgttaaatatacttatatgtatacatataatattacatattttacaaaagattttttaataagacgaacggttaaacatgtgctaaaaaatcaagtactccataatctaagaaatagcgaaggatataactacaaatgaatctgaaatgaatctgtctttttcttgatatcattacagatgaatctgaatttgtcatggcgtaatttagttgtatctcatgatctttacacaagcataaagcttcctatcgactatgccaccaactgtaaactatcaccgaactgaatcgattgatccatagtacatgccaagaactaatcgagcattattttcatcatcacgtaatcaagtgagaaaaaaaaagtaaaaattaagccgagatgtcgcggcctgtactgtgctcttgtcctcctcctcgttgtcttcttcctccgatcaggtgacgtcctgcttgcactgctggaaaacctgcagaatgttgcggtacgggctcctcgacgacgacgacgacgacgacgagggctgctgctgctgctgcggcgaggcggtggcggcgcgctggcgcttgctgctcgacggccgggactccgggctccgcgccgcctccaccgcctccgcgtcccgcagcgcttgctccgccgcgtccttccgcagcgcctccatgaacgactccttcaccaacccgtcgatctgatcaaaagcaccaccaccccccgcttgagacgagatccaatcgcacaagaaaacgcaggtgaagaatccagcgatggatggggactcaccgtgagcgggcagaactccggcatgggccacgcgacggggccggcgtcgtcgggcggctccggcagcgcctccacctcctccccgccgacatcaccctcctcctccgccgccgccgccgccgcctcaaccttgtcctgcacgcgccaacaccaccacacacacacagatcaggaacaccgaaaaactccagatggaaagagcggagatgatctggggggggcttccccgatctatctcaagtagtagtaccatgaatctcgcggcgatctccaccatctttcccccccttttgatctcctcgtctcctcctgctttcctttttggctcgaaaacgctcgatcgacgcggtttggaacttttcggccgctttcgtgcgcgacggatttgaaatcgggtgagggcgtgaaaagcggaggttccgttcgttttttatggatctcggcgaagataattcgggaaaaaggcaacggctactttttggttgtacgagtactggttccggtaggtctttggttaacctgcctgcgagcttttcgaggtagatccgatttgggggtacagacgaatttgaggcaggctccgtagccatctgaatttgaggcctcctgagaataagaaaaagttgaggaattcagcttctgttttattaaaaaaatattttctgaattatatatacaactatatattcgtataatccgaatgaaaatctgaactattttgaaggagtttgtcatagctagagattataataaaagctgcagctatcagaaactcctttaaacatacctgagttacggttggtacaattttgaagaccctcttggcattggaacaaggctaaaacaacttatattaaaatagatttatttcctttacatattttaaaatatgttttctaaaataatattctaacgcattgctaaaacatttgttttgaaactacttccccattttaaaatatagggagcaaataattttttatatgttttgtaatacaagacgtgcaagcacgtattcaattaactagcatatctcctttccttttttttaaaaaaatacgtcaccctcaagatttatatggattctatttattagggtgatcgaaacaagaagttaataattttttttgtgtttgtgcgtcttatattttggaatggagggagtatttgctaagtttatttcttaaaaaataatttattcctataattaaatcaataatccgctcaaaaatataaatcaaatagagccttatattttggatcatagaatagataatggttggtttgagaaaaaaaatcagttttggaagtatggtgatgttatttttcttgttattcattgcagatatctcaaaatgtaaggtaaagaagttgaggacatatccggtgaaaatgagctaagtatgagaaactcgtgaaaatcatacctaaaagtttcataaattcatgaaaaaaatagtagataggtgtagatatgaaatacattctcaccaaatctcaacttcaaattcaacttaatttaagaggaaaaaaaacaaatttatgatgaatagtgtcatgttactatttacctaaaatttgtcttttttgttactcctaaatgaagttgagtttgaacttgagatttggtgagaatgcatttcatatctacacatatctctagtattttttttcatgaatttataaaacttttatgtatgattttcacgagtttccaacacttagctcgttttcatcggatatgtccaaaaaagttacctgtatgtatactatgaggaattggacgagccaagtctgtgcttggaagctttaccggctgaggtaaccctgctacttgattgagctctagttccaccttcacctttgtgtactaaattgacgctgccccatgaagaccacctcaccatcaccatccctagtatcatcacattgtcgagctccaccttcacctccctcagtatcattatatcaacgagctccaccttcgcactctcctccgcaagctcccctggtcgttagaagtggaggttcgggaagatcgaggaggggtcgctggtttgaggagcgttgctcctagttcaagctacatgggagagggagctgctcatggaaggggctcgagctcggcggtggatgtgtggtagaaatggactcattgatagccccacgagagagttaagctaaactagtttgatgcttcttaggaaaaatttatgcagttgtgcagtagccagtagagatggattagtgttaattaaagaagtgttttcaaaagtagggattgactattatcaaagaagtgcgcaatagagatggaattgtgttaaagaagtgttttcaaaagtagagatagactaatgtcaaagaaatgttttcaaagagttttgaccaaaaatatatttaacttaatagttaaaaaagatgaactagtattaaagaaatgttttcaaaagtagagatggactattatcaaagaagtgcgcaatagagatggaattgtgttaaagaagtgttttcaaaagtagagatagactaatgtcaaataaatgttttcaaagagttttgaccgaaaaatatatttaacttaatagttaaaaaaatgaactagtattaaagaaatattttcaaaagtagagatagactagtgtcgaagtcaaaatgttttgaccaaaaaatatttataactttgtagttttttatttttttaaaggaataagttcactttgactcccttaaatagtgactgaatctaatttgtatccctaaactacaccagatatctcgacccccaactcttaaaaccgaagcaacttgactccctcagtggttttggaggacggttttgttgacgtggcgcctacgtggcggtattgacttggtctgtattccacgtggcgcttaggtgtcattacaattaaaaaatagtgtaggacccatttgtcattcacataaaataaaattatggggcccaccgtggggccttctctctcccttatctctctttctctcccctccctcaagttccttctcggtcctcaccgctcccttctccctcttccatctctttcccgtggcgggcggcgagggccagagcggcggcgggcaagcggagacgcaggcgtggtggtgatgatcgcgtgcgcgccggcgggcgggacgtggtggacgacctcccgccgcgggggaaggcaaggtgctcgtcaaggtgtccgccgccggcgtcaaccgcgccgacacggtgcagcaccagggccggtaccccgctccgcccagcgcgttcccttactcgctcggccccatcctcgcgctcggccccaacgtcccctcccgctgagccgtcggcgactaggtgacttggtgattgccgttgctgccgtttggattaggttaattgattgggagatttgttgttccttttcaggtttgtgcgctgctcagcggtggcaagtatgcagagaaggtggtggtgctagcggggcagctgctcttggtgccggagggggtgtctctgacggacgccgccggcttgcttgaggtggcctgcaccatttggtcgactgcttggcgaattgttctcgtaagataacttctctttttcttctatactcaaggactttatgattcattcctgagcacggtgtatcctcgatgtttgcagatccattgtggatcgagtggaattggtacattttactatacagattgcaaagcaacttggaattaaggtttttgttactgcaggtttgttcagtaggacaaaaacagtacgagtatataataggatgttgcagagattgctcaagtaatgatgttaaactatgtgttaaacaccacagccacgcccgagtctttgcttgcccgtcgccgctccgacccacgccgcccgccgcgggagagagggaggaaggagaagggagcggcgaggagggagaaggaacaggagggaggggagagaaagagagatgatggggagggagaaagccccatggtgggtcccacaatttttgtttaatgtgaatgacaaatgggtcccacacattttctaattctaatgtcatctaagtgtcacgtcaacgccacatggaacgaagaccaggtcaataccaccacgtaggtgccatgtcagcgaaaccgcccttcaaaaccaccgagggagttaaattgctccggttttaatagttgaggggtcgagatatccggtattgtggtttagggatatgaatcagattcagtcactagttaagggagtgaaaataaacttattcctttttttaaaaaaagagttggcttagtcgtcagtcgaggagaatccatgctccacccaccggtggaaccccacaaacttcgggctacgagttgggcttttaccccaaacccacccagccggtaggctgggccgtgagggccaaatctaacttccgtgttctcttcaaactttagcagcagaaatgctaatttcttcctccccttctcttctcttttatttagctgagagtagaggggaagctacttggggtcgtgagtacccccgttttggcatggactcctgactcctctgcccggctaagcaacagccgtataccaaccctttaccctcccaaagctggagttacaggcgcacgcaactgagcccggcgagctgctaggcacggaagcacgtatttgtgctgctgcgcgccaagttcgattagcggtacggtactaatggccttagcacgtaagtttttttttttttggttccgtttctcagttgcctcgcacctatggcagtcaacttgtggccttagcacgcaagtttttctttttcttgttgctgacttgcatgcacaggtcgcggtacaaacattgctttttttttctctttcgcattggttcatctctcgtacttttctgaaaattcgttcatgttcggtaatttcactttcgatcaaaacaaccctccccgcactcccctcctccacccccccccaaaaaaaaaaagaaagaaagaaaagaaaaaaaaatctgttcattatagcgacaaggactcaactagttgtagcctcccctatatgcaaatagtaaaacataagaagggtatatgtgcagtaattaatcaaaacaagaataacttaatgccgaagtgaaactaacttaattggtcaggttccttgtggcggaatcaactaacccgggtttaagtcctggacgatatgtgggctcgcatttacgactaattgtttttttcgtgataggcgaggcgaccagggttcaagtcctggacgacatgtatgctcatatttacggataattattttttcagtggtaggcgagacgcccatagtgacttcgtcaatcttttttcagtggtaggcgaggagcccaggattcaagtcctagacgacatgtgtgctcacatttacggataattgtttttttcaatagtaggcgagacgcccacagtgacttcgtcaatctcaaatctttcggagatgtttataggggtagggtgtgtgtgctacatatactttaatcaaactaaaataaaactacatatacaaaactacagatactttaatcaaactatcgcaaaactacatatatattatgttgtatcacaaaattatagatttaacgtcaaatttatgtgtgcgccttcataaggatgagtgtattcctgcgtttgtaccgtgtataaattttacaaaactacagatactttaatcaaactatcgtaaaattacatatatcaaactacagatactttagtaaaactatcgcaaaactacatatgtagtgttttgtatcacaaaactatagttttggcgtcaaatttatcacaaaaattatagttttgagatagagtatcacaaaactaaagatatggttgttatgtgggttccacggactaaagctatatttcattgccacgtaagctcatttttttttgggagggggttgtaaatctgtcggtttgaagagtcgaggggggagaaatgtttggtactgtagtctaggagatgaatcaaactcacacgatagttcatggaggtaatttaaatttttccttaccttatttacatggtgtgcttttgaattaaaagtgaggttatgggtgaaagggcctgtagcctagtggttacaagagcctcagagcaagttcaatagtatagcccaatactagctccaattcatctatagccaattcatataatagttgcttactatgctattagtatatggtcccacctgtcatacacacactgtgtcttggagtccgtgctcgctgctcttctctctcatcttttatcttattaaaatatgtttatagctagctaatagcctactattgtacctgctctcagtagtaccttaggtcctgggttctactccccatgggagcgatggattgccggcctagtcttcgaagatgctcataggggtaggctagattgcgactaatttgtgagacaaattttttaaggctaattgctccatgatttgactatgtggtgctacagtaaacatttgctaatgacggattaatcaggcttaataaatttgtctcgtggtttaatggaggattttgtaattagtttttttagtacccaaacacctcatacaacactctatacaacacccgatgtgacactctaaaactttacccatcttatatctaaacacccccatagttggcaggggagcgcgttctgcgggggcacgatcctggtgattgggatggcatcatggcagtcgccgttgaggaatcgtgtccgcgtcaactaggccaacgtgcccatgaaggataaagggaagaagataaaagaaaatgctgctcagtcgttgttcgcaacgccaaacacttgtgttttatctgcgattgctgtccaaactcgcgtgtgtgttgcaggttccgctgctgggtttcactaacagacgtgtgttaaggagtactcctatacatccatagtgtgtgtgatgtgatgtacatgagtagtgctatgcacgtgcgtttccacgagaaatattcatggtttttgtaattagattaacttataatgaacgtaaaaaggcaaaaagtagttgtgcacgtgtgttttcacgtattcgaaaaatattctttggttttacaagtaaattgcattggtggtacacaaacttgttagatgggtgcaatttagtatataaacttgtaaaatattcgtttcagtacacgaacttgtctagtttgtgcgaacgaggaccaaaataacttgacaatgttaattttatgaagcgatgttgattaggatgtggcgtgcattgagtatgcatagaacatccaatatttgtaaatttggtctctattttatttttcaccatggaaatgatgaatttcatatatttctaacatttatactattgctcgttttttaaatctttttctactatcactatattctattctatttttattaaagaggtgtatgtctaatagcaaccttctcatatatatgccctaaatcaacaatattagcaatatagtgtcattttcgccttcctccgcacgcaccagataagtttatacaccaaaacaagcattttacaagtttgtgcactagattgtacccacctgacaagttcgtgtaccggcgatgcaatgtattcattagattaacttattattattaacgcaaaaaaaacttacttagtgtgggtatgtggttggcagcaaggcaacgacgaactatttaccggttgccgtagctgactcggctcggaattggcttgctgtgttaccacgagggacattcggttcctgggctaagcttcgcgaccacttcatcatcaactttcaaggtaccttttagtatttcaccaattaacttattattaacgcaaaaggcaaaaaaaattacaattagattaacaaaaaaaacttgttttaagagttgtacttggtggttttaagaggcaaagcgggaaacacaaacaccacaacacgaccttggcaacaaacatcatatgaaacgggctcggcttgggttgccccatatgccttattaaccccacaccgtagatttcttcaggtcgagaaatattgtttgtttttacaagtaaattgtattggtggtacacaaacttgttagatgggtgcaatttagtatataaacttgtaaaatattcgtttcagtacatgaacttgtctagtttgtgcgaacgaggaccaaaataacttgacaatgttaattttatgaagtgatgttgattaggatatggcgtgcatacgtttagtgagtatgcatagaacatccaatatttataaatttggtctctactttattcttcaccatggaaatgatgaatttcatatatttctaacatttatactattgctcgttttttaaatctttttctactatcactatattatattctatttttattgaagaggtgtatgtctaatagcaaccttctcatatatatgccctaaatcaataagattagcaatgtagtgtcattttcgccttccttcgcacgcaccagacaagtttatacaccaaaacaagcattttacaagttcgtgcactagattgtacccacctgacaagttcgtgtaccggcgatgcaatgtactcattagattaacttattattattaacgcaaaaaaaaacttgttttttttacttagtgtgggtatgtggttggcagcaaggcaacgacgaactatttaccggttgccgtagctgactcggctcggaattggcttgctgggttaccacgagggacattcggttcctgggccaagctttgcgaccacttcatcatcaacttgcaaggtacctttattatttcaccaattaacttattattaacgcaaaaggcaaaaaaaaacaattagattaacacgaaaaaacttgttttaagagttgtacttggtggttttaagaggcaaagcgggaaacacaaacaccacaacacgaccttggcaacaaacatcgtatgaaacgggctcggcttgggttgccccatatgccttattaaccccacgccgtagatttcttcaggtcaattgtggccgagactgcgtgtgtgtgttgtgggcccttttgaccggcccaaacaccagcaacgtaccaactcctagccctccacaggccagagttaaaggcccacgccaccgacccagtccacttatactgactagatgcttacgtacaaaacaaaaatatgggccccacatatcatcctcaccattgtctaaaaaaacatgtcatcctcactctcctctactcttctctctccatctcccccctcattccactagaacctagagctcgacgcgttggcatagaagatggagcagcaattaatggtgggagaggaggaggttgcggctgtgcacggaggtgggagggaggcaactggcggcatagtggtgttgtgcagtgatggcggtgtagtctcggtagagctgccggatccttcctatctcctgatcgagcttgtgtaggtagatattgcctagtagggccgatagtagtacaatgtttgggacggagttagggcccttctcacctcctacgagtcgtccggcggaaaactgtttctgagtggggtaaaagaactgtttcggacgaagtcggccttggagacgaactgcatccatgactccttggcagcgcactcgcgactagactcctcgaacgacggcgacaacctcttctccatctcactataggaggcgaggaagcggccctatctctaaatccatcggaggaacggaaatggcgtcgtgcgggaggcaggagcagcggtcggcgacacaaggccatagatgcgcgccgctaacgtggtagatggaagcgtcacaggatgattatgacgtcctcgccctaggcggtgacgacgtggagatgacagtgccgcccaaaagtggatctgaatgtggaggagtctcggcacggtcgatgttggcctggtagagaccgtggtggacccgtcccctcctctagtgatggcgatgctacggtgaggccaccggtctgcgcatccactcgccacccagattgagaccgtcacccctgccctgccctgcgctctgtgctgcttcttgctcggaacatgaccgcatggttgccggcacctgacagagtgagatggggataagaaagaagattgctatttcacttatatgtgggtctcacgtgtttgtttttaatttttgcatcttgtgccacgtcactccaaaccaccttcaatattgtattaggactatatttgcacgggttttaaaatatgagggatgtgttgtatccgattttacggtttagggatttgattcaaactctacatccagatgaggggaccaacagtaaacttattcctttgcaaaatgtgcaggccacttgcggtctatctcttctctgaagggccgtaaggcccaaggcccagttcttcgttgcggaatacgcatagctgaataagctgataggagattgaagagaaagatgaagatgaaatgcagattaagtatttcacgcaaaacgaggtgataataacgtgtgattaattaagttttaattattataaatttaaaaaatagattaatatgatattttagaataattttatatagaaagttttcgcatgaaacacactctttagcagtttaaaaagcgtatcacgaaaaccagaacttcatccaatcttttagtaggaaacgaacggttactcagctctcgctccaggatgcatggcgcggttgatgggatacagtcatccagaactctctcttgagatcccgacgcggagtagacagtagagtcgctggcgctgcgcgcacagctagctagcctagcgaagaggaggggaggaggatctcgacgcgtagagcgtacgtacggccgctggggcccgcttacttgaatcctagtcgggccccacagcgatctgacgagcggtgggccccacggctacctagctactccagctagctgcatgctcggctggctgctgtccccgccgcagccgcctccaggtggcacgcattgccacgtggagagctcgagatcgtcgtcaaactcccgctcctgattcatcaggtttttttgcaccaattttttttttactctgctcgttgccattgaatcctgtgatgaatcatccaacgcctttagcttggtcaggagcggatgcaacgtgagtgcagggggacttgagtcccccctacattcacataatccatggataccttaggagcaccttcttcgattttttcactatgaataataaattaaagctctgtaaatggctgcagattaaataaactgcgtaactgagtcccctaaatttttttttgttcttggatccgcctctgagcttgagcttggtgagtgcaatgctgggctaactgccaaatgcttcgtttgtaattctgggcaaacagcatgacactcggcgaggcagatttaactcggggccgcacatatacatctttcagcaagcacgtacatacatatacacatgcttttctatcttggcagtgtggacaagggccatttttgcggtgtccgtgcccattttgccgaagcggagaaggatcagggggatgggcgcgcgcgctgctgccgatcgatcgaatcgccgctggaaacggcaagaatattgatcccctttgcctcctgctgcagcgcggacggagaagccctctcgcttaaatccgctttcccgaaacgcccaacccggtggtgccagcgtttgcctccgcccgaatggcggctagctaactgtaaccggcactaatcgggagatcgagggatctgtacggtgatccatccatcgatccatcgaaaggctggagatctagctcaactgttgatgggtcagtgtctctgatggagtaggattgctgtaggctttgtagtagggatggtgtagcgaggtcgatcgatcgagcaaggaggttacgttgttccgtactgttatcaactgcatctctgcgctgcatgcatgtagtgatggttgaattagaccattcacagcgctcctacatgatgagtggtagagtgactttagcttgctggttgccacataggagccatgctgctgcgaagagcgggggtgtgggtgagtggcctcggtaataaggtgttcgtgctttgcagcagacatggtttcttcagtaagtagacatctaagttgggcgaacacgtcacgctgccacacggtgtgtggtacttttctgccgctagatttagagggttgagctagagcggttactggagaacaacgtccgataaaataaatggagttggtggatggagatagcggacgacggtggccaaatatggagagtggaggagcggtggttgggagggacataccagctgggggacctcgtcaccgttgaccaggaagatgatgacgacgagtccgagcccgtctacccaccacctacgagctcgtggccagcatggtgagctcataacaagctccgacgaggctttggcatgattgattgtccgtggcagaaaattgacctagtgtcagcttgggttacttcggcatcgagacgagaaggactgtgtcatgcgctcgacgatgcaatgatgtttggcaatggctgactagattaaaaagtttaggggtgacaagagaaggactcgggagaagaaacacgacaaagaatagtggagagggggtggtagagaatggtagaggggaagacgtgaggagagattttatattagtttatgtattttggtatgtatagtataaaattttggacttccatatgaattaataaaatatcaggactgaaatagaaaaatatcaagacggacatgaaaagtggaagttattacttgaagccgcttgcactatggtaaaataactttttagaggtgtggtcttagtcctgtatggcatcttaaggacactcatataagttgcttctattgtgaatgcatttagctactcgattgttgcttgttatgttggggtgcagaagctcatcttgttttaaccattttttttcttatggatatttattgttgatgccttttctagccaacacggacttacctaatgatttttggtgttaatggagtcacgaatcaccttgatttagaaaactctaaaccaagatgggttttgaagattaaaccgactagcagagccgatttaaatatcaaaactagcctctaaaccgacttagatcgatatggatataactatcatctcgtgggtgaatcagaagatttatgggacaaacctacaaaggatattgcactcgagcagcgaaggaggacaatttacgacacaaatcgataaagatagacaaaacatgggtaaagtagaaaccatgcctaaaaagtaaagacaaaagaatgattcgatagattgtagggattatggtcagggtgttaaaaattgaactagccatagctcttataaacaagtttgtcttgtctccacaggatcttttctatgtcctactaagtttagagatcaataagaacttaaaaaaaaaacccagggtcaatgaaaaaaacccaagaaccgacaaattgggcttgaagtcggtatgactgactccatgcggcggtcaaacctacctcatacggtaaaccgggtcttttccaaatttgaccgtgttttcctgtttttccatcttaggtgccaaatttagatgttaccatttacatatatcacactttattcactctcatttcgtactttttcgtatcttgcatacataaatatgtatcttcatatacatcaagcatgttgttcattggcatacatcgtttttttcagctctgcaacaccaactgttagctgatcttcttttacagatttcctcacggcattaatcgagcatatgcaacattaacaactaggatatcaaatatcacatgataacaatccggcccaggtggggttggccgaggcccaataacttaagattgcccggaccccaacagttcataggcacacccactcggggaaaggcccaatctccctaaaagactagtccgataggggaagggtggctctcccttttaaagtggcttcctcctcccaagctaagcaaggtgggattattcagaggctcacacggtcgccgcccgacttttgcatctttgctagtgggtaatagtggaggatgtcctcatcatcacatcttccctctaccaaaatcgacatttcacaactttaacgagataacttcatgattacaaatttacaatagcacaagggagatattagaggactactgacaagctgcaaaagcacaagatcacaaagtatatgtttcatttttggagtaccaaaagtgcttggtgaactaccaaattataacctattattccctctggtcatgaaaaaatgccatctctcgtactttgaacactagtatcttataagatatttaaattagatgcataaaagttgtatgtaattaagatttatgcgagatacttttataatattatagttttatctagttatttagatattatgaaataaaaattagtggtcaaacttatattttgaagaccatgccaatgtccaaaatgatatgtttccataaccaaaagaaaattatgttataacttaaaagaaagaaaaagtgaagcacaacactttaataaatggaaatattaaaaggaaaggcacatcagcacatcacaacacacacatatatattaagtacatatgaaacgattcatcacaacgccacttttagaaaaaaaaattcaaccgcggtgattttatttattttaaaggtgaataatttaatgtttcaaattcattgatagctagttgttaacatttaacggctcaaaattaagatcattttatatggatctatattctaccaaaaggttgattctacaatcactgtgtataatgttgattgtctcctaactaatattgctaacgactagcatactatcatataattaattacatgtctatgctatagaaattatccatcttgaaggtatggaagtagattctattaataaattgtgctccatctacttgtcctaatatctgaatgttggtcttagtcattcttagtaaatcacatcaaatgaccaacacaatattgttagactaaataaagttaaaattgaatcaagtggtaataagtagagttaattcatcaacattatatattatcaagtatagaagatattcttttgccactagttcgctaataccgcatattcaggaattatacaccattcaaaattgcaaacaagcacaaccaatatatttcctctagaacatgatatgtcgaagacattcttaacaatcgtttcattaaaaattaataactacaaattaaatgactatagttttccatgataatgtcatccatgcataagaacatttatgaaaagcaaaaccaaatcgtgtaagacatttttaatatcccatatgtagacaaacatatacatatttttcaattgatttttaacatgtacataaattaacttgaaactagtcatcaagcataaatgcataatatgccaccatatctagaccgatcttccatttaaggcacaaataatatatacaatgacagttactcatgcaagtttgctaactttagaataaaaataagatgaagtagtggctaagctttccattatgtcagactttgctaagtttagaacaaaaataagatgatgaagtacctgatgttctagatgattgaacttctaagtttagaataaaaataagatggcatagtggctaatgtccaagatcaatgaacttttctaagtttagaaggaaaaataatatgatgtattgtctaacgctccaccctggcacgactccaatatcattccagatagtccgggctcacctccactatcattccagatagtcttcctctccgggtgttaacacccatacttggttccatatcaatacataagtagcaacaaattaatgcatattaaatgtattccaaagattacaaaattggctagtatatgccaatatctcaaacaaatcataatggaaataatatctttagagtcatttatgaacatagaggaaaaatgatctaaaagtaatagcactttttaacctaaatgggtttgcttggttgcatccaaacccaatagtagtagggagggagatgaatgacctgcaagtctgctacatggtgaaaaataatccaagaatttaaattaaaacaaaatattccaaaaactgtactcaatatattctatttaatataggtcaatagatatttttctaaaacaatttagtatctatgtaaacacataattataaaaccataaatatataaattttagcgtacaaacaaaaagtttagaataatattacctaggagtacgcttatattatttcagaaccaacttacaaaactaaaataaaacaaagctcgttagtttatatggtcattggttatgcttttgctaaattcatttgatggttatttctttaagatcgtcggttccacttttacccgcgaataaactgatcaaatcgaacaaattgatcaagtaacgctctagctaaaacgcccagagaatgcgcatgccgagcaaccgagggttatctcctctcttgatcctctactatatatttcttattaagacgctatcatgtatccacaccctagttcgaccaaccaaatcccatcgctgccaagtacgccgtctacctttgccatgtggggagaggtaccacggagtgactgctatgcgaggtgctgatcaaggcgtgcatgagttctattgttccatgaggtggcaagatatatagtgctacatgaggtccgcgactcactatcttccatgttcgatattgttggtattccttgtgagttcatacttgtcaatacattcatacttttctctatgttggtcacttgcctaattgctcggttccttgctcgatttgtttacttaatccggtgcactgcttgattcggtggattattttcccggcacacattcaaagtaagtaaacaataatagcaaaataccaaatcaaactatttcagttttcctagccgtaatttttgtggccatatttggaaaaccaaatttttaagcaaagaaactgaccaaaacaatcaaattcccaacttgaattatcattactagttctaaggaataattgaaaatgactaggagaaaaatacataatgttttagtttgcataacaaatttgtccgaaagctaccatagctacatttctaattatcggtagaattgtgttaaattttctctgtttaatataatatgttacaaggtctgtacttgcagagaaaactgaaaaacattttgattgcaacactgcaatcatttgaaatgatgtttgaaaataaatcccaagtggattatccatatttaattatcacaacgtataatcgttccacacattttcaaaggctacacatttctagcatagtaacataatttccctattttaatatttagagataactcatggcccaatacattatgatgttgcattagtctagaaaaaatataaaatatggattagtcaaacttttctgaaacattatgaagctgacataactgatatcctttgtttatttggtctttgggttttacttttgtattcaatgttgagttgtccatcagattcctacccatcataaaccattctaaccaaacaaacggtaacaattattccatacttgagtaaaaaaaacaattattccatacaatattaaagggtagacaaacaataacaattattccatacaattttaaaggctagaatttctaataaaccaacaattgtattttgccaacataattttgtctaactttagccatatttatggtacaagagccgtcaaaacatatccaccaaacttatagatgcaagacacaagatgtgtagatcgtagagaaaacataagaagattagtaacgccacaaggcccacaactttaagcatgctttcatccaactgcatatttacatgacttgcatcgtcctccaagcttgtagaaacatataaataaataggttgaatgaagggatataaagattacatatatttaaaacatcatgacttttaacatcctttctcttatacatatttacagtgctagaatcatccataaaacttatagatgcacgtaactagttatttataaacataaatgcatgaagaatcctctattggatttataaatgggtggaactagatatgctcatgttgaacaaaaacaaagaaaaagagtagtaaagtaccagcataacaacgctcactccatcttttttatataattttgagaaaccctcatggttcaattattgcatattttaagttatagtttttaaaaaccctcatggatctatacgtatgtactttacgtaacaattttgaaaaacccacataaatatattaatacatcttttatgtttcaattttataaaactcccgtggccatacgttttttacgttgtagttttgagaaatcctctttgctctatttgtacgctttttacgttatagctttgaaaaaccctcttatctctatttgtacatcttttatgttacaaattttaaaaacccctatgaatatattaatacatcttgtatgttgcagttttataaaaccttattgcatcttttacattatagttttgaaaaacccttgtagttctatctatgtgccttttgaattgcgattttgaaaaaaaaatgtaggcctatgagtatgtgtttggtatcacgatttgggaaaaccttcataaatttattttttgaaaggaaccttcatgaatttattattatatcttttgtgttatggttttgagaaactctcatggctttatgtcttttgtgttacaatttttgacaaacccctaatacctttattaattcgtatttgttacaatttttgtaaaaaaaaaactaatggctatattagtttgtcttttacttttaggttatagttgtgacagaaaccctcatggctgtattaatacgtcatgtcaattgacgtacgtaacattaatcaaactagctacaagtccaatcatcgcaatcgctccttcagcattataaactatccatcaccaaaatacttcacacgtaaaccgcctctaattgtcatcaacttaggcaaaaaaaaaaaaacaccaccaccaccactgcatcagctactagcacacaaccaaatcatcacattgtctcttctttcttatatccaccacatttttcttttcctttatttatgtgcatcacatttttcctttctccatactcaccacattttctctctctctctcttggccccatcgtttgtcttttcttttaataagccaaaacggcttattagagaataaaaataaatttataggtaaaacttttatatatgtattctcggtgacttaaaaaccaatgctgaaaaagaaactacgttgaaaatatctcaaaattaatatcaaaattaagtttgaaaatttaaaatttagctttttctttagctgaatagaccatccgatgggagcctctatctctatctctctctaaacccaatgtacggcattttcttttgacacacatgcacacacattgtacaggcaacccctcctcccagaaatagaagtacaggagcatggagaggagagggaggggtttccggcccctttgcatttgtgccttggcgggcgcaggggcggaggaggcgcggacagagagagaggggggaaaaaacccgacccgtttggccttaaatggctccagctgttcccatccaaacccaccagagatgcactgtagagagagaaagagagagtggtcgacggggcgccgtgtttaaaaacctcggcccttatttcgcaccggttactactctactgctgctgcttctgctactgcactactactacactcatactctcttctctctcctgttcttgattttctctctcctcctctacgcgaggagaggagctagctagcgcacaccagcggcagcagcaggagaaagattggcacgaacagtccagaaaactagtagtagcagaagaggatacagggagagagatcagataagcgagcgtttctgatgatggagaggagatagagggataagcgcgagcaagattggaatcagcgtggtggtggtaggggaggggatggatgatatggcgtgacggaagggggggtttggattggatgagttgaggtgcctgcaaattccttcctgttttggatcgctgtgagttgggaattcctgtataaatacggccccgagaggggacgcagagatcaagaacagtgcaaagatcaatcgatccatccatctctccccctcctcctgctgctgctgttgttgcgagagagagagagagagagagagagagagagagagagaggaagaggcagaggtagtagcagcggcggcggccatggatttcggcgacgaacccgagggctccgacagccagcgccgccgcaagcgctaccaccgccacacgcctcgccagattcagcagctcgaggcgtacgcgttttctctatttttttttctgctgttgttcttctatgtgttgttggctttcgtccgccatggcggcggcgccatggatggagggatgaaatggtgcgtgtgtttgtttcccgtgttgtgcaggatgttcaaggagtgcccccacccggacgagaaccagcgggcgcagcttagccgggagctcgggttggagccgaggcagatcaagttctggttccagaatcgccggacccagatgaaggtaaattacaaggagaattccgattggttttcttgattgatcgatcgatcgccatggattccggcgtgcgtgcttgcttccttccgttcgtttcttgcggggaggatgatgatatccatggtgtggggtttgctgtttgcaggcgcagcacgagcgggcggacaactgcttcctccgcgccgagaacgacaagatccggtgcgagaacatcgccatccgcgaggccctcaagaacgtcatctgccccacctgcggcggccctcccgtcggcgaggactacttcgacgagcagaagcttcgcatggagaacgcccgcctcaaggaagaggtaatgccccgcctccgccgccgccgccgccgccgtcgacgacgcggtttgctttgctttgttgatgtttctgatgatgtgttttgttgcggtgttcgtccggcgaacgtgcgagcagctggaccgcgtgtcgaacctgacgtcgaagtatctcggccggccgttcacgcagctgccgccggcgacgccgccgatgacggtgtcgtcgctggacctgtccgtgggcgggatgggcgggccgtcgctggacctggacctcctcagcggtggctcgtcggggatcccgttccagctgccggcgcccgtgtccgacatggagcggcccatgatggccgagatggccacgcgcgccatggacgagctgatccgcctcgcgcaggccggcgaccacatctggtccaagagccccggcggcggcgtgtccggcggcgacgcccgcgagaccctcaacgtcgacacctacgacagcatcttctccaagcccggcggctcgtaccgcgcccccagcatcaacgtcgaggggtcccgcgagtccggcctcgtgctcatgagcgccgtcgccctcgccgacgtgttcatggacacggtaatcaagctgttcgacgccacaaccattctccattttgctcatttgattgattggttcatcgccatcgcagaacaagtggatggagttcttcccaagcatcgtgtccaaagctcacaccattgatgtgctcgtgaatggcatgggagggagaagcgagtccttgattctggtaaacccacattgccattgccattgccattgcatcaatcgagcaaattcttttgtgagttttttccattttgatcttgtgatgtttgtgttgtgggtgtagatgtacgaggagctgcacatcatgacgccggccgtcccgacccgggaggtgaacttcgtccgctactgccggcagatcgagcaggggctatgggccatcgccgacgtctccgtcgacctgcagcgcgacgcccacttcggcgcgccgccgccgcgctcccgccggctcccttcggggtgcctcatcgctgacatggccaatggctactccaaggtatacgcgatggacaatgtgccgcacgcaatggtgttttggtttcggctcgctgacgacgtcgcgcacgctcgcgtacgcgcaggtgacctgggtcgaacacatggaggtggaggagaagagcccgatcaacgtgctgtaccgtgacctcgtgctgagcggcgccgcgttcggggcgcaccgctggctcgccgcgctccagcgcgcgtgcgagcgctacgcctccctcgtcgcgctcggcgtcccgcaccacatcgccggtggtatgcacccgtcgagcgctcgacatcacagtcgtcgttgcgtttttctctcgccatgacactgacattgtccgggctcgccatggttgggcacgcagtgacgccggaggggaagaggagcatgatgaagctgtcgcagcggatggtgaacagcttctgctcgagcctgggggcgtcgcagatgcaccagtggacgacgctgtcgggctccaacgaggtgagcgtccgcgtcaccatgcaccggagcacggaccccggccagcccaacggcgtcgtcctcagcgccgccacctccatctggctccccgtcccctgcgaccacgtcttcgccttcgtccgcgacgagaacacccgctcccaggtcagccatccactctctccgccattgatatcgctcactcactcactgtgcccgccattgctgctgctgcagtgggacgtcctgtcgcacggcaatcaagtccaggaagtgtcgcgcatccccaacggctcaaacccggggaactgcatctcgctgctaagagtaattagccctaattaaccctctccatgatcgcatctccaaaccttaaacctcgaaatgccatgctgcggcgagtttaatgcgattacgtcgttaatggcgtcgtctcgatctgcagggcttgaatgcgagccagaacagcatgctgatactgcaggagagctgcacggacgcgtcggggtcgctggtggtgtactcgccgatcgacatcccggcggcgaacgtcgtgatgagcggtgaggacccgtcgagcatcccgctgctgccgtcggggttcaccatcctccccgatggccgcccgggctcggcggcgggggcgtcgaccagcagcgcggggccgctcgccgccgcgcgcggcgggggcggcgggggcgctggcggcgggtccgtcgtcaccgtcgcgttccagatcctcgtcagcagcctgccgtcgtcgaagctcaacgccgagtctgtcgccaccgtcaacgggctgatcaccaccaccgtcgagcagatcaaggccgcgctcaactgctccgcccatggccaccacccctgatcgccgccgccgccgccaccgagctcgccattgcattgcacccgcttcgccatcatcggaggagagagagttggttggcgcgttgaatgctcgcattcatggactccacctgctgctgctgctgctgctgcatctgaagctgatgcaactctctctctatctatctctctctttcgcccatccattatccagctagccatgatccatccatcaaaccatgcatcgttaaaaaaaaataactcttgtttaggttttcgt

SEQ ID NO: 21258 - DNA, 15967 bp, Oryza sativa
agaacgcaccatgcttgtcacttttcctcttgttgtaaccaccaaatcacacaccaccaccatcacaaaccacaaattttcttttcctctttctttttcacccattggatttgttccgttttgatcatatcatcatccatgcatcatcatccatccatccatatgcatccttgtcacctcgcgcgttgtcgctggtgttgtagcagcagaggatgaatggttcgggtattgacttctgtccattaatgtaaagccttcaatgaacattcatttcggttataaatggaaagagaaaaaaacaaacagagagtgctggtaaagctggatgatgcgttcatgccccctgcttccctttttctggcccctgtttattactctactcctcctcctccctcctcttattacccatctaaccatacatttttcttcttaaaattatcacattatcactgcaaaccattttaaattttctctttttttctgaacggtgatatgtgtgattggatcattggagaaatgtgtgatatgaacggtggagatgagagggtatgtagggttttttttttcttgggcaggttcagtataagtgcggcattgaagcacggtagctgcggctgctggcgaaatgtttccagcgttttgatgaggggagccagggcgaggggcaggggcggctggctggctggctgggttggctgtggctggacgatcgatagaccgatcgatcgcctccggccccggcccgggaccaaataagtctcgacctactctagatcgcggcttaactaagtacaccagctcgagcttagcttgcacacgcgcacgcacacacacactacactacactctactctcactcactggccagccagctactgcctccgtcccggtttagttgtcgctttgactttttctttacaacgtttgattattcgttttatttgaaaaatgagtaaaaatataaaaaagaataagttatacttaaagtactattgataacaaagcaaatcacaaacaaaataaataataatttcataaatttttgaataagacgaatgatcaagagttacaaataaaaactcaaagcgatgagtattttgggacggggatagtacctagctagcttgtagctagtgtatctctgcaacatctccctgtctctgtctcttgctatagctaatgctaataataactgcaccacatcaagatcaaatcagaattgatcagaagaaggatgaagtgttttgttggagtggtagagacgatgtctggtcaaagattattggaggaaggagaggggggaagagatactagcttcatgtgtatatatggatagatatagtttggctaaatttgtgggttggagatatgggtttttgggagcgtttccggggaggtatcttttttgggggtttttgggttggtttttgcttggagaatatgtgtacgacagtattgaatgaggccttaaatttgccatactgttgcggcagcgtagagctcgtagttgtcattatccctgcccatcttttcagtgctttctggcccaaatttttgtccgtgttcttaaatgccccgcgaattgcacaacttgtatataggagtatgtatgtgtatgtagctagaacgttagtatatatacggaatgccataaaattaaaaggtgttctagctatctattagctgaaatttaaagtgtaccagtagtgtgtgctcgctcggctgctgctgctctatttccggtctaaatgcaatcctctcatcatttatttgccggtgttactatcaaaattaatcatgttttgttctcttgcccctgtcttttttatttatatatcttgaccattccttccttcctccttggaacgacgacgccataataattaactaattgattactagcttgtcatcatcgatgatcataaaagaaaatctaaggtagttacagcttcgttttttctaattaagatacaagtattaccgtggttttttgttagcacgtttccaaattactaaacgatgtatttcgtacgaaatatttctatatataatttgttttataatatcagataaatatatttttttaattttaaaataattaaaacttaattaatcatgtgctgatggttttctcattttacatgtctgcacttaatatttatctttagtgaactcaaactgggcttatagttgcattatgtcattgtgcgcgttgaacaagagagatcatcgagagagtagttaatggcgatgcgaaggcaagcatcggtcattcgaagctctccaactagaacactattcggcgacggcacggataacctaagcataaatgccgacgagcgaggcgctggcacgcgtggttgcatatacaaggacatgttggcctcgcgagaaatcgtcacgaaacggtggtggcgccaccggcacccgggcccacgggtcagcgaccgatcgatcgatcgcgacggtccggtgaggagtcggcccgtacactagaagctactccctccgtaaaaaaaaaagacaaaccgtatctaacattttaccatccgttttatttaaaaaaatatgaagaaaattaaaaaacaagtcataaagtattaatcatgttttatcatctaacaacaatgaagatactaattataaaaaaaattcatataagacgaacagtcaaatattggacacggaaacctaggatttatcgtttttttaaggacggtgggagtacaccgtgaccgccacctggggcccactcccagagaggaaatatatgcattggcctctcttcttttcttgcaaattgcaatgcccacacacacagctggttggtggcggcaggtacttgattacgcgaaaggaacgtacttggcccttaataagcacctagctagctggtcagcttacatctaagcatgtgaaattaaattagtccaactagtcaaatgtctcgtgcaatttgtgccgtttgaaatagtatattgtattttctatgcaaactatatgtatatgtctattaacatctctcattgtttgttcattagtttatcagccttcgctaaaatttgaattttaaaactttatttttagagttaattttgagttttttcaacatgttttttttacattgacttttaaaaccgctaataacacatatgtatattgtatacaacatcactaactcaccgtcattatctgaatctataaggctataataactattaaattgtgcaattcttactttctttttctccgattaacttagaacctcaaatgtagctttttttagcacccacttttttttagaattacacagtataacgcagacactcacaacgcacgcgcactcaccctacgcacgcaaaccctaccctatgagcatcttcgaagactgggccggcaaatcctggagagattgacgaagtcaccacaggtgcctcgctgtcgacgggtacgtcgcctactactgaaagcacaacgccgttaattcctggaaaattcgctcctatggggagtcgaacccaggacctcaggtgctactgagactcttgtaaccactaggctacaggccctttcgcgcatgcatgacattaattaaacatatatactgtcagttacaaatgttgattttttctaaaaaaaattgtggacgccttaatagtttaggacaccggggcatttcaaaagaaaatataaattgcacagtatgttttggtgctattggtttgggaatttcactgaatgttagatgatattgttctatacgtacattaactttcagaaaagttcattccctgttaatttgcacttggttggggcattatattctccgtttcctaaaaaagtattatttatttatggatccttgtattactaaagtgaaaacaggtaatacatgattccatattggccgggtaagagttcgtccattagtggttacaaatttacacaaaaaagataaaaatcattctctccatttgcataaagccattatttacgatcatatatagatctaacagttttaaattactcctttgatataaatacttatatgttttgacttaatcatatacaaatttgaccactgttttttagtataaaaatgattagctccaagtgtagaatattagtgcaccattattgactacaataatctaactataccacatttatattacaatataattacatagttttaaagttattgttgggtcaaacctttattggccaaagtcaaactaaaaaaaccaacaagttataattcctccgggtcatgaatactctacatgcagtgtccatgtgagtatttgtaaacaaagatagtatatacttcctcagtttcacaatgtaagactttctagcattgtccatattcatataggtgttaatgaatataggcatatatgtgcgtctagattcattaacttctatataaatataggcaatgctagaaagacttacaatatgaaacggagaaagtagttgacacgaagaaaaaaaaataccgacgacatattttcctgaagatataggtcaatggcattgccccattcatgcatgcaggactccaaagcagtaggaagggggattattaaagagttcactaccttctgagggggcttgaaatgttgggccatctagatgcatgcagtggaatggcatattaaacagtaaaggttgctcctgatcaagccggctagctaccagcttatttggacccatccaatcttggactaatgatactagttggcgatggatggatgcatggacgcacacatataatgtgtgtacatataaatgtacgaatatggtccctggtgatgaacaatttcgctggaaatgggcgagctgtgatccggtggcacgcccttaactcctcccagctcaatctgcgcaggctaatgagttgcccttgctcagccctgccccctagcctgcacgaatcgcagcgcgccaagtgtcacgtgtccctatttcttgctgtttttgcagattagcatatactgtgattcatttcttaacaattattttaaaatagaaaaatgcatttgcatttaccatatattgttgtatcagttctgttatttaaccggtcggttttattacaatctagatccacatatatgatcaattctctcacacggtcaatatgtatataggctaacgagttttactcttatcgtcccctatctctagcctgcacgaatcgctacgcacaatttctcaatataattcttgcctagggatgatatttgccaatgctacacagaatattgacgaattttacgtacgttgcacctcacacatgcaagtgacattcccaagatgtccttgcaagaaattaattatcttctcaacttctcatagttgtacactttgaaaatcttaatttcatcaatcctttttttttgtcataggttaatcagcatatattgccagggtccttgtactcttcctcttcctatttctggtcaacgtatagtactcaagttagtcaagttgaaaatggcatatatgtgtgtagatactatggtcccaacccatttgcaccaacagcatgaagagaagactctcctcctggtgttcttgggtggtatattttgttttagagtgtgtgttcagttcacaccaaaaataaaagtttgtttgaaattggaacgatgtaacggaaaagttagaaatttatgtgtgtaggaaagttttgatgtgataaaaggttagaagtttgaagaaatattttggaactaaacacggccgtagtagcattttcccaacgaaaagacagggaagcgaaagtacatgctgctacttttatcaacaatccaaacgaaagccatcggcgatcgacgtcattgtcatttgcaaaaaaaacgcacacatgccatgctgtctcagcaatagcatgcaaccaccatctacacacaatttaaatagcaatgcaacaatatcttccataaacgtttagccgtaaggttctgagtccagtttcacttataaactggatcaactctattttttattaaacgaaagcaggaaatccatgctctttttggatgttattttctaagaaaaaaattcttccaaagctaagaactgaataaaaaaacagagatagagagagagaggtgtggaattgcatgaccagctgctactaattggtaggagtagtatgtttggttggttcataataatggcatgcaaaataataaagccagcaaatttaattaattagacaggggaaaaagacagtacgagatgagtggacacatggcattggcaagctagccggccggaccggacagggtgcacgaggacagtggccatttagagagggagagagatgggagaagagaagaggaggaagggctatgctagtagtaatagcttttgcaatatttcgagctcatctatcgatcccagtaggttgttgtgcgatgatgagctagaaataactccctcgcaaataaatgtgcatttgatcctagtaaatggagggcatttatgccatccatatgagggcttcaatgttgttaatttaagtcatccaccagattccctgcagggtttcagtgatgaattgcaatgcgaagaaagagagaaggaaggaagaagagatctttttctttttgatcttttgctattcttgaatggctggctaaatgtgtgaatgaatattgcacggccttgcaaatcattgttgagccaatgtgagttgatagtttcagaaatgtttgaatcgtagcagtagtggtggtagtaatagtagatctcatcagcctttttgtgtactggccatacgtttttgtgcaaatcagtgaagtaatcactggatgacttttgcattatggccacttgactgatcaggccagcctgcaggtaatagctagctagggtacggagcttagcctttcccactcatggagagacatgccgtagaccataaggaaattaatcgatcgagaatccatcaaacatacaataaagaagaaagggtatttcttttaaggaactctcataatgatacaatgataatgccttttaccattaatacattcatgatatatatagttttattgttcttggcgatcgacgacgatgttgaattgtggtggtagtagtatatatatttattataattgttgatgagtagtagcattgtgttgttgtctgaagctttcatatgtcctgcactgacaataacttcattgattctagttgctgtcttgagccctagttgggtgctgaatgcaagataatcaagagctggccgactagtgaccaactctgaagacaatgacctcgcttttaagccataagctcaacatcaatgaactatagatgcatttttaaggtgctatattgatggcgaaaaattgaccctcctcgatcttggtcctgtcttatatattgcgcaatcatttgattttactcggagtaatcagttcttccttcttgtccatttcacatttgaattgaaggtgagatcaccagagtttttagtgtcggcatgtgaactaactagctagtcaatgcattaacaagccattgatactctgaaaaattcggttgtcgaaatgaaacctgcagctaattaaaccagcgagtggtcggtagtcattatagagtatagaccacaattaagctcactcttatttgcctgctaagtaactacacggtcagtgtaaccttcaagtgtgatcagcacatttctccatgattgtgatcatattatctttgatgattcacctccataggaaaagtatacatataatttctagtagagagtctcaaaaaaaaacatgatcatttttgctggccagttcacaaaccggcccagattagcaaatttatataggctttgggcccagatattagtaaagttcacatggcatctacaccacctgatctagacaggcccatatacggcccatataccaatattttgccttggtgttctgattttccgaatatgtttgtacgaccggtctgaggtctcagggatatattcactaccgtcgcatgtcgatgttgctgaatcttgcttattgggatgcaaaaatgggtagatcttctaggtgctttagctgctgcaaagtgatgaaattatttttccaccttggtgcaaagttaaactgttcatttgaaacgacaaattaacacttcagtcttcagctaggtgcacagtgcaatttgtgttgtagaaatattttactgtatactgtatatttgataagagcctctataatattatatattcgatatattgcaacgatggaattgaatggccatcaagacaaacgaaagaatagatatatattattcatataccgaccggttacattacatggggctactttcttggaagggaaaacaacaccaagttacatcattacaaggacagcttgtctatccagttactatatactgtctccgttgatttctataggacatatattttaatttctatctagaaagtccaaggtcagattttgaccactttcttttcataagttttattatcactaaaattacaaagaaaaaacaatattgtgtgaaaccattttaaaatcctattggtataacttctactatacactatatttacttgtacatttttaattgaatttacttttagttttaaaaatcacttgtaaaaaactacagagtttattttgtaaaaaatcaaaatatgtcctattaaaatcaacggagggatatatatatatatatatatatatatatatatatataaggaacgaacaaatttaactaattaataacaaatgaaagaacaataattaacgttgacccgcacaggtccacccgatatgatgatcactgatcaatcccaagtcccaaccaccggttgcttgactccaccgtagaccttaactttggtctctacgctagtgtaaaagggatcctctgatttaactgctgcgcagttgagtcactgacatgtaggccatagtaaagtgggacccatatgccagtgactcaactgcatgtgcagttaaattagaggatctgcttccgttctatctacttgatcatttctgggctgggttaatttacttgatgacctgcagtttaatcagcacggagaaagagaattaaaagttcaggttaaaaaatagttaacctttcttgttcaagctagcgagctggaccaagaaaactacaggaaaacacaacccggaaaactcactcacttaaattaagcagcagtaatattgcatgtacatgcagctggtcggagtagtggtgggcgcgcgttagcccgcggcgttcggctgatctggtggtgcgggctcgacgacgccgccgccgccgccgtggcgccgcgggcggcggcggtggcgacggtgatggcggcggcgacggaggagccacgagaggaggacggcgaacacggccctgagtaccatccccctcctcggcacgtaccgcggcgcgacgacccggcgtgccggcggctgcggcggagccatggcaagcagtggcggcgcagcgcgcggtgcagctggacgtcgacggcgagtgtaggtgagatcgagtggatcgatcggtgtgggtgacccggccaccgcccagtagctagctagctagaacgcagtggctcatgggatcgaggaggagaggtgatcgctgagtgctttgcaatctatttataggcggcgccgccggcccgaccggccggacgaacggtttggctatttttccatcgaacatcgatcggccggtccggtgttagatagctatagctaaagctagcccggctagttcatgagcaattgagcatggacacgtacgctaggtgcttgggttatacttacatatatattccctctctgttaataggtttatttttggctcctacttttgttgtaaaataagtttatttttaaataatcattgcattggagttcttttaaaatagggaataattgtattgggagtagataaagtgagtaattaattgtattattgataaattaggagtattctagtttattttttattttgtattgatatgtataggataagtgaagagtaaactttgtacaactattcttataaacctatagctgtaacatatacaacaacttatgtaaacctagctatagcaaattagctagctgatgcgtcgtacgtcatgcatgcatgcgcgcattcacgatcgatgcctagctagtctgatacatatgcgccatgaaaacctgagatagagccgggaggagataagcactgaggatatagctagtttggtattatgcagggccaaaccgcgtatgatatcgtgctcatcatctcgttcgtcgtccttaatttcgttggtgtttctatccgtcgcgtacgtcgaaactcgaaacgcggtaaggattgaaaatctctggacacattgttaattcttttaacttttttcttctcgcggagatctggactgactattttaatttgcagtgtgtttagaggagattatcttatctgagtgtaaatcaatttattaatttatatgaattcatgcatatgcgtcccgatcgcgacatgcaggtgtatccatcagctcgcaggatatggcgtgtaggacctgtgtttatggtccacttactcattccgacgctgacagtgagatcgagtgacactgctgcgtgccacgcttttttctttctttctttctttctttttttttttgagtttacgcgtagacgcgtagtgatgaatcagtttgattcggcagccaaaaacattacatcaccaccacggagatacgcttatcataagtcgtcttttaattttctgagacatagggaaaatagatggattatttgccttcctctaacgtaacgacttgacttgccacacttgttcagtcatggaagaaaactatactatagctagtactaaacaagtagggaaaccagagaataagaggacatgacgactcatggttttgcaagacgtaccatgtgtgtatgtgtgtgtgtgtgtgtgtatatatatatatatatatatttatttatttatttatttatttcctggttttcctgattacgagcttgtgatgactgacgacgaatgaccaaattcgcgccaaaatttcaccggaatttcccaaaatgacgagtatgacgtacgaacaccctcatatagtatgagctcgtttaccaactgatgatgagcaatctcagttttctgccaggttctgggaatgttcctgcattggaattatagcctgagcgcagcccctcacttttatctctgcagcgtgaccgtttctgcgttgacgaaaatacggtgacggccgggttccctgtcaccgactcactcacggctcacccgccgcccaaaactccaatagtcaagagtcaagatggaacttcgtggtagttctctcttattagcagcaacacgtgtttcacgcttcacatgcacatcaagataaatttataattttctttgcgttgggctatgtacaccttctaaggtgtagaagccgggtcaatataatccattatctaaaaaatagaatgaattttatatatggtatggtttttggaggcaattcttgtcatatatgtattgagtttgataccctgaacagaccgccgatgttaaactagcagaggagcggactaaaatcacacagaagaacttttcttgtttttgtttttatttagttaaaaagtatgttctttaaaaaatatagtcgtatgtaaatggttcgaagagacggctcagtaaggatgggatgatcgatcatcaaatcaagggtgacttcttggttggtgaaacaaaaagaagggggacaaaacacaccaatgattctctcagccgatcttcatttctaacttctggagaaacctgttgagatatattgatgacaacccccaccttttcatcctctcccttaccgggagagtgcacttctcttcttcttgtggccttcacctcctgcatggcccggaaacgctccccacccaagcgatttagatttgtcacaggttacgcgaccaagctctccattattctccccaatgtttatctttgttccactttgttttattttagtgttttactatattcaaccagatgttgcacttacacattatgcacattactttatcaaaggcgtgcaccgcaccctccactgtctcgaagttgcttgctggcaacaattatttttgttgatgttgtatttggttttctttgatgtatcatgtattggctttttaatattgcaatcattattttataacttcgcgtctagttgaaatatttttcaccaagtaataaaacatctaaaacaattctgacaagtggtgaaacaccgtttgacgctttgactaggatgggacctccaaccgctactcgtgtccacggtgtaaaaatgtttttagaccttcagaatgtacgcgataaatttgttgtgtaaaaatgttacggtcaaagtcacatccttaagaccgaaaaaagtctaaaattcacagtatactgatgatcagacagagtaccacaaattataaggtgcgtaccacatagtagtataagtttgtaagggtctgtttagttggtgaaataaaaatttttgggtatcacatcggtcgtttgaccggatatcggaaggggttttcgaacatgtcacgccccgaactataccgaccggaactagcccgggacgctccaaattaatctgttaatcgataccagtcccaggaaacagtgctggtatcacagggagacagaatatcacagcaacagaggtctctttattatagagtagaggtacagtcatgttgggctgcggacagatcccgagctcacaactgcattacaaaagggaaacggaagccaggacttggaccaatcaacacaggcgcgacttgggaactaggccgaaaccctaaaactcatcgtagccggcttgctcctggaaaaacccctcatcagcaggatccacttcatcttcttcagcaactgggggggattatttatatagagcaagggtgagtacaggagtactcagcaagccataggaaataagtgtttaatgcaggcttcaaggaaaggctgttgtttttgcaattgattttatttgaactcttttctaaaaacaactaagtgagtgcttctcaaacgacccggatgagacagtgcgcctcgtccggtcggagtatgtgcaatgcatcagtctttagaattgaaacaaggttggcacccggccaacagcttttcaaacggccacccgggccaacaactttcaaacggccacccgggcctagctgatcccatcagctgcagatttttcaaacatcgaacccctttcaacaacagtaatttcacaagcagtagtcaaacaaaactacgctaggaatcacctcacatccgcccttgaccgtgggcacggctgttcgaacagtttgttaacctctgcagagggggtacactttacccacacgacattactaacccggatcacccagcccgtggggatcagccacgtcgggagacctccaagctttcatgacaaggcatttcgaaagccgacacaggtttaccatatgctgacgagaggggtcccagaccaacaacaggttaggtcccagaccatactgtgccaggaagcccaggggtcctccccgacaccaccccggcgaatccacatgtctctcggcatcaagactcccctgataagctagttactcagccagggggtgtcccattccacccatgtggtcgtacttgtcttatgtttggatgaaattccaaggaatcggtccttaagtgcgagtgcgggaaaccgtacacccggtacgttccccggtccgcggttttggaaattcatttagttcgcaagcaccgacccaggtgtcgggttttccaagtcttttgtaaacccaagttttacccaagttgttattcaaattttaagtttgaaggcgtccgtcgatactcgcacagggtgcacgaatatcgagacgcaactagatcgatacaaggggacatgatataacaattaacaaaggaaggattaaatgcaacaaattaggtaggtccgccaatctgccttgcagacgggacaacagattaagtgcgatcctatcaatgcataatatttttcaagcaacataattaaatttcaaatataggctcaagatgttcaaaggtggcttgccttgctcgagatctggagcttgatcctcgaaatcctcgcactgcgggtcttcgggctccgaaactacacgcgagacgggacaactccacaaacggcgaaaataaagccctattaatgacctctaagcgtgccattagatagatctcgagatttgaggaattttggaagttgaacggagtcaaacggatttacggttgggaagatattgaatttctaagattattagattttcggtctaaaggaaaaggatttaattaaatcctttttggaaaagaaaagaaaagaaatgaaaagagggagggaatatagacttttctcaggcggcttgggcgcggcccaagagaaatagagcggtccggccgactaaatgggccggccggcccaagacgcgcgctcgcacgggagggaggagagagagagccggtggaccgggctcaccgcgcgtggtcccgggtgggacccgcttgccgattactcggttcaccgtgcggagcgagcacgcggcgcgcgcgcgcgggcggggctaggacgcggtgcacgcgcgcggttcgcggtggacgcgggtgcggcgggcccacgcgcagcctcgcggctcgcggtggaacgcgcgcacgggaggggctgaccgggatcggcccgacccgatctcggccgagctggcgccgacgtggctgccacgcgggctggcgggaggaagacgaaggcgccggccgcgaatggacggcgggcggcggcggtttctccggggcgccttgcgacgatgaggggcgacggggcgtacaccgggatgacgaggaagaaagagagggagcgagccaacggcttggattcgccggagggagtccgtcggcggcggatttcggcggcggcaaccggcggagagcaaagggggaaacggcgacgaggtcacgaggggccaattcccggcggtgagagcatctacgcggctacgagaatccgttgctagcgtcggattgggcggagctacgccgagcgaggccggcgacgagcgggtgctacggagcacgggcggcgacggcggcgagcacacggcgagcgatggcaacggtcggggcagcgccggctagctacggggaggctactcgtgctactgccgaaaactaagggggagagatggagcgaggaggaagaacggagggaggcactaccgagatgaggaggggcgctgtgacgagaggccgatggcgcgggagtaatctctccggcctcgggccggggaagaggaggaagacgagcgcccggagtccccttccgcgtccacgaacgcaccggctctcccggcgcttggcgatgaacggcggaggcgagacagagctcggaaggcggcggcaacaatggcgatgggaggagaagagagggagggcgcctgggctttaagggcggcaatgtcggtttggaaccgacttgggtggtcaaggcgcgagctggcgctcggcgctcgcgtccaatcggcgacagggcggagggaggatgacgccggcgggaggaaaaggggaaaaggagggagagaaaggggggcttgcccctttcttctttgggaaaaaggaggaggggagcgggggcgtcgcggcagagggaggagggctctgcctccgtcccttggcggcttgcgcgcggagtggcggggccgatgcgatgacgacggcgatgaccgcggggcggtgtggagcggatcggctacacgggcgacaggcgcgggcaggcactgacgacggcggcgaccaggcggtcggccactcggcacgcgcgcgcggcttgcaacgggaggcgtgg

SEQ ID NO: 21259 - DNA, 5354 bp, Oryza sativa
ccgcgaaacggatcgtcatccattttagggttccaccatatatatacctcttgtaagccgccgtgcggcgttgtaacctcaccccagatatggtgaagatattttactgctagcgcctgtggttttttctctcctgttttgggagggttttccacgttaaatctcgtgtcttctgtgattgatctattgttctttgtcgtttgttcgcttatcgtttcctaacactgcgggctaatagcccatggctaaagccaactattagtacaatagattgtctattgactgactgaatctcataatcaaataattaattatgacatgcacatatcaatgtatatgatcaagagtgaattgtatcattgtagctatttgtgttgtgagatgaactttgttcaccaaacaccaggatcatatcacagatcataccaaccaatttctctgtagtactaaaattacaaagcactagtgtttgttggcaagaagagctcgtgagaaaggagtggatttctttggctgattttcgtcaaacgatgtggcatcagagtttttcacggcacagttttcgctcacgatcgcatggatggaagacgaagcacgcggaaggtgatgagatcgcgcacgaacggcggagatggatttgcacaccgctgggggaaggggatcgcgcgcggtgggcgaaaggggatcgcgcgccgcggggtaggcagttctcacgggatcgtctgaggacgtgagggccccacaaacagcgtttttagcactagggtcggctgcacacgaccaatactgcgtggagaaaagtgctaacgccgggcgacaatttagtcgtccgctttattctctctcatccacataggaaattgatgatgtggcattattttagagcccgctgagtcaaattattgtacctgctcttacaatgcatcccctgttccaacttccaagtggatcgcatacttctgtgaatgacggtgcgacgaacacaatggcacaggcgagcgccagcaaggatgggttacactgacatgtgggcccggacaactccgtgacaatgggacgtcgcgttggacgactcgccgctcggggtcacccgcgagccgcaactagtccaccgccctctctctcgctttcttctcaagtcccaactcgcgcgaagcggagagcgagaggcgagagcgaagtgaagcttcttcgtggcgcgcgcgcctcgagttcgtctcttccctcccgcggcccaggcagcgccggccggcggcgctctcaccctcctcgtttcgtggcgccgcggcggatcaacgcggtgatgcattttttattttttcctgattttttggggaaagtttcgcgccgaacgagttgagggttcttctaactaggggagccgagaggaggagagagcttttattttttctactatatttgttggggtttgattctgatgttttttttttgtatggatgttctagccagttagtgtacggtgactccgtgagtggagagtggagaagggtttagcactcaaacttttttttttcgaacttttttgtgcatttatccagggagatgagacgcgatgcatttggcttgttttttttccggatgaattagttgcttgttcctcgctcccgaatgagttctcgaccattttttattttttattttttttgccttgtactagattcgctgttcggagcttcagaaaatgcaaccatggtgatagtgggtggttggttagcgtatgaacatcgtggagcattttttctctaataatatatttttttcaggaggtgatgtttaatcagcctcttctgatggatttcctagcgcctacagtttctagccatttgtagattttttatatcgattctaatgcgcagtcaaacgcatgggcgaattttcactcgcttccctatgcggtgctctgaattttcagtttccagttgctgcttgctgcgctatcaaactaacaccttgtgttctgcgcagcttctcagcacttgctgtcaagtttgccggcaattggttgtggtaaatattagtcaagtctgaagtctccatctctcggagataattatcttttaataaatagccctgtatccattcatttttgtggttctaattgcagccgtcgcccttgtccttctgaattggttatgtgagctggggatgtgagtgacaaggcttcgtcctggattggtggttcgctagttgctgcagttcttgttttttttggggaatactggttgctgcagttcttgcatatcctgataggtgtttgtgcctctttttgcctgtttcgcatgaatatttgtttgattagtgattagtgtcgttggtatggtttgagttaccgcgtgtgtgcttttagctacggattcagaaagtatttttgatataagtactgtttgagatggagtgccttttggcttttaacagatttacctgctgaagtatgaccgattttttcatgtgtatgtcgttattatgctttatgtagacagttttcagtctctcctaacgttctttttaagataaaatgacatgtgtactctgtgtttacaccttttctacattttgctttagtttattatggttatccctttcttgggtcttaatgtagattcaagcaaattggataaccaatcttacatattactctattttaccaagaatgctagagcatgaatggtgtcccttgtatttaacaacttttcctgaagaagctttataaaaatctgatttgctgttgttgagtgcgactgaaatagagcaagaatttgcttgtaggaatgcttatcagagtaatcttttaaatttaagcgcataccttctgtatacaagaatattatactttatatgcaagtaacagagatcattttacttatctacttcagcacttaatgcaatgtcatctaatgcagtggatgttgggttccgtgtaaggaaatgtctggccaagagagagatgatgttccaatgctagagctacaaagatttcctactagaagtgtatcgatgtgtatacctgtcagggatgatatatatgaagactcaatcatatcccacagtggtcctattttcaccccagcaccaactcagtatacatccgtggctattccatcaggaaacagagacatgctcgataagctgcctcgtccaaaggttaagagcaaaccacatgttgttacgccggaagaagttggaataagtaactggccttatgaccagcatgttccgaagaacaaacacctgatgatgtactctgagcctctgggactgtgtgataatcctgattgtgtcgactgtcctcgtgcttgtaaaaacaaaaggcatttccagagaagtttagctccgtttgataacaaggtgatattctcagtcatgaacaccactgacttgccacctccctttaaacacatttccttttgagaaaagcataagcatattgattcatgtggtggcttggattggagctctatattaagaggtcttcaaaactatttggttgccttgttatagttgtcaaattttagatgtttatagatcaactgactgactcttgattcattctgtgcaacctttaaggaaacaactgtttcacacatattgtattttcatgctttagctgtggattatttgagttatctaagatctgtttggtttgacaaattaaaccatcctatgattagtcaattatagggtcatcccatggttttggaggcatgatcccgttcctcattttcctaccaaggatatgttttaagggatgaagtggttacgtaccactttactctattcattgaaccaagcaagtagctagccaggtttgagctagaatccaatggttgattgaccaacatattcctcaaactaaaagtcccattaaacattctcaactcgcccctttcataaatgttaaagcacaaaactgaagcaatgtaaagaaatttacattgtacaaatcccctagaatttattaaattcaagtggtgtttttatttttgaactttgcaaagctgcaaattttacaaatgactttaaatcatcataattgtcgttgttgttgttattgtcactgtctgttgttgactttttgcaatttcttggagtatttgttactggaatttattcatgtctccgtggctctgtgcatctctctactgatgaatgtgctattgatatatctcgtttattattgtagtttcacaacattctttatggctacggtgatcgatggaagaagaaagctgggcattacctttcatacattccaattatgaagccacatgataaggctgttcatcggtggaaccagttttttgtgatatcatgcttgctagccatattcaatgaccctctgtttttcttcctattgtcagtagataaggtaaggctacaagtttgacaactgttatatgaaagaatggactgaggccatctctttacatgttcatttctttcctcaatatcaaatgttgcagatttacatccacaatggctctaacacaaatgagcccactactattagtctgtgtgaagtgtcattgtcaagccactagtacagtttgaacatgtaggctaacgctataaaaaaatcaaccataacagttcatctcaattgtttctattcttgcaactatttatatataaaattatattacagagaatggatccaatttaaccacagtacatatatgtatttctgtatatttgtttttttgtggtgcaggattataagtgtatagtgttcaactggaatttcgcgatagcattagctgttggaagaagtgtgactgacgccatatattttttacacatgcttcttcaggtgatatattaacatgtaatttattgtatttatacttttccttctccattaaatgaatatgcagatccaatgtattcttaagtgagatgattggtttattcttttaatttcctatgatgggccaaatacaccttttggatttgcacaggttttgggtgcatgtacattatggcatggcttgttggacaaaaaactgcacatgcccttagttttaaagaaatctcttaaaagttagcatgcaaggctattatattttttccatatgttgtttaccatgaagtagtaatttttgcagcagaggttttccttctgttaaatatggaaatctacttccatgttagtttcttctttttcatgatagtacttctctattttatgaactatgtggcattttggttatattaagattccaagatgtatttatattacaaatccaagaaaaagcaccatgctcatactgtcatacattaagtgttccccgccaaaaaaaaatgctcatacatttgaataacttttgcagttcagg

SEQ ID NO: 21260 - DNA, 3021 bp, Oryza sativa
agagatttaatatactcttgatattaactgtaattagagattcaattcaatataattttggatcatgcatgtaatcgtggaaaatgaaacctccgtccaagtttttctttccaagtcccgcggaccaattgacggaaccgatcccaagccctacatatgcagttgcaagctatgactaattaattattacctgagatcaacataatagcaatagattccccgcgactttggaatagatggcattatattacctgtctatcagtttgacgaccttgtcaaaaatcttctcctctttattcattgagtcatacacagtgactttgcatgcgtccaagtcgaagaataacaggacccagtggaatctggaatatgcttgagatgagatatatatgaaaatgtacatgctatatatatcggaacgaaatttgttcgaacgacaataaaaactcactctgtgttgtacggcagtagtatgtacgtcctgaaatgctgctgcgttaggagatggacgagattgtcctctgtgtctttctcgtacttgtcgatcatttcggtgttgattttccgagggtcgatgaacccagtatcgtagaccctcgtcatcgggtcctttgaatctccatttctacaacgatgaaaggaaagtattattgcttatatatatgccaggagctaattattgaacgaaacaaatcgaactcaaagatactcacaaaatccatgagctcagaagagagacgtcgagggcgtccagctggtacagatcgaagagatccttgaaatggatccagagaacatcttctccttgcaagaagtcggggtttttgatcctcgctccgaacatctatctacccttggcgctcatttccatgtaccgttcatggaatttgtacatctatgtcggtagggactgcagctgttcaggtttgacaagcggtttaccgagttcaaacttgtatgccacttccgccttcgggattggtgcacctcgaatcagctgatccacagtagaccggtgtctgaaatgaattccgttatgccaaaatcttcgccggtcacgaaaggctcgacctcttggtttggttgttctataagctgagggactggtttggacttcttgtgataggctctctgaactgttcggtcatagtccgatatctgtaacgcctccttgtttgttgtggacattcccttgaagaagttcttcacgctcggtatctctcttgctcctcatccgactcctgtacgtgtggatgtcctccttaaatccaatcttccagggaatcacgcctttccctcgtgttcgtcctggatgctcgggagtttgtagggcgagtgacagctcatccttctctctatcgggtcggaatgtgccctgagaagagactaccactgcgtccgttagtcgactggcagcctcgcgtatctgatcgttgaagacaagggagccatcaactgggttaagcgttccaccgtgagcatagtaccagaacttcgatcgatccggccatttagcggtggccggttcgatacccctctcaatcaaacttgcctccatctcctcccacttcggcattgcgacgctatatccgcctaaccccaagtggtgatggtacttcttcttggcggcattttctttgtttctggccatcatcgcttccccttgttgccctgtcttgtaagcaacgaactcgtcccaatgatcccttagctttgggaatgtgtcgaagttcggtgtttgtcccttcaggatgtatttcttgtagagatctcccttgaagctctagaactgttttgccattttcttcagagtccactatttcactatgttctccgtacccgcaggtagcgtgaacgtctcgagcattgtggtccacagcatctctttctctgagtccgggacaaagctgtcattatccccgcgtgcccttgttctacgccagtacaccgtgctgacaggcacgttgtccctcacaacccaacccaaccgctgtggcgtacaaaattcttggctgcttctgccagggcactaggtcggccgtcttcgtccacctcagttatgatgtgccgaccctctatcttcttcgcggcacttcgttgtccgcgtgccctcttctgtccagcggagggatgacttccactagcctcctcctcatcgttcccctcctcgttcccctccgcatccctctccacgttcccctcctcgttcaagtactggtttggatcctcgttccccttttcttcgttccagtactggctgcttccctctgcgattgtatcgtatagtatctgttcctcatcgcgatcagccatctgtgcatacaaaaaatatttgttaggtatataggatgtatttgctaaccgtaatattaaaattctactaatcttatattaaatctctaacaatcttatattaaatcgctactaatctcatattaaaattgtaataatcatatatatatatgctaagtataacaatcttatattaaatcgatactaatcttatattaaatctctactaatctcatattaaatcactactaatcttatattaaaattgtaataatcatttatatatgctaagtctaacaatcttatattaaatctctaacaatcatatatgctaagtctaacaaacttatattaaatcgctacaaatcttatattaaaattgtaataatcatatatgctaagtctaacaatcttatattaaatctctaacaatcacttctttacatcacttgcctgcgcgaattccttcgatggctagctaccacttcggcttgagggacgacgacgacgtcttctctacaatattaccaggaaaatgtattagtctaaacgggccaagttacatatataatcatatatgtattacgagtaaaatgtattagtctaaacgcgtttcattcacgttcgtaagcgtttcattcacgttcgttcgtaaccgtttcgttcacgttcgtaagcgtttcattcacgttcgtaagcgtttcgttcacgctcgttcgcgttcgttaa

SEQ ID NO: 21261 - DNA, 9105 bp, Oryza sativa
aggacctttgttgctctgcgtagttttgccgcttaaatcccaggtatagcagcccatgatttcagcctgtccttttagaactcggtaaccatataactccagaacatcctcagcctgataagtataagtagcatctgttatttccaatgtttgtttccttattagcttgtaatatcccatctttgtgtctcacttcttggattgtcagtagactctccttaaggcatctcagtttgttctttgcgtcttctcggtggtattcatgctcatctcctgcataagagcgtatcctgtcaactagatttggctatccatccccgtattttttatgctgccatttttagctcgatggagttcgtcagtgctggttccaagttgctgcataaagaggaaggattgttatttttgataatgaaagtggaagggttgctgatttagagaaaacttgtattttagagatagttaaagaaagagtcattatgatttaaactaaaaagctatattctccgagcagcttcatttgtcagtacagtggaaaaatcattaattgattctttttaatttgatttggttgcctagttttcttggatttttcacattttttatccttttagaaaacttattttagaaatgatcattttcatggagccaattcattggcgccgtggtccaacatgacggtgccaatgacgtttgcgtcatccccatatccccttggtggatgccccttggtggaagctaagtcactaatataaaagggacggcaccgatattgttggcgctgatgaccaatttgtattttttttaaaaaggctctagttgtaataaaaaaatatttacaaataggtcttcggtgctagcgtcattagcgttgagaatctatttgttaatacaaataggtccttttgtgctaaaagtaggttattttatcttttacaaataggtactcggctccaacgatattggcgctgtcctccttcacattaatgatgcgagggggacggcgtaaacatcattggcgccgttatgttgtaccacggtgctaaggtgctaaggacttaggctgtgatcgtttgggtgggttgggaacaaatgttttgtgcacgaaaaacggagtagtccatcagcgcatgattaattaagtatttatcaaattatttttgaaaaaggatcaatatgattttttaaagcaacttccgtatagaaaatttttgcaaaaaaacacaccgtttaatagtttgaaaaacgtgcgcgcgaaaaagcgcatgattaattaagtatttatcaaattatttttgaaaaagtatcaatatgattttttaaagcaactttcgtatagaattttttttaaaaatacaccgtttaatagtttgaaaagcgtgcgcgcgaaaaacgagggatgtgagttggaaaagttagggaaagaactcagcctcaaaggttaaaatccagcctagttttccatgcctgatcactgcacgtctgcgcggttttcagcttgttcttcaaagatattaacatcttaaaaattgtattcagctgcccacaaaggtattaattttaaacatagttgtaacatctaagacatagtttctggcgacccattccaggcagatcatttttattatgctctggtgaatcagcttatgtgaaaacctatgcctttctggatgctactgctcaggttggttctaggcagaattgcagataccctctgaaccaattatagctcgccgaggaaattacttggaacatgcctaatttaatggcaggtattgtcttctagaccaagaagggtcattcatgagtaatgatgcaagattatatttttccttgtagtttagttgtactgcttactatattccacagcaaaggtagaagcaaaatggtgtcttacatcttcttgtttattgctacatgttttccaggacgaccttccttgctctgcgtgtttttgccgcttaaataccatgacagtataattcatgtttgctagctcaatacgctagctgtgtcctttcattaaacctggattgtagcgttcgttttctgtacaataagagcatgtttagttcgcgaaataaaaatttttatgtcacatcgaatgtttgaccggatatcggaaggagttttcggacacgaatcaaaaaactaatttcataactcgtctggaaaccgcgagacgaatcttttgagtttaattattccgtcattagcaaatattggttactggttaattatggactaattagtcttaaaagattcgtctcgcgatttccctccttaactgtgcaattagtttttcttttaatttatatttaatgctccatgcatgtgtccaaagattcgatgtgatgtttttggaaaaacttttggggaactaaaacagggcctaaacattgccaggtaatggtctaattgtttgctcaaaatggagttttcatgcatatatctgctaatgatagaaaaaggtagaaaagtatatgtcaagtagcgcaagatcctatataaacgtattaacagtttttagccagttaggaataacaaaatattcgatcggccagtcgatcgacccagtcaagctatcttaatcagcctgtgaataaggctgagttataagcttcaactctaaacaacttcctcgttttctattaacactcatccctaactactaaacggtgtattatgtgcaaaaaaaaatatatattaaagctttataaaagcccatattaatctagtttttcagtttataataattaatacttaatcatgtggtaatgacttctctcttttctggtatcgcttaaactgcttctggtagcgcttaaactgctagccgaagtgctagctcgaacgcagccgtacgagacagctgggactgatgagccgattctagcatatacatatcaatgatggattattagtatataattaattgagtattaaccattataaacttaaaaaaatgatttgtttgagtttctttaaagaaatttctatagttatttttgtcataaaacatcccattttttgtcataacagtgagctctagcacggcctcgtactcccatcacccgaaggccgccgcaacaacgttgtccgcgtcgccccttcctccatcaagccgaagcccttgcagccatcaggctttgtcgtcatcatcgccagcttcacgtcatcaagccctacgcgtcgctaacattgcttcgtctgcttcgtcttcacccaaaagtcaccaccgaagttgtctcccaattaccgacccatttgtctatgtcccccaagccatcctctccatgtcaagttcgtcaccgctctcttctagccatgctagttcctctcctctcgtcgtggcttctctctttgtggcattgctattcaccaccgttttctagagggctttgatccccgtgctgctggcatcggttgccacccgtgttgtcatggtgtgcacgtgtggaggccacgtcagtgccacgtggttgcgcgcattgcatctagtggggcccgcttgtgggcaactggcttcggttgacacgcgggtccacttccatagacccgtgagcagtttctgtgcacttggtcctccatggtctcgaggttgacattctaggagcaataaacatgttttatattgcaaaattaattcaataatttgtagatctccattaaacaacaaataagctttggatgaccatattttggtcatacaaactctgaatctatctgttcaagcctcttaattataacctaaagaatccatggttgtgcttcttatgtactgatctttgctttttgaatagggttttatctttttttttgtgtgcttcatgtagttcatgtcattccgaaggatcctgaagtgcggttcgtttctgcgctgaagtttcagaagatcgtttctttgagcaaaggcatgtcgcatgggaatttgcaaaactgttttaatttaaagtattgcattacactttattaaattctcgcatataattgttttacttaggcatgcctatcattccttgctatggtcttactatttgttattgcttcattagacctcaacaattgtaggtaacaaatacaagctagtgagaactgatgcttacttgaccttttaggataatgcttacccatgcttagtgagaaacttatatatgttttacaatattagatttcgggaattatttcacatctcacatagtaacttcggactgttggcgggttcgcttggacatgatgagcttctccctttaaaattcccaaaaccattttttcgatagggctcgaggtgtggtttttttacaggaaatagtaggagaggctcctactgcaaaatatcatagagatagagtaatatttacagaagactataaaaaaacgaagggggaagtgaaatttacaaattgtcaatccatgattgccaaaagagtctatcttgctcctttaccctaaacaaaagtagagtaaaatcctcccagaaacgacatttacacaggttgaagcccggtgcaatgctgttgaagatcaaatcatttctgatttactaaatgttccagattgagattgcaaagacttcaatgaagaacgggaacccaaagctctgttttgctgaaatcaccatgttcataaattccatatctgtatccccacataactccagcattgtgtggcaaatgaatatgtgaagaataggtgcaacatatcttctgtatagatgtaatattacatgcagcagagttggagcagagttggagcttgaaatggtttgaaagtatttcattttctcagtccttctcgtacaggcggaccggccgtccgactagaaagaccgattttgtccgcctagaaaaatgtttttttctattagtgaccactgctgttcaacctgaaccactgttgccgaaaggtcgctggaacaccgttgttctctacggtggcacttgggagagggtttgactggttcgatcaattaccttatttaattacctcagatcagtacagcagtacagctgacctactaagccctggaatattcactacgctagatcggcccacctgtgatggcccaccagtgacatgctgaagtgcacatcacatatggtccatcagaaggtcataacaggtgaggccatcggctgaggcccatcacaggtatttggtcacgtgtgatgggttggaatttgcactcgacataggtctacctttgtcgggtgcaaattttggcccgtcacaggtggcaaaatatctgtgatggtccttattgttccagcccaacatagatgcgaggtatctcacctgtgacatgtgtaaaatttgtgtgcccatcaaagatgacaaaaaaaatcgctttttttccattctcttcccggctccgaagcttctccttatcctcttcttctttctcactcctctactcctctctctctctttctattcttccacccagacgtgcctccctcttcgaccaactgcggccggatgtggtaatggttgctggacactgcctccccctccaaccgatgagcgtcgggcgcttcctcccccttcgactgactgtggccagatgcagcaacgattgttgggcatcgtcccctcctccgaccgacgagcacctggcgactcctccaaccgctgggcgctgtcttccccgggtcccttgcctttatccctgtcggatgcgcctccgactaacgggcaccgcatcctacgagccctccttccctctcggcctagttagatgcgccttcgaccgatgggtgccacctcccgtgagtcctccttccccttcggcccaaccggatgctactctaatcgctggtcgccatagccgctctctctcgactgcaggtcatcatggcctctttcccatgaccgctagccgtcggaattggcctccatgaggtcgggggacatggatctgaactctaggcaccgcctccttgatcctcgtgtggcgactgaggctatcccttgaccgccagtcccagatccatcgtccacgtggttgggcgacacgaatctaaccaccggacactacatcctctatccctaggtgctgcgatatccaccccgaccgtcgtattcttcatccctgactgtcgggtattgtctcctccgaacctaagcaccggccacctcctcatggacaagcatggcatggtgccatggtgatgaagatgaagggctttgtcggccggcaactccaggcgtcgtcaagtattaccccccctcccccctccttctattgcgctgagatgatattgctgtctattgattgacaaaatcttatcatccccttctgtgaatgtaacagtttttctgatctaaaatttcatctgtttgaatgttgaagttcttgtgatctaaaatttcatcctttttttgtttttgcaatttcatcagtgttgacagcgagcaccacaatggcactggttgccattttttctcgttttttcacaccgggttgtaagctgtttttcttaatttatttttctgggttatagataccactgacgggtacatcaccaacctatggaccgtttgagatgtggtcatttgcgacgggttctgtaagcagcccatcataggggttggtcaccagcgacgggccttcacccgtcagatgtgaggtggagtcatcactggtcactgatctctgacgagagccaaacccgttagaggtgatagtatgagtccgtcagttagcgtagtgattaaaagttcatttcctctagataaaatatttcctagttcttgaaagacaaccgagccactcgttgtgtcattatctgcatagcaagtttgcccacaaaatgctaattctcatactttagagcaatataattaatactttattagtttaatattataagatgctttgttaaactttcttaaatttaactaaatttatagagaaacatagcaactcttataacacctaacttgttccattgagactaacattgaatatagtttgatagtatatgtttggtgttaaaaatgttactatatttctctataaatttgtaacttataaaagtttgacttaaaaacgtcaaagcgtcttataatataaaagatgaagtacccagtttcatatcactggtggagaaaccatctttcgtcagtcggcctaattgcacaatagtcccggttgcaacaaaaacggggactaaagatcatctttgtcccgattcaaatgctgtcagctgtgccaggcgccccagagctcattcctgctgcccggtgatatcaaccggggctaaagatcccgacgatctttagccccggttcataacaccaaccgggactaaagtcccacccctatatatatatatgtcttcttcctcctctagcccgagcaagcttcaaaatttcttcaaaaaagaggggaggtcatgccaaaatttctagtgaatttattttggtgattatatacaaatcggaggtacctaaaaggttagcaacttcatcctccaatgttttttttgtcatattacatttggagctatgttttgcacacttttttgtctccaaaattttgttgttagttgatgagagagaaaatttgtgtggggaagaaagaatatatagaaatttagtttatttgctaaagaaggttttataaaatagttgagaaggaaaatatagtgaaagttaatcttgaataatagaaaacaaactaaaatgaaaaattaaaataagtacaacacattaatagtagtttaaaactttataaatagtaaataagaattatttggtgtaatatttcataatttttgtatgaataatgatatgtcattattgtgtgactgttgaaagagtttgtaattattttataattattgtattactgtcattattatacgaataattatttgtgtacgattttttttcatgtcatgtagatggatcggcaatggatgtacgctgaccggcagtccaaagagtttattgacggcgtgcattattttttgagagtggccgaagctaacatgcaaaagggttttatttgttgtccatgcgataagtgtaagaatcagaaggagtattctgcatccaggactattcatttccacttgtttaagtcggggttcatgccaagctataattgttggacatcccacggagagcaaggtgttaaaatggaagaagatgaagtggaagacgacaatattccgcactttgctcagtacgctggatttgaaggaaatcaaacaggcgaggaggaaagggatgctgatggtaacaacgttacggatgatcttggtcagatgttgcaggacgccaaggaggattgcgaaagtgaaaagggggcccataaattggacaagatgttagaggaccacagaacgtcgttgtacccaggttgcgagcaggggcacaaaaagttggataccactctggagttcttgcaatggaaggcacaaaatggtgttagtgacaaggcatttggcgatttattgaaactcgtcaagaacattcttccggagggaaacaaattgcccgagacaacgtacgaggctaagaagatagtctgccctctaggactggaagttcagaagattcacgcatgtccgaatgattgtatcctatatcgcggtgaggattacgagaacctagaagcatgccctgtttgcaaagcactacgatacaagattagacgagatgatccaggagaagttgacgggcagctaacgaagaagagaattcctgctaaggtgatgtggtatttccctataataccacggctaaggcgtttgttcaggaacaaggggaatgctagaatgatgcgatggcacgctgaagagcgtcaacaggacgggatgctgagacaccccaccgatggtttacagtggcgaaacatcgacagaaaatttaaagactttggaaaggacacacgaaacatacggtttggtttaagtacggatggcatgaatccttttggagagatgagcagcggccatagcacttggcccgttacgatgtgtatctataacctccccccgtggctatgcatgaagagaaagtacataatgatgccgattataattcaaggccccaagcaacctggtaacgacatcgatgtgtacctaagaccactgg

SEQ ID NO: 21262 - DNA, 684 bp, Oryza sativa
agcacgtggatgcagcatattgtagaaggattttattgggagtattggtagtaacatcatatagagagcaactatagttaggtttgtgtcctagatatacctttttaaagtagatgggttagaactaatacatttttcagaatatctacagatatgaacatgattgttcgatataactacactcaattgtgtgatttgttttatcgaaagtaaaacaagcatgaagtgccagaaattttgaggaacaattaccaaatgtgtgaacttttcaaaagagtacatctcatggacacttgtcttttgaacaaaggcacgtattgttactttccctgtttccacgtagagagcggctgacctcttggtatggaatacataatttttaatgggatcggtgtagtgctgcaaaagacaatgtgaaaaacccatgtacattcaaagtgaataataatgattaactgcaatcacatacgcggtctcttctaattttgccggtatttgtttttctaaagaccacttctttcacccatccttgtggcagcccttcagggttaaattccagaattgcaagaatctacaaatcaatcaatgataatgtcattcatgaaactacccaaacattagttctgcaaagtgagaaatcatctaatagacactccctttatcccaagatatatcaacttagta

SEQ ID NO: 21263 - DNA, 3338 bp, Oryza sativa
ataatagggttaaagtgcagcgaggtacatgacacataatagggtccgaggtcccaacatacaacacctaaatatagcagcggaagtctcaaatagagttcataagcaaaagataaaaccggtggtgccacaaccccactagggcaaaccaaccgggcaagagccaagctgcaagagatcactcattgccctcgccgtcctcggcagaccaatgaccacacaagaagcataactcataaccggaatcctctcctgaaattgcagacaccggattaagtacaagattgtactcgcaagtcttacccaaaattatatatacaaaagggagagagaagtatgcaagctttctagcctatagtgggtctctaggttcaacatttgcatcaagcaaattttattgagcaattaatgagtaaaataagcaaggacaagtaaatctagcatcattttaatttatggacagcaagtatataattctgaaatatataagcaaatgagcccaaacggcgctctcatcatcaaccatggactaccaaagtccataacaacatggcacaacatgccaacaccaccatcaaacataatcccatccataataatccacatttgatgctaacataactaacacatcaagcattgtctataaccgaggacgcgactattcgaatagattatactctgatcagaggtgtacaactggacccacacgaaatgaacaaggatcaaaagctacacaccccgtcgagtgcggtacacaagtgattcaagctcattacatgccctttcttagcctcaccccaaccacctataccacgctggggttcccgacaactcagtcacgtgcgtgcgtgatgtgaccaaggcgggcgcgccacgcgggaggcacccccggccaaacctaggcacccgaggccctccaaaggctacctgcctcacgactctccaacgtgatataaatgatcacagtagaactagtaagaacaagccggtcccaaataaggcatgtggtaagtacgtagggtgcttgattagatgtcaaaatgttcggtccttaacgacctagacggggctacttgcatcaggggaaaccaacctcccatcatcgccctatcacccgtccaagtctaacatatttcatcaaccattatttagtgtaagtgctcaagttttatgcccaataatgcaagttatttatataccacaattaatagcactgtccatccctatagttctattagcactaagcatggctaagcattaatgaataagacatcccaaataatcccaaccagtggtaataggatataaggacagcaataacacaagaactaaatgcataaataggttctacccatacaccataaaccgacaatattaatatctaggcaatgcatgcatatatatacgtatagattgcaaccaaatcatttttagagaaagtataggttctatatgcttaggtgcttgccttgctgctgtatggaaacacactcaacctcagagtctcgctccacgaactccgaattctccgaatctaccgataagaggcaaatatgcaaataagattcaaataaacatgcatatgcaacatgctctataaatcatggcctaattacagtaggtagagagtatgataaactggttttagaaacaagaatcatttcatttacatttgtggtttgagagatataaaaatgacaagccatatacactgaaaatggcatttctgtaattacatatgaactacccttggtcatatgaaatgctgacattttctagttagatttcacaagtgctatcatttttaattcaaaaatcataacccactggttctaaaaaaacttggcttactacatttggagttaaaatatttagttatgaattttacaactttaataaaaagaggattacttaatcgctttagacttactttaggaggtagttttgtcaaattattccttttcagataaaagattatatctttataaggtaaccaaaagtggtttcataattttaggatatagcataaagttcctagagattatacaactcctcggtgcaaaaataagtgtttttatgaaactcacaattttagtgactttttcagtactgaagttgtaatgttttaatttacaaacataaagactacaaaattatgaatacatagaaatttggttcactcgaaaatgagttaagatgaattagttatggatttttgaagttttcctagttctcatatatgttttcaattattcttttggactgtactttttcatgtcgaaccctgggatttgtaaaacttgcaaccaggtccaggttcttctacactcgagcaggaagcagcgacagccatggctgagctcgatctcaagctcgccggcacaaacggcggctctaatgggggcgaggtcaaaagataaaatgtagagcaacacattgtgattccattcctcaacttttccccagccaatggtgactggaacgacgcaggcggcggctgcaatcggaagcgctcgggacgccatgcatgcatcgatgcgtcacggtggacggctcgatctatttcatgcatgtcaagaacatcacatgcaggatgtagaacaccacctaaggttgctactactgcaagaaatcgacaaatggctcaccggttgaatgggaatcgacgacggaggcgctagatcggagttggagaagacggtggtcgatctccctcctcgctgcacggttctgagggattcttggggcgttttggagagcatggtgaggcgaagctggtggcgcagtagctcagccggattcgcctcgaggcgacgggaacagctgcgcgaacccgcggctgcgcgttgacgacggtgtggccgcgctccagagctcccgtggcgaggtcggcgttcccagagatcggctgcaagaaacggggcaagatcagatcagaggctatggcgtgcaagggtgaatcggaaacgaaagaaagatggcgacgacgatgacccgttgggcggcgtgatggcatcatcccggcggccggcaagaagatgatggcgaggagagcaagaaggagctctcccactctggtttcttggatctagggtggactacagagtgaggagggatggctgggaaagctagagagcaagggacgagtctagttcgcgagcattcgtccgtcacgaacacctccaacggatctcagccggtggcaacccaactgaattacagaattagcatgcatcccgccacctaattaacgtgtaattagtacctgtcagatattattatatagtaattagcattggacaacgcaacaaatataggcgatatttttccacgccgta

SEQ ID NO: 21264 - DNA, 7734 bp, Oryza sativa
tgagcgaagaccggtggctaccctcctctcatggagaggagtccagatgatgcccctgatgtgacaatacatacctaccttcacttcaccggggacaaaggagacgtggggcatggccgcgtgtcaatcggatgtgaccggtgacaggccggtcacagaccggttacgcccgatttgacgtgggccagtggtggggctccacacgtctgccccgatcgcactaaatgcttcgagggacggttggagcgccgcccattaatgaccgcccagcttggtttcctctcgctacatggcagctgggcaagggcctcgggtccaggcagggcgagggcccgaggggcctgacgtggcaccccgaggggctgacatagcaccccgaggggccttacacggcaccccgaggccccccgaacgtgtccgcgctttgcgcggtgcgaggagcgggggctgggccaggctgtacagccacgtatgaggaagtgaagggaacttccccttactttgcatacccctgggcccatatctctgacattcggcgttaagcatagccttagccatgcatagatgtgcaacaatcagattatgtgtcaacggccttggctgatcaatacaacagtggactccaaaattagcatggtgtaatccgtaattcatctttatcttgatcatttgtgtgtcaacctaagcaaaagtaaagtgcaagacttaggtagtatgtaatgctcgtcaatatcgagatattgttcacctaggagcaagttcacctctagttgtcatttcttggctctggtacgtgtaattggtcattggaatggtgtaactagtccttggtcctccttagcaaactcttgggtcagtgtaatcatttctgaattatgcctaacctcatcatttgatgatttgtttctgtagcatttgtgttggcttggtaatccataacacatgaagtaatcacaagtatccaaataaacaaccagaaaccaactccaaacaggagcaagctggtcagaccattaggttggccaatctgaccgtcaccactacttcggtctaataggtgcatacgactcggtctgaccggctccatcaagtcaaaacttgttcatcatcagaaacactattcaccacaaccaccaagtttgaccattacacgcatcccggtcagatcggccggtccaaagacaaaaccaacacttcaccaattatctccaaatatcaaaccaatcatcgcataagccaattgtttatcacaaaataataatcaaaacacactttgatttcacatgttcaacacatagaaaaaacataatgtgatggtacagacccccccccaactccatgttattattaactagtgttaaaccacataattcagccaacaatgttaatgaaactatgccacccatactgcattaagagaaccttggttaccaatttcaaaagtatagcaccattgtacatagtactttgctctttctatggtagcatcgtaaaccaaaaggagagatactaggaagacataaagataacttgcatagggttagacaattgtttacaattgaaaactatcattgcggcaccgtcaaattgactaacataaagctctagctcattttaaaatcatatttttcatggcctaggtacttttctaaaccaattaccaaaaatatttatggcattacgaggtgggggacaataaaagcaaacaacacatatctctaaatagaacgcgtaacaagacagctaaagaaaagatgttggattctttgttgtgcatagctgaaagaaacaatagtttttgtctacccccaatttttttagccaggttatccttcgtcagggttactttgctattaaggagccacataacttttagtaaatctttaaatctcatgtaatccacttgtggatgctaactctagagttcatgatcgcgatatacatagagctaactgaaaattgtgcattttctgaagcgatcatccaaattaatctttttaatttgcagggttacgtatggatctagcccaccttgtatttctagtcagatatgtaggctgtttgactatctaatacatgtattgttcacaagagggtagaccacatttattatattgaaattacacaacggaaattgctcttgttcttctcctagattttgtacagccattgccaaatgagagagagggattgggaatttctgtcgtagattgttcttgcatttccttgtttatgccatagtttgggaatttcttgcattcttttatttgtttgcaaggaattgagggggcaatagatctactcttttgtgtggttgagtggatcgcgtgtggtttcacgaattcatggtgctgcacgggcactgtgtttgtcatcgagtttatgggatttcatggtgtatccggatcctacatcgagaaggttgggcatcccagtatcaataatattactcttagatttgttaaattttggaggtgacattggatttaattaatttgattgttcatagtacgatgcatggttacaatgttatgataaattgtataaattaattttttatttaaattactaccaggtcaggcctagtagtagtataaattaatttggaaaatatatgacagttggcatcagatattattctatctagaacatatcttaaccaaacatatataactcaccacattaaatgcattgcattaaacattagctgtccaatacgcaatatgggctgtccctcaaaggcataaacacacactatttaattactaaaaaccgcagttattaaaataccagctgaacatcctttgctacatatatctaagcaagtgcgaagttcaaagagatagataaagagagggaggaagcgaaggagggtgagagagaaagggggagtggaggagggatacagagatagagggcaaggaggcagcgagggagggagggcgggagaggggagagagttcttcgatcttggcttaattatgggcaagtcaccatctgttggtgtcttacatgaagatgattgtgatgaagtcaaattctttgagaaaccaagaaagaatttgcaaagtgatgatgagaatgtggatgagcgaccaggttggcttccagatggatggataatggaggtctatcgtggtgatgatggcaccatctgccgggtataaaaatatgtagatggccatctatttcttttgttgaacttaaattttattgtttgttctaaaagatttttgttgcaatgttaattttctatgtgtttttacagtattacatatgtcccttttccggaatcactttcacaatgaagccagaggtgttgtattatcttttctcagagatggatcagcgcttcttggaatcaaagaactgtgttgtaggcaacaaccttacggtgagttatatatatatatatatatatatatatatatatatatatatatatatgaccatattatttaagattttagttgtgtttagaaatagtacatgtgagttctaccatgatttatgtagaggacacatgaatggcttccaaagggctagctggttgagattagagctggtggagacaacatggacaagatgtacaaggtagcttttgattgtattccatattaactctatgctaatttattatgaaagcttcgactgttgaatgcaacggtactaggaaatcataaacactgggacataaaattgtttttgcaaatggcccccttgtactgcacaagtggtgtataaggtaaaccgccctatgcagtacgccagaagggcctagttcacgaaccgcctccgcactgataagctcaatgctaaaatgacattggcaaaatttactacaggacactcaaaatttgtggcatttgctgtgagacatccaaagaacgtgaatcttctcgtggatactgtaaaaatatggtaattagctattggacactcgcggaattattttattattttccatgaaaacggagagagaaatattggttaaagacaagtttgcccatgggcccactcccatactctcttgttctttctcccatcctcttcttcctctttctttcgttgccgctgaaggcatcgtcggtgagctcccacagcgaagatggagtcgacgcacggggtgtgcgtgcgcaccgctctagcgtctcctgctctgcctgcctcggcgttggcatgttgttctccttctcctgccgctgtcactgtggctcgtgccggtggtgtgggtttgcagcggcgccatctccggccgccaccaccgtccatgtcactccaacgtggcctggacaatacacggagcagcggcgaccatcaccggctcggacgcgccaccgacattgtccgcgatgccgccgaagcccaccgcccgcttgatgcggtcgcgggcgtggtgaccatgctcaccgacctgcggagcagcttggtcagcggcaaggacatggccggctgcagcaacggcccggtccgcgaggtcagcacgacagacggggcaggtgacatgcgcggcgagccacacgtcgatgcaggcggtgtggaacacatggcagcacccggggaggaggcagagcttctcgccgtcgtccacaaactcggcgaggcagaccgcgcactcgagcgccccatgcccggccttcaccgccctcgctgtcgcgtacgtcgagccccacgtgcctcctccgatgttccccaccgacgacgcgaacggccgcgctggcgtgcacagcaccgcccccacggcaacgatgcgcggcagtggtggcctcggagcagcgtgggcaatggagaggaggaggatgacgtgggcgacgaatgcgtagtgacgccccatcggaggcgccacactccgtctgcctcgcattgaacaaatagcagagagaggaagagaaaaaagaacaagagagagaaaagaataaggaagaataaagaaaaaaatattcgaagggtagaaccgtacttacacagctgtttctctctccaattccttcggatataataaaataatcccgccagtgtccagcagttaattaccacatttttgcagtatctacgagaaaattcacgttctttggctgtctcacagcaaaggtcataaatattgagtgtcatgtagcaaattttgccaatgacatttgaactagcacctaccgcttacatgttattaatttgtttattccaacatattgtaacaaagcaaaagattaattttatagtcactgcagccatctttaactattggttaacaatttattcattaagtcacttatagcggcgaaccgtgacataatatgagtgtgtcacaatcaactgattactctaatcttatgaatcattaccattgggaatgttcagcgaaaatataccgcaaaacatttgcatatgaaggatttgctcaccattgttgccatgttggctgctcatttccaaacattgttggaagagagcttgaggctgctcctccatgtgagtgaatttgatcattcattttgctatttcacagttctatgtgtacccaccagatagagttcgactgttctcaaaagatgatgtactactctacattaaagaaatgaagatttctgaatttgatacagatggacaatgcaacacaagtatatgtttcttgttggaactatttctcttatttgaatagtaataattattccctccgtcttaaaatgtatcaacaaagtaccagattagatatattgtattactataaatctagtcatagagtctgtccagatttatattactagaatatgtctaattaagtactaggttgctatatattaggatagaaggagtgtcgactagatgatttctcactttgcagtactaatgtttggatagtttcctaaatgaaattatagttgatttatttttagattcttgctattcttgaatttaatcctgaagggctgccacaaggatgggtaaaagaagtggtctttagaaagacaaataccagcagaattagaagagaccaggtatgtgattgcaattaattattcttattcactttgaatgcacttgggttttaaacattgtcttttgcagcactacaccgatcccattaaaaattatgtattccgtactatgaggtcagcagcactataccttgaaacagggaaagtaataatacgtgcctttgttcaaaagacaagtgtccatgaggtgtactcttttgaaaagttcacacatttggtaattgttcttcacaatttcttacacttcatgcttgttttactttcgataaaaaaatcacacaattgagtgtaattatatggaattaccatgttttatatctttagatattctgaaaaacgtataagttctaagccatctactttaaaaaggtatatccaggacactcctaactatagttggtctctatcatgatattacgaccaatattcttaatagaatccttctacaatatactgcttccatgtgttattacaatatgcttttcaatgagttgagaagtaaaactataacttaagagggacgaaccagctgtgcacacagtcgtcaaaactccaaaagctttcactgaaagaagagattcttagtgatgagcaaggttcatctagcggtaaatttgttcctgaggaacaaaagttcatcaggtttcttgtgttaaatcaatttttagacatatttgcttcttataatgctctcttcaggtgtgctatccagtataattttactacaataatatgcttcaaattctatgttataaaaaatgataataattaatatagcccaaaaaataagacatattgatcctagctagaaggccaatatcattttaggtgacaattttgctataagctctgataactgattaaatagtgcacctaagaagcaaatccgtatgaccccaatcatacaccattagtttaattaattttcacatcctaacttccacgcaactaaactatacattttggctaatattttcatttttttattataaagtagtactattataactaggtccaatttatttacaattagatctagcattccaaatatttgcaaaaaggagagtcttgggggtgttatggttgtctatatcatcgtactgaaataatttaaaaattgtcatgtaacattagtttctcaatcttttgacttcgttaaacattgcgcaaaataaaaatacgatatatattttacgaccttaatcgttgtgcaaagtgacagttattagaagctatgaccggaagaaaaaggagacaatgactagttgtctgtagacatggtcacatgggttatgtttcctatgactgatactggtggctcggtgacacctcttttttttgaggcatgggtttatttagagttttactatcagcatctttggcaataattgatattatattttgtaaaagaaaacgagactcaaacatctggagagctcgataggctataaggtagcactacagtaaaccctccctctcgacccctcttcccccctttattctggcatatcattgctaatgatggctagaaggggtttgggtgtcctcctctatctagtaatgttgtgtactttagcttcaggtttagtgttgtactgtgtcgggcgcctagtcctattttggatctgctggtgtcatctccatggtgtggaggggtggtggtggtgctggaggtggcgattgctggtggtcgtctgggcagttgtggctttggtggcagtgctagtgacggcatttgtgg

SEQ ID NO: 21265 - DNA, 8192 bp, Oryza sativa
ctgcgcgcatacggatgtttcctgtacacgttaaggaaatccatcacgtaataggagcagtatccacatatgagagaagtcctactcggacaagactgggtcgtcactgtatcatgaagggtccgatatctccgagtcctacttggagatcaactgacccgtgatataaaagggaccccccaggaggtcctaaggcatcgaatctcaccgccaacacatccacctcagcctacgaagtcggagcctacaggagccaagtcgccgggtgatctagtcgaaccaactcgactacggtctcgtcggtatcatcgagttccgctattccctttgtaatctgtggtttccattatataatcccatatcaactggattagggctattacaggagccaagtcgccgggtgatctagtataatctttgtcttctgcttgtttgatgtcgtactacgtagatcctcataccagcgtaccccaataccctctatatccggtctgcgggtatccaccgtcgacagttgcgcgctaggtacggggacttggtgctcaaggttctactactatgccatcaagcctcatcaacaataacgtcaacaccagcatcaaccaaggagtttaaccttcaacaatgctggtgtggactcaagtcggtgaaatcgtcttcccagttttcaccacggtgccgatctcggctggtccatcaatgaccggaagcgagaacgtcgtggttacgaccccggacggctctatgtcgaaggatcctcccgcggacgtggagagcggaacatcgacgacgtttgagcccgataaggatcctaatgcagccaaatcttgtccttccgatgagaatcacgagccgacaaggagaacttccgaggcaacaaggtcctggtgtcctatctacaaaaccaggaaacacaccttgcaaacttgctgggtttttctcgatgtacaagctgagatccgtgcctgcaaagagcgtggaattcaacgtacttctccaacccgtgatgtctattgccctattcacaagacaaagaatcacgacctctcaagctgcaaggttcttctcagcgccatgaggacgtcacctcctaaggtccagcagtcacaaatctctcttaaagatgcgaacaaggaacgaggagcgacagttatctcagatcgatttgttggggtaatcgacatcgatccccacgagttgtcagttctacacttgcttgaagaccagggcacatcgtcgacgagtacaccacgcgatgtgtttgctatcgatgggaccagcacgtctgcgcgcgctaacacagaagcggaggatcaagtgattacaccggcccagcacatcagggccatcaacgcaatattgagggaaacctcttatgatcccgttctgaacaatgatctcgcacaatggacagaacgactacgagaataagtggctaacctcagcaacgcgttcgaggagaccgccgctggagtactgctagaacaaccgccaattggcggtgccaatggcgaactacctgagcagaatcacatcgtcaagccactccaccacctcgcggcaccaacgatctccgtgaccatttgaatggccgccgagaagcacgacgcgcgcgagacaacaaaaatcgttcccggcatcgcgtctcttcacgacatcgagagaacgaagagcgaggaggacacccgagcgagaaccaagaccgtgataaccgccacaaccaccacgaacgcgatgatcgcaaacaacggatgccaggcgataatggtcgaggacgccgccataacgatgacgacgacggagatcggcgtcgggacaacaacggtgggcgatgacaggattctcgagaacccagacgtcatcctcgtaatcgtaccccggaaccaagtgactcattgtcatcgtcatcatcctcatcatcctcgtcgtcatacagacatccacggaggacatacaatcgccgacaacccaccgcccccggtggtgggtgtagagctttcagtcgtgctctacgagatgtttgatggcctgagatattccgaccgggagcaatagagaagtacgatgggagcaccgaccctgaggagttccttcaggtctattccatagtactctacgctgccgaagcagacgacaacgcgttagcgaattatttgccggcggcgttgaaaggatctgcacgttcatggctagtccacctcccaccatacttgatttcttcatgggtagatttgtggcaacagttcgtcgctaacttccaaggaacatacaagcgccacgcgatcgaagacgacctacacgcgttgacacagaatccgggcgaatcattgagggactacattcggcgctttaatgagtgcagaaatacgatccccgagatcaccaacgcttccatgatccgcgcttttaagactggtgtcagagatcgctacaccacccaggagttggtgacaagacagatcacaactgctcgaaagctattcgagattgtcgatcgatgcgctcacgcggacgacgcactgagacgcaataacgacaagccaaagacggggggagagaaaaaaccagccaaggacacacctgagtcaagcaagaagaagagttgcaagagtgggaaaaggaaagctcaaatggaagtcctcgcagcagaatatgcggacccacccaagtacccagactcacaaggcgacgatacgaagaaaatatggtgccctatacacaagtcggacaagcactccctagaagcttgtttcgttttcaaaaagtcactcgcaaagcaacttgcattggagaagggcaagcgagtacatgtagtcgagaaggccgctgaagcagctactcaggactcggactcagcatacccaaattccgatctccatgtttcgcacatcttcggaggttccacggcatactcctcgaagcgagagtacaagaaagtggagcgcgaagtttgttcgacatggcaaggggctgagtccaagatgaagtggtctgagcagaagatcgaattctcagaggaagaccaccccaagactgctgtcaccccaggtcgatatctgatcgtggtcgacccactattcggaatatcaaggtcgcacgagttctcatcgatggcggcagctccatcaacctactcttcgccagcaccttggacgtgatggggatcccacgaagtgacttgacgcccactgatcaacccttccatggaattactcctcagtcatcgtccaagccattgggcaagattacgttgcttgtgactttcggccaagcaaacaacttccgaacagagcagatcacctttgtcgctgaatttgatacagcatacaatgctatcatcgggagaactgcactcgcgaagttcatggccgcatctcattacgcgtaccaagtgctcaagatgcccgggccaaagggaacaatcactattcaggggaacgcaaagctggcggtgcagtgcgacatgcggagcctcgacatggtcgaacacacgcccaacccacctgccacagctgagccacccaagaaagtgagcaaaacaaacaagacgccgaagccagacagcgcaatcaagatcgttccactctccagcgccaacctcgacaagaccgtcaagatcggggcgtcactagacgagaaataggaactcgcgcttatcaccttcctccgcgacaatgtagacatgttcgcttggcagccgtccgacatacccggggtccctagggaggtgattgagcacaaactcatggtgcgacccgatgccaagccagtaaaacaaaaactgcgcagatttgcaccaaaccggaaacaagccatacgagaagaactcgacaagcttctcaaagctagcttcatcagagaggttatccatccagagtagctagccaatccagtcatggtgcacaaggctaacgggaagtggaggatgtgtgtcgacttcaccgacctcaacaaggcgtgtcccaaggatcacttccctcttcctcgaatagaccaattggtggactcaacagctggttgtgagttgttaagctttcttgatgtctactctggctaccaccagatcagcatggcaaaagaggacgaggagaagacagcattcatcatgccgttcagtgtattctgttacgttaagatgctgtttggactgataaccgcaggaaatactttccaacgcacggtccaagcggcacttaacgatcagcctgggaacaatgtcgaggcctacgtcgatgacattgttgtcaagaccaagacaagcgactcattgattgatgatctccgggaaacgttcgacaacctccgacgatatcgcctcatgctcaatccagagaagtgcacattcggagtaccatcgggcaagctgctcaggttcctcgtctctggaagagggatcgaggcaaatccggagaagatcaaggcaaatcctaactggatgcatggcggcactgagcaggttcgtcgctaggatgggagagcgcggacaacctttcttcgctctgctgaagaaacaagacaaatttgtatggacacaggaagccaaagaggcattcatcgcactcaagcgctacttgtcaaatccccctgtacttgttgctccccaacctgataaagaattattcctctatattgccgccacaccatattctgtgagtaccgtcattgttgtcgagagagaaggtgcaaagaccagtttactacgtcagcaaagctctccatgacgcaaatacaagatacccacagatcgaaaagctgctttacacagtaatcatgacatcaagaaagctacaccactacttccaaacccacagggtcacagttgtttcctccttccctcttggtgaagtcgtgagaaacaaagatgctgtcggcctcatcgcgaaatgggtagtcgagctaagccagtttgatgtccactttgtgccacgaacagccatcaagtcccagctcctcgccgattttgtagctgactggactatgcctgaaaataggtcggacagtcaaaccgacagcgaaacatggacaatggcgttcgatggcgcactcaacagtcaaggagcaggggcagggttcatattgtcacgcccggaaattcactaataatttccgaactaatttgtgcataaaatcctcgtccaggaatcagccgaggtacacaaactgacaatttaatatacaaatccatcataataataacgttacatacttacaaaagaaaagaaaaacaacagcagcggaataacggtctagcgatggcttcagctccactcccacaggcaactcaactagggtataagccaaacgtcttctccttctggatcctttttcttcaactgagatttgattattgcaagaatgagcatatgacatactcaacaagccacacagcaaatatgcaagtgcacaaggataccaaaggatggcataatataagctcattcgaatagttttactctggccagaggtgtaccactgtacccacaagacacagcctcaacatcatgtctaccatgcgtcgcgatactggaaagtacccgaatagaggctatgacaataccctctgcacaacacaactcaccacagtgcaccatacctggatcataatcaccccctctataaatataaccagagacatggactccccagcgacccacacggacttctcgccgcttctcagtctagtgccccgcaatgaatcatgctatacaaaaggtaaagccgttgcccacgctggcttgtggttggcacggttaatgtttcacaacagtagctcgcgaaccggttcttaattgccatgagcacgaccttcacaaccatgtgctcacaacccaccattgacaaattttaattggcaataattaattaaccaatcacgattgaccatcgtgagctaccattaaatataaccataagtgatagtgtaatattagttatcccaatcatgtgctaatgtttctaagcatggctaagtaattatatatatatagcatttagctgaacccaaaccaatatataaggttctagctaatcaaattataacccataggaaaataaagtcatcttcggccattaattaattgggaaaggctcaccacccgatgacattcgaaaataatgcataagttgaaataaaacaatagctttaaatgggttcaacatgctcaaagggttgtttgggatctgtgtgacttgccttgagcttccgcaaacacttccgaaccttcctcaacgaaaacgctctcttcggaacttcggaaactaaaatgaaagaacaaaatcaacaaaacagtacaaaaacaagcaaaaacagtacatgtggatatttttaacatgtagatcttgattttagaaaaatttagcaacttgaaccactcgaatccgagttacgatgatttagttatgaatttccgaagtttaatcgattttcatctaatagagaaaactaagaaaaagggattaatgacgtcatcgctgacatcatcaatgtcgactcgacatcagcgacgacctcgccggcgctagaagactcggccggacttttggagggtacctacgcgtagaggagaacaacgcgaactcaccggtgcaaagaacaacgactgacgacgacgaacgacggccggcgacgaggttcgacggcggctcggctcgggtcaacaatggcgacggcgctccggcggtcttcggcggctgcgaaggggaggccggggttcccctcctccgtgcgcacccaacggcggcgacggctggcaacggacacggctaccgcggcggcgcgacgcggctggaaggtcaccgacgacggcggcggctagggcaacgtggcggcggcgctacgggcgacgagggagctcaggacttggggcaaacggaagaggacgactaggggatgctatttataggcttggattgaagagatcggactccaaccgagaggatttgagccggaaaaaccgagggttagttgcagagataaactcgaaaacgaattcgattccgcgttgatttcttcgggataaagtccgattcttggaggaaatgatagaggaggataagagaaatatttcccctcaactaattttgcaaacggagcacgggatgcggtggatttggtggaggaagcggcgtcggctacagggcacaggacggcagctcgggcttctgtccaagcttgaagacgacactgtagcagggacgcgtattagacttttcgtcttgggctggctgaaaacaaagcaaagaaagaaagagaaggaggagctcggctgggccgacttcggccgcacagcacgcgcgcgagggagagagatgttgggctgaaatcagcccaacggcttaggagaggatttaaaaactttttccaattaaaataatcactgaaatgatctttgaattgttaaaaatacttccaatcctcaactagtttcaagaaaaatcctgaaaatacttgtacactcaaagtacttaaaaaaataataatcagtccatttaatgattaatttaatatgtggataattactgaaatgttctttgtatggttaaaattaggaatggagctccgaaaaatccgagaaaattccagagagtataattaaccatggagaatttaataaaaaataaatccatccatgctttatatttaggaaattttatttcccacatttaacttctcttgtaaatgaatgaatatttaatataaattctaataataatttattaaataatttataaatcctaaaacgaaaatcaggatgtgacacatcttgatatcaccttcgggcgatcagtttaagcacgcaattcacctcaacttcagggcgaccaacaacacagctgagtacgaaggactactcgctgggataagagcagcagccgtacttggagtcaagcgattgattgtgaaaggggattccgaactagtcgcaaaccaggtgcacaaagactacaagtgctctagccctgagttatccaagtacctcgcagaagtcaggaagctggaaaaaaggtttcatggaatcaaggtccgacacgtataccgcaaggacaacatcaaaccagacgacctagcacggcgtgcgtccagacgagagccactcgaacccggcaccttcctagacgtcctgacaaagccattggtgaaagtggcaaacgacgaagatagcatggtcgtccccgacatcagctcaggggct

SEQ ID NO: 21266 - DNA, 7225 bp, Oryza sativa
tgatacagaagccgagaagttatccagacaagtcaagatctactgtatgatcggcaacgatcatacaaaaaggcgccaaacggggtacttctcaaatgtatctcgtccgacgacggcaaacatctcctcctggacatacacgaagggatctgcgggtcacacaccgctggccagaccttagtcgaaaaagctttccaacaggggttcttttggccgaccgccctcaaagactcttgcgacatggttcagcggtgtgaagcctgccaattccacagtaaaaacacaaggctatcagcacaagcgctcctgactatccctcttacttggccgttctcatgctgggggctcgacatactcggaccattcccacgaggacagggcggatataggttcctattcgtggcgatcgacaagttcaccaagtggatcgaagcgacgcccacgggggaaatcaaggccgacaacgccatcaaattcattaaagggatattctgcagatatggattgcctcaccgcatcataacagacaacatctcccagttcatcagtgccgacttccaggattattgcattgggctgggagtcaagatctgctttgcctcggtctcttaccctcagagtaatggacaggtcgaaagggctaacggcataatactacaaggaatcaagacccgtgtctatgacagactcatgtcacatgacaagaagtgggttgaagaactctcctctgtgctatgggccgtgtgtaccacaccgacgacatccaacaaggacacacccttcttccacatgtatggttcagaagccatgctctgacatcgagagaacactagtacaaaagtactctgacgaggatcaagaggagcagcaaagcgacaatgtgaatctactcgaggagcatcgagaaagagttgccgtcagagtagccagctaccaacaggcccttcgccaataccacgagaagcgcatcagagcacacacgctttcgatcggcgattacgtcctccgacgggttcaaagccaagcagggcgtaacgagctctcacctaagtgggaaggaccatacacgatcacgcaagtcttgcggccaggtgcattcaagattgcagacggcgatggttgtgagttagcaaattcctggaacattgatcaattacgtaaattttatgtataaatcaatagcatccatacttgcaagacatcttacagcttcaataaagttgattttcaggtaaagattacaatcaaagtgtttcttcccgacgatcccttaccacgacgacacctagcgttgaaacctaccctcatgtccctttacgccgtcttgacaaggcctctaaggaacctcagggaacttcggctggggacacccagagcagataaggccttgtcggatcatgtagagacaaacgaccatgtaagatcaggtcatgtaagagctctcgtcgtgcgtattaaccaacccgtgtaatcggaaaccgagtattccaacttcacggctgggggctagggtcaatgctttttcaaccgaggcaggtcaagggtcaaggagccttatcctccgagaacgtttctccgacaacaaggctgggggctagggagagtgtatgactcaagcgattgatcgaagtcgcgaaatgagaaaacactcacacacagcatatccagagtaagaaaacttagttagatagattccttgtctatttcacaagtacttcttacaattcataattgctccaaaatatattacatgtctccttgagataatttttacaggatacaaagactaccaggacggcaaacgccagtccatggactgaaagacattctcggcaagcggcacaatcgacttcgccagattctctatctctgcgggagtcctccgagaacgtgaaaacccttcgtggaggaactcgaggtgcagctacgggcggtgatctcagatacaggccagcacgtgccctctggcatatcggctcgaccgacgacactcctgcttcagcgcctcgttgatacgcttgccgatgccttcaagctgagcacaggccctattcaaccatgagatatatccagccaccgactcctcgggattcccgcgaggtactcggcgttccctacagactccagccatcgccatacaacagctcctgaggtacgagttaaactacacctcgcgacctcggagtgcttccacagcttggtcttttttcacttccaccatggtcctctcgagttcggccacctcgaacttcgtcctccagtattggatccgacgatctcggtcggccaacgcgctctcgaggtctgctcaaacacggaaatgactaagtcaagttgttcttctctctcaagaacacagcaaattaagtcaatccgaacaaaagagtgaaggaagtaaagcccaaggtgcaaacctaaagacgtcatcgccatgttcgcctccgcggacaggctctgatcgacgtcatcctgcggcacgtacggctcaagcgctagtgccgggatgaccaccggcgtctcaggctgcccgcgctgctggacatcctcaatgtcgacatctctacaacgacaacaaggtactcggaatcacatgctaagaaaacaaaggaaaacagctgcatacataaaagaggtccgggccaatagaagtttttatagtgtgttgattaaggggtacaagggaaacagaatcctactcttcaaaaagggggagaacagacctcctgatccagaaccctcttgatgtcgaggtcagggtatgccagcttcacgcatgcgaggacatggcacgccccggtgtagatcccgttacacgtctccacgccgattctggccgcatgcttggaggggatctcctccatcgccacagccaggtccgcgagcgaggacgtcagcgagaactcgtcaggggtcgccgggatagtggtcgtcacgccgcactccccgacgagttggtgtaggccggtgtaagacacccgcagcgagctgcggatctccgacaagttctcgagctctgacatccggtgctcgagcccttgtcgccgccattcattaccagccaccaactccctcatcttcaggaggtcctcgcgggcctccgccagaccacgcgccagctgctcggcgctgtggtttgccgacgaccccgccgccctggcttccttgatctcgcggcccacgcgcgagcaccagcctggaggatgcgctttatctcggcttggagctccccctaggtgagggcatcaacgggcgggccccgagcgggcacaaggccgccgacgggcccactcagcgtcgcctcccagtccctagtcacgaccacgacatctgtcaaggccgccacaggggacatgctggaggccgcaccggacccgtcttgcgtcacctttgcccgcaccgccctgcgaatgatttccacgattttcataaagtcaggcggccaaggttttgcgaattaaaggacctcaaaatcatctacttactttttgctgagcgtcaccagcctttgccgtcgctaaggcgggggagacgcgtccgaggcctaagtatgataagcatggtgtgaggtcaagatcttccgactacgtgttaaaggacaagagaggcttaccgatgggttaggcgccttccagtgggtcccgggcacggaggagaacttcctccccttcttcggaacgttgctgccactcgtcgtggcagcagcagcaacgtcggacgcctctttggcgacgccctctttcaatgacgccgccgcctgatggtccgcaagcggcccgatgacatccgtcagagggagagcctgcatacatgaagtcacgacgcgatcctaggatgacagaaataaaggagtcatcaagtatactcacgttgatcacagcctcgcattcggccacccccttctggcaaagggggacggggatgttgctcgctatcgtagggctgctgatcatcactttaccgacgcggcgctccacggtttcgctattcaaacctgtgagatcgagaaccagaactcaataagtcaggaggaacgtgcacataagaaatgaaatctgaaacacgagaaaaataccccgaggagaacccgggacgcgtcctttggcccagaatagtcaaaggccgggtgggctcgagcctggagcagttggatccgcctaccgatgaagtcggcagcaacttcataccccaacaaccctcgtactcagaggtcatcgatgatatcgatgaaagactgaagggagggagttagggcgggtttggcggtccattccggaatcttgtctggttgctcctcagggacaacaaagactggatccgagttttctatctgaagataaaaccacctcgcccgccatttgctacgagaagaggggcactagaaggggatgcccgccatcccgaagtcagaatccgacgcatccagatatcctattggattccatccagcgcaactcgtagtaaaaacgaaagaaatcaaggaatggctctaccccaatgtaggcctcacaaagataagagaagatactgaggaatgcgatggaattggggttcagatggagcaaggaaaggccataaaaattcaatacgagaagaagaaattcggagggcggaggaagaaaaccgcaagaaatataatcctcaaccgcaaccatgcggcccaggaggggttcaggttcaatacctcctgcttccctctccatggtcccgctaccagggagggcgccgtcgtcctgcagcttcttcaaggacgcggtagtggaggtagacttatcaagatccaacaccgctagagatcgccggagaacaaactgagatgagcaaactagggttttttctgtgggagcggagaagacgaggggcgcttgaaggctggagagttctgcggcaaacgaacttcaaaatagatccccaaaactcctttaaataagcgcattaccgacggtgcgtagtccaaggaaaggagagagatggccgccggaaatttctgggtccgttacgcgcagcagttttcagacttcaatttaaattcactcatgaccgttgaacttcgtacaatgttatcgataactctatgtctctaagggacccccgggaggtcctaaggcatcgaatctcaccgccaacacatccacctcagcctacaaagtcggagcccacaggagccaagtcatcgggtgatctagtcgaaccaactcgattacggtctcgtcggtatcatcgagttccgcaacctttgtaatctgtggtttccatcatataatcccatatctactggattagggctattacctatcaaggggcctgaaccagtataatcttggtcttctgcttgtttgatgtcatactacgtagatcctcataccagcgtaccccgataccctctatatctggtctacgggtatccaccgtcgacattcatgctatcatcggctagaaccaaaatatgtatgatcatcaatatgagcggatgcaacacttagaaatagtaacatgataactcatcagctaaaacttcgatgaaacatcgcataaaaacttattagcttaatagaaataaacttattagcagcaatatgatagatcaaacctaaccgagacactataagattgaagataataagaaaaacctatttagccgacagatctatatcgataaatctaaaacaacaatttaattagagaaatatcaacttactcagaatatcgaacctaaccatgaaagtcctaaccgtggaagatagactcgatatatcatataggcaagacttgcattaacttgaatagaatatcgaacctaaccgtggaagttctagccacgctgatacaggcgaactagatggaacttacctcttgccggagtcaaacttaaccgatgcaaccccgctcgaaactaacaactcgtcggaataaaaggtggcgatgcaccaaaagttgtatattgatcaagagatagtttacaaaaaccccgggtgtacatatttatacccttggattgatacaagtcctgattggacacgagataagactcctaacaagaaaacgaaaataactaatcttgcctatttaagatatatactaaaaatatgaaacagccttgtcacggtcttcacgattcttatttgaattcagcttgatctggataaagtttcatctaccaatcaatttccatcattaaccgaatccactagagaatcataccaaattttggcattaaaaaggggacaactgtaccagttcgcctacagcgttatgttggtaccctccccctccccccccccccaaacctaacggcattaagattctacatttagtgtggaataacactcgtcatgctcatgcaaggagtagataataaataatataaagacatcattgtgacctctaggtagcactcagtgtttacagtgtggtggtatcaacgggtaccggataaactagagcgattcatattatgtggatcaaactaaacgattagacatgcaggaaaatatacaaaatgaattcttcttgaaaggggagaattgtttcgattttaaaaaatagtcaattttgtgcttttattgcaaatatggggagatttttcttttttacttttttttatttttcagtctttgtgcttttttatttttcttttttcttttcaaaaacacaaattgcattttcaaaatatggccaatgtgttcatcaagggggcggttgtgaaatcaaggtggtaatttaatctatgtgattaacaaactgtcaaaggtcagtgtttattgaaaatacggtggatagtgttttcggtcggtgaacagtgcaatcggcactagatggccaatcagaccgagcaggtgccaccggtcataccagaggtatgtgggcgatctgaccaggtagctcgccggtcagaccggtagactattgacggtcgttatagaccaattttgaccttcaatataatcggaataatagagaactagctatgcttgcaatgcatatttgttttagaataatctatctccacttgtacttggattttatttgtttgtagagattaacacaaatagaggacaatcgatggaaattaacagaacaatcaatcaaaatccatcgagaggtagacttatggtagataggactctaaacccattaaaataatattaaagggcccaatcactacacaactagaccgaggaatcaacgaggagcgcactgaccaatttctaggccatttgggccaggc

SEQ ID NO: 21267 - DNA, 4045 bp, Oryza sativa
cacagtcatctcttttgcaaactaccatgtgagacattttttactgacataaatggagcatttatttggtagatggaatgttgctaatccccagtgtagaggcaaaacaactatggtgggtgtatgacattttttgctaacctccaatgtagaggtcaagcatatatggtgggtgcgcatgtgtgaccttgattaataaagtacgaaaacaatctcacaagggtcacaacaatttcaaaaaactcaatgcaataacatgtagcatatttgtaaaggttttttcattgtactcatcatatggttttggtaggaatttttcatcattgaggaacttacaaatttttcattcttttgaaaataaggactccggagttcaagtatcgcttggagaaatatcatagagtctctatttcaccatctcatatcccgtaacaatttagacatagatcatgcgtgtgcaacccacaagtttcaagttcaagacaaagattgttatccaacaaactcaaaaacttaagcaaagactaagttataaactaagcactggaggaaacaaaatagagaaactattcattatttcaactattagaactagagcattcttaggctgagttctttctcccgctttcccaactcacatctctcgtttttcgcgcgtatgcttttcaaattgataaacggtgcattttttgcaaacattctttatacgaatgttgctttaaaaaatcaaattaattcagttttgaaaaaaaattgctaatacttaattaatcacgcactaatgcaccgtttcgttttttgtgtggtagagatggttcccaacccgaaggagcaaacacagccttactgaatatggaaagcacatatttttggtatttttaacttttgcaaatttttataggtttttctttttaaatgcaatgcattgaaatatatatccaaattaccttagtgtggggatcctcctccaagctagggattgaatccctttgactggaaaggccaacatgttagcctgacttttctgtacggtggcgctgatgttcaccgactggccatcggtatgctgctgccatgtgtgggtctcatggacatgctgttcggtgggttctgcttctggtcggttcagagatcaagctgtatcagagctaatagtacagctcacttcttactattagcttattttaaagtcaacatatataatatattagctataaggttggctataatttttttctcttctttctatctctttcttatacatttaatgtaattgttttgaagtttatgataagctccaacactcttaatttttcactatctctcctccatctaaatttatagtaggcttatagctcactattatactcgctctcagctgttgggtgatgtccgcaaaccctcgattcaaggtcatgataacctctacctgagaaagagcagcatgcaccaaacgacgggggtattccattatagttagaggagtggtctgcactggtaatgttgtcctagcgtctgctaggctgctcccggtggccacgactcgcgctttgctaaggagagcctccttctttatatgtttgcggtggttggtcccaaacggttgtgtgcacagctactgcggctgctgctacgactgcttatcacaccttaatttttatttcggtgatttataaattatttatagaatttatattgaagtgtacattaatttgcattaatttgcttgtaaagtaaaacttcctaaacaaaacgtggctggatttaatttttattacattctccgaggttaattacactctagaatttgctcggatttttcatagctcaattcctaatttttaaaatacaatcatcaataaagcaaatatttaaaaggaaaagtaactaagagcatgctaagattgtagccaaaataaatcttaccaaattttggtaggatttcttatatattttccaaatttaacaataaataaaacatagactttgccaaaaaatagtatggttgaaaatgacatcaatctgaacagtccctaaaaatatccaccgaagctttgggccatttttggtcatcttcttttgtaataagttcactataggtccctcaatttgttgtcgagtatgaaatccgtccctaaccgtaatcctatatcgatagagtttattcccacttagtgtatttaatatgattttcctgcaatgtggttgttccacgtcaccttgattgcttttgaactgttgatttgaacttgtatggtaggattagatcgtttttattggtctgctgctggaaaatgaaccatggtcgaggcccaccaggcgaagcatcgaaatacttacctagtagtcaccgatcaggttccgattttcctggttttttgaaatttttttagtctcttccattgcttgccgcgtgtcctgctgatttttttttacagttttccactgatttggtgaccggttgatttcctattggggtgacgtatccggtgtatgttactggtggccaactttcttcacatggtgcccacgtacgtgtcggtgattttttccattttattttacgttgtgttttacttagccggtaacggccggttatatctaacgtgccccttcctgattcgttatttcttacagtacacgcagtattatgttcttgtcgtttgttttagcttgtgagctaaggattgtttctctctccttatcttcttacagtccatgcatggcaagctacaatgttgcacacatctagctagctgcttctgcttgcctcgtgccgacatgcgcgtgctgcgtgctctcatgctgctcatgtgtgttgtcatgtgttctcttctttccaatgtttatgctcctccttgctccttaagtatgtggtattttttctctcactttattggctctttcttttgctatttaagtccgaccatctcgttgttttcccatacattcttcacatcaatatatattctttctttatttcttcagtgctacttgagttgtttcctgtgtgttgtcatacctttttccgctgccatgcatatttcttgtttggttggtgtcttatgttttgttgtgttcgataggtgtacgtgagaaatgcgatggcgggatactggagtaatgtgagtgtgcgacccggacagtgaaggggacggaccgtaggtgtggtatgaggcgacgttggcgtaccgggtgcagtcacaggggtgacgatcgaggaaccagccacccggacatcatcatggtttccttctacgtacgtactcgacatggggtccgtccacccacaccatactgcccatgcctaccttctacggtgagcgtcacgcctaccttgccccctgcagcatcgatatcgttaaggttgatgtgcagaacatcattgagacattcggtgtcgggcatggacgcatggccgtgccgctgtgttcatttcagcccactctcttgtttttcgcgcgtacgcttttcaaactgttaaacggtacattttttgcaaaaaatttctatatgaaagttgcttaaaaattcaaattaatctatttttgaaaaaaaaattacttaatacttaattaatcatgtgctaatggaccactctgtttttcgtgtgggagagggttcctaaccccagtaaccgaacatagccatattgcaggcagcttcgccaagcatgagcggatgtgtgctatgctgccatagcaccaacgaggttcctacgaccacatttgaggatttaaatgaagcacattctgtaaggctcggaaatcaatagaagaatagagggtgtgtttagttcacgtcaaaattgaaagtttggttgaaattggaacgatgtgatagaaaagttggaagtttatgtgtgtagaaaagttttgatatgatggaaaagttgaaagtttgaagaaaaaaaattagaactaaacaaggccagaacaaggtagtaggtgcgtgagtcgggtcacatgcgaggaggagcagggacgtgaagcgtgagtggcaggaacagatggcgctggtgtcgaggtctccaacggtattactc

SEQ ID NO: 21268 - DNA, 2947 bp, Oryza sativa
ctgagtactttgtagcattatgatattggcaccgataaggccggtgacatttagtggtgaggaagtgatccatctacattattcagcaataggcggtatcacaaagaaaaaaaaatgtaggcagtgggtaaagcagacttacatataggctatatatcttccctggtcgactaatccttttaagtaagaatttataattgtgccataaaaaaagaatttataattgtagtttcatattcactatgtatgaactataatggaatgcacagataagtatagaagatacatcaacatttaacaatctttatgctatttatgggatatcataataatctaaaacaaaatatgttctccacttgtcaataggcataaagatgtcaatcatatatattcataattgtagtttgatatgtactatgtaggaactatactggaatgcatacagatatatagaagatacatcaacatttaacaatctttatgttatttatgggatcgaccataatctaaaacaaaatgtgttctccacttgtcaataggcataaagatgtctatctgatagtgaaaatgaagcataccgacaagaacattttgtcctggttgccactgttacaaaatgcgatatattcttctcaattgatgaaattggttgtaaaacatgcatgcatgagatatattaattcgtactacattctaaaaaaagattcgatatatgtcattttgtatacttatagatgtttgaagttttttttttggtgaagaaagttttaggttggaaagagctagaaacattaatggttaatggccatggtgttacgcaatgactaaagttgatataaaaagttataacctaggactggaggacctattcacaggctgcgttggcagatcatgatttctatcatgcataatcagtggagtacaggcaaaacgtgattttaatttcttcagtaacatttaaatacatatagctaggttagctatagaaaagatcagaaaaagttagtcatatacatcaatgctttagaataagagtaacttattttgacataaatcaagctgataagtccataccctaatatcagcctctcctggaaaaaccggccatccaaagtggggtgtttggaacacgtgtcattcgtctttttcatgtctttggcgacacaattatttcattctccactttataacatgtcgggcgtgtcaagaaattattcgatatatgcgctttataattattattcctatcaaagtgcgcgtgccgaacatccactacgtacctagcttatgcgacatggttatcctcattgtgtggcaatggcaatgaatctttctctatatatactacctcctccgttggacatatatatacgacccagcttggatgtgtgcttacagaaggtaagtagatatcagtcataatattatttcttcccttgttgaaatggtacttatgtgtattagtattaccactatcgtgattattgaattttgctatccatgacatttatagacagtaattaagcccacaatgtatctaaattcttgtgagcatcattccagtaagatcatgtagcgacaaaggaaagagctttacaagtactacaattttgagtacagccataaaaggacataggtgttcatccaaaatacaagttttgttcaaaactattttgtagaagaggaatattacaacaattctcacataaagtttccagtaatactatacatgaccaggcatcaaaattattgggatataatgctatttgtagtgtccaaatacttgtttaattgaataattagtacagaaaactataattaatataagaatattttgcctgttattttggacaaaattgtagattttcattacgtttagtaccgagcatatattgataatagacaacgaaatatatgctcggtttaatgttcaacatgcatggtgtggtggaattgatttctaggaacagacatgattgatccctaaactatcactcttctatatatatctagtttgtccaatgagatgtattttgatagttcttttgtggtatctatcatatttgagttaattagtatatttttactacatattatataactcattgacgatactgcatataatcattcagtcatcagtgacaaaatggagaagcgatgttccattcttgcactacttggcttagtactgctgttctccaacgttattgctgagggagcaggcctgaacaaagcgatcttttctcgcaaaggtctgaaagaagaacgcaaactagctgtcactggaacagcctcatcccttggcggtttacaagggcaatcgtcaagcaccggtgttggaggtgttagcagcaacaatgctgaaagtacaaattctgaaactggagactcttcgtcagcctacacaccgatgagtactgccaccaccacagactcccaccatgacatgtccatggatcagtatcggaagatcatccacaacagccagatgaacaaaccgtaatgaccatggattgtcccgaaggacgtaccattggtgcagcatcgtccttatacttcatggggtatcaagttatgcaacgaagtataacaagagtcttttaattaatgtatatatataaactcgggtattattatatgctggacttggcttgtataaatctacctggtgccttcggctatataaacaaatatttatgcatgtgtttcgcatgcatagtaatgtatgcgctagattatgtgtcgaataaatcagatgggagatgcccatggtttatggttaatagccaaagcaatatttgtctaatttctcttgtttttaacgaaccagaggcgactagggatcaggtgcccgatgaattgcaaaaaaaaaaaaaaaaatcgggcgctcccctcctccctactactatcattgctacacgggctgggtgacatgcaaagttttgag

SEQ ID NO: 21269 - DNA, 2071 bp, Oryza sativa
cccagatatctacaaatgtcgcaccatcgtcacagcagtacatgccgagcatacaattaatctcaaacaggccatgaaacgctctccacaccgccttgccgaatggagaccgcatccaccggaacgactcggctgtaatgtcaaacgccaaaatcatatcttcgattctcttataccaatgcaggctcccatgcagcagcacagatgcgccgtttgcctccgcctctggccacccaatgcacctcggcaaatcgccagagcccaatgtgtagacgtagcaggcgtttctatcgccggggatcagaacatcaacgagccgctccgaagcaggtagctctatcctgtagagcagaagccgatactcgccggtggggcggtgccagtacaagcccatgagcatgaacccggtgagcagcggcagcgggatgtcaccggactgacgcgtggtcgggttacagatcgagaagcggacactggaatgggcaccgatggccctcttcctccagaggacaaggatgccgtcgcaggaggcctcctccacgcagaagacggagctgtcgaaccgggcgacggggtggaggagccggcgccggcggtcgacggcgaggacgtcgccgtttctgcagccggtgacgagggggagggagggctggtggcggtggtgggcgaggaggaagtcgcgggtggaggtgaggcggcgccatgcgcggcacaccaggcggcagcggaggaggggtttggggggaagccgtaccaggatgtcccagacgacgaggacctccgggagggcgacgccggagctgagcggcggcgggagtcctgtcgccgccgccgccgccgccagtggagtgaagtgacgaggccagagacgggctgacggcggagatacccttttgggcctttggctttttctttcttttttttttttttttgaaaattcgatcagcagcacagagaaaccccgttaacagagaaacccttttggcctttggtaccgttttctttgctgtgctatgatcgaattttctccacagagaaacccgttaacaaatttctcacttcgattggaagcacatatcatcggttttcctactatacataacactttcatcacattttgagctaacggtgttagattaaagtagaaaaatttatcctgtaataactaattttgagttaacggaagtgctatatattgaaggaaaatcgatgacatgtgcttctagtcaaagtgaaaaattccttgtgctattttttcgtactggtttttttttcctatggatcgaactctctcttttttgggccggtagagccacgactcattaaacgttcattttcatcttgaacatcagagacaatttcttacgttcaaggcattaaatttcaatcaccttaaaatttcaatttcatttctaaaatttcttctaactgaaatgtgacttcatacatctccttatcatcatcctccttttgccttttccctgtactttactattgaaccatttttttaactcaaatgtgacttcatacataagcatttcaggggtagtcaaaacaaatattaagggtagagcaatggggttcataacgcccactttgatcctcaccatatttggagttgtgacaaacagtccctcaatattcaatatcttgtacagccccaaacatgacccaacttcataaaatgccaaatgattcttcatttcaaggcagaccaatcatgcacatccacccgcacaatgtgtaatttgccggcagcagcagccccttgagtccatttcttgataaaaaaaattctcatttcagctcctttaagcttaaaatcctcaaaatctgctagtgcacctaggttccctttgataggaagtcccattggattgtgctttggctttccaattccaattcgatttgaattgcatattaaggctgtgttcgagaggaggggttgtctcccggcacgcaaaacgaagcatatattattgcatgattaattaagtattgttttttttgaaaattggattaatatgattttttaaaacaactttcgtattgaaattttttgtaaaaaaca

SEQ ID NO: 21270 - DNA, 1170 bp, Oryza sativa
cttccaacaccaccttctcagctcggtagagcagaatccggtagtcgccggtggggctgtgctggtacaaccccaagaacatgaatccggagatcagcgggaggtcaccgaattggcgcgtggtcgggttacagatggagtattgcggggggccggtgttccgggagatgagaaggagtccatcgcaggacgaatccaggtagtcggcggtgctggcgtaccgggcgaccggatggagccgcgcggcggcgcccctgcggcggccgagggtgagggtgaggacgtcgatgaggtacataatatcggcgtagtcgcaggcggcgatgagggggagggagggctggtggcggtggtgggcgaggaggaagtcgcgggtggatgtgaggcggcgccatgcgcggcagaccaagcggcagcggaggaggggcttggggggtaggcgtaccaggatctcccagaccacgagctcctccgggagcgggaggccggggctcaccggcggcagccctcgcgttgccgcctccgccatggtcgccgtcgcggcagcggcggtggagccgtggaaggaggtgaggcgaggcgacctttttcccttttttgagaggggaaaggcgaggtgacttgggttgggtaggagctttgaatgagccttgggccttttcctttatgggccagcggagctatgtgactaattaaggaataagtttatctgaggtctcttaacttatcaacgaatccgattttcgtcctttaaccggaaaaccagatacaacgggtccctcaactgttaaaaccggtggtctcattttagatggcagtcgctgtgcaccacccctcctcactcacgcttggagagaggacaaaggagatgggagagagatgaatacatgggagttggggagagaggaggaagaagaggggtgagaatgacatgtcggatttgttgacagttaagggacctcatatgaacttattccactaattaaatggtgattttcgtgttgagggctagtttagcacagttctagctccatgtcaaatagtttcaactccaccaaaaatagaagcggagttgggtagagttctctcacaaaataaactagatgaatggagctgggtttaggctgctacacaactccacttcagacccaactcctgtagctaaattca

SEQ ID NO: 21271 - DNA, 984 bp, Oryza sativa
tacactcttagcaaggcagagaaggaaagtatgtttgaatgcttggagagcatcaaggtaccgtctagatactccacgaatataaagcgaataataagcacgaaggagaagaagttcgcaaatctaaagtctcatgactgtcacgtgttgatgacacagctgttaccagttgtaatctatcatcgatcctgatagattagaagccctgcagaatgatgtggtgcaatgtcttgtcagctttgagttgatatttccaccttcatttttcaatataatgacgcatctgctttgtcaccttgtcaaagagatcggtattctcggtactgtgtacctacacaacatgtttcctttcgagaggtacatgggcgttctgaagaggtatgttcgtaaccgtgctcgtccagaggcatgcatcgccaatgggtatggaacagaggaggtcattgaattctgcgtagaatttatcgaagaccttcgcccaatcggggtacctgaatcacgccatgaagggagactacggggaaaggggagtctcggaaggaaagcaataatgatggtagacaacaatttattctgtaaagcccatttcacggttctgcaacaatcttcattggtggctccctacatcgaggagcacttggctttagttcgcgccagaaacatcggtaagtccgatgcatgggtaacgagacgattaaccaacaactagccttcctggcgaggggaccatctggcttgatcgcggcattccagggatatgaaatcaatgggtacacattctacacgagggcccaagaaatgaagagcatgaaccagaacagtgctgttagtatcgatgccatgggacactgatggtacaactggcacgtattacggtgccatcgaggacatatgggaactgtgactatggaccttttaaggtccctctgttccggtgccaatgggttaggttgactggtggagacataacgattgatgacagtg

SEQ ID NO: 21272 - DNA, 6531 bp, Oryza sativa
catacagaacaataggatacttgtaatggctgcacacatcactagttgatgcaagggtcgtaaggtacaacgtaatcttccatcacctaaaaaacagggataccatttagtggcagtaggggtctgttaggataggtctaaaactctaaattggagcttgaaacagtgaagcctactcaagcttaatatatggtttgacatgctactctagaggaatacacaaaactaggcacatttgttttgagaaactgcaagatcattctattcatggattcccaggactttgttgcagactgtgggcaagagttacatactattggaacatgtgaagtgttattcctagctcatagcaaggtatctactgtactatggaagagtggaaggccatgatggcatgggtaatgagggagagttttggggtgggagtttgactatgaactgggaggaaaaaccttcaggagaatctgcattaattctttcatatatttttaacttaaacaggcaacaatgctgtgcctataaaaacctggcgataatagacagtctaaacctcccaagttccaacagatacagctttgatagcttgctaattggattgatactatgcttaatccttcagctgagtttttcaatccctcaagctcaagcttatgaatgattatcctttatccctctgctttgtttgttgtagctgtgggattgctagactatttgtcttgcattgctagtggacgaactctcccaaaaaacttatcttctgaagaatcaatcgatgagttgtttacaatatttgatgatgtgcgaaggactgcagtgagtacaactgacagaatcctgaacttcattggtgagctactaagattctagatagtttatgctctttacaatttacgctcttatccatggaatgaactttaagcaagtgtatttaacttttaagtacactgtagtcagtcattttcatactagagatttgtttggacaattgggcaggtaggctgttagaaattttgttatgcttgcatttagttcttcagaatccatggtagtttactgctagaattgctgtcaaattgctgctaattcattgatactattttgaattcattcagttgtatattcatcattggaagagcaaaggtttgccaagaatatgaagttgctgttgtatgttgaaacgtatagttgcactatttgttcttgagctgctttggttaaattaagatatggtttactaaagtacatgatatttattagaattagatcctgataatataatattgctgcaaattttgaattccatacatttgttcaccaacagtgccagatattaattcatctggaatggagaaagaataagaaaacatccacaatattgtatatatcaatcacatgagtttctaaagcaatactttgcaggaacaagggctgtattctgggatatgcgggactcgttacttttctccttgtaccgtgctagtgttgaaagtgcacgtatggagatgtttatccctactattgatcaagtaggaaaccatacttgagatacctggctacctacattttatccttaattttgagttttattaatggatgaactggaactatgttgtaggttcttgaccaggtatgtgatctgattgttgatgccctacgtgaccaagttgtgctgagagtatttcaagcatgcatggtatatatttttctatcaatgttccattgtggagtaaaagctttattcatttaaggtagagtaaaagcttatgaaatgtggatttaattaggaagggcttatttggatcctactggatggaggcccatcccgagcatttttggagacagatgtggacttgatgcatcaagatcttgctatgatcaaggtaagaatgagatttgagagtgcattgtaattattatcgagtgaagaaagagcaaaagtctctttatgtatccagcatattttatatttttcaacatgttgatatctcggcgaaccttaacactgtaacaagatttatttgccttgactgtgattttcttctaggatctctttatagctgaaggccaaggtttaccattggatttagttgaaaaggaggctagactaactcatcaaatactagacctatttgtgttaaaggtatgctattcctttctcttttgttttgcagaaagaaaagttctgcagtagccaactaaatgaaaatgattttcaggctgatacaatcattgacatgttaataaatgtaagtgatcaattgcctcaccatcttgaacttacaactactcgaagaagacatgtacatgatgcccatacccttcttcgagttctgtgccataagaaggataaaactgcctctacgtttttgaaaattcaataccatcttccaaggtcttcaggtcagaagaatattaattctttctaatctagagtttagattatctgtaattttgttagaaataattttaatggcaggccattgaatttgtccagttggtagcttggggaaaataatttttggaaattggctatattagttcgggaatggcagtttgatattcatgcactgccttagcaatactatatggtggtgccaaatgggtgtagggatgaaagtgagcaaacatgtagttcagggtgtgatttggccaatttcagctagagaatggaaattgagccaggatttcttagtgttgtaaccccatttcatgtgtatttaagcacatactaagtatgctgctcttgccccttatggtaaaagaagatgaagaagcctattttgctctagcgattatgtgtttctactcatatgcactttaacagcggtgcttagcatttcctccaaattaagtgctttccagttctatcagttttgattagggaatgactgctattgctccatttgtgcagattatgacgatatttctacaaagaacgcaccatcaaaagcacctatgttttctgacatgctgaaaagtacttctttcaattggtcagaaacaggacagcagagttttagggttatgaagaagaaactgcaagatacctggcagtaaaatatgtcttggagataatcggcttggtttgcacataacttttccatatatgtgcagcaggtacgtcataaaaataaatttcaaatcccataacacctgggtatatgcaaaagaaaaaatgtcagcactgtatgcaaaaaaaaaaaaaaaaaaaaaaaaaaaaaaaaaaaaaaaaaaaaaaccttcacctcctgtgctttcaatcctgcctaacatttgcactctcggattatttttcacgattgttacatctttcatgtttattgcacttgtaaaaacactgtgcaattcagctacatatccaggatggttcttacttctcaaaaggttggtattgagagcaacaaacacacatttctcctgatgcctctgagggcccacagcctttgggaatcgtctggccctgatagaaatgaagcaaaccaatacccaaatttagcagtaaaaggtgtagtaataatattatatggtacaatggacttgctctatgcatgatgacctccgtatattaaacagatattacctcacataatgtcatttgacattttgcaacagatgacgaatgcaaaaggaagttctaattgcctattttgatgagttggaacttggcagaactggacttattatacctgggactatccacctcctgggagctcaatatattccctgtcatcaaggaaatgaagcatcaaagtaagctactattacactagtacctctaaatgtatttccgttgctgctactatgtgccgaagtaatgaggatgcgattaaatcagttgtttttctcgaacacgagattaaatcagttctccgttctatcttgcaaggagcaaggtcttctgagccctagaactaaatcaccatgagggcagcaaccgcagcatgcatctgggaagtgttgctgatagttggaggtcagagttctcatttctgactggagcttccccagcgtgatagcattcattgcagaccaatgtagaagatttttctggcgactacaggaacggtgtcgtgcctcaacactgccagatcgtcggagaaaatctgcatgtgaactctctggcctagagcggcagcaggatcaagaggggaaaagaattgcttgtttactgtcattgcacgagtttgcgttcatagacgccgttgccttctgttctatgcctgcggcacattacgagaagcgacagcaataatcgttcgcgggaaagaagctgggagaaaaatgccactgatgtctcctcataacctgctactgtagtttttgacgtattgtatctgaaattctgaaattctgaatgccgtagtcaaactgctgcatgagaaattagatgtatgttttctgcacccagcgacttcatcatctaggaattccagtcgcaggtacataatctggtcctccaaggctccaacaatattatgctctttatgcacaagttagtattaccctctttatgcccaagttagtattgccgcttttattcaagagaaattatcaagttattatttcatttctgagagctacaacaaaccacttaaaaggttagcatgagacatgtcctaatttacatcatcatgacaaccaaggctacaatgttcctactactcccgaaagtatagtttagtaccctgtaaagtggctgcagtttgcttggtactggtacgaactacaattcaatttggctcatgtgccatccaattttctcagttttacgccgcatataaaatcaacagcaagtcaacaaccgttacgagaccgagctcttgcggtcacgggaggccccgcccggcctcgccgcggccgccgcccgcacggacagcgcgagcacgtccagatccgacagctccgtcgtcctcctgaccttcccctccctcacggggacccgccgcgccgcgtgcctctctctctcctcgtcgtcttcctccacctcatcgtcttcgccgtcctcgtcagccccttcctcctcctcctcctcctcgtcttccccgttctcctcgcgcgatcttttgccgccgatcgccacgccgaacagcatcggcttcacgtcgccctcccccgcttcctcctccccgccgccgtggtcgtggtcgtaccgcgacacgaggcgccgcacgccgtcgcagacccgccgcgcgcgtgccagctcccgcgccagcctcgcgttctctcgccgcagccgggcgttctcctcctccagctcggccaccgcgccgctcacccccgccgcgatccccgccgccccgcgcggcggcgacgacgacaccgcgggctccccgccggagctcgtcggcggggacgagatcggtatcgccgtcggtatgccccccgccggcgccgcccccgcgcctccggtcccagaccccttccgcctctgtatcccaccgagcaggtgcttctcccctctcctgaagcagtcgttggcgaactcccacctatccgccaccaccttcttgaatccctgcaccaacacacgcaaatctgtcggaaaactcgtcgatctaccgaaaccaaactgagattagagagggggagagagagtgttcagcggagggagacgcacgtaggtgttgagctggcgcacgaaggaggagaagttgctgtgcttgaagtgcttggggaggaggtcgcgggcgaactcggcggggcgccacaccacgaaggccgtgccggagtcgttccacgagatggtctcatcggtgctcgggtcctccaccatcgcgtacgtcttcgtcaagaacggcggcgtccccgccgccggcgacgccatgaagaacctgtgggccgggagtagcgctcacacgagaccggggaggagacggagaagaagatccagagagcgcaatttgcttccagagaatggaaagcgcgtctagaatgggggatttgggaacggggataggttagggatagggcgagaagcatccagcggattctagaaggttcccggcctttctgagccgacacgtggtaacgtttctagaaaatattgagtgggcttcggatcttagaggtttgaggacaagaccagcccagaactaagctttacacttattttccaccagattttccttgcgtatttctcagatttctagatgggaaaaccatgatcattttgcaattcaatatttcgattacatataagttgggaaattccttttcagaggaacttgacgatgggaaaaaacatgactactctctccgttacaaagtcaaaccgcttaagtttaaacaagtttgtagaaaaaagtattgttataaaaatatatgtaattattgatttgataaaactaatttaataatataaatattactatatttatctataaacttagtcaaaacgttttataacagggtgtacattgtaattcaacattccgatcacatataagttggaagttcttttaattagaggaatcacacattaggttggatgtacttgcaatttgacgaaaaagcattatcaggcaactgcaa

SEQ ID NO: 21273 - DNA, 38820 bp, Oryza sativa
gaggcgaggaggaggtcccccggggaggccggcggcgcagtgacgtccccgacgcagtgcgcggggaggccgaggtgcgcgaggcgcatgcagagggcgcgcatcatgaggccctcccgcccgacgccgtgcacgaacacgcggcccccgcgcgcggccgccgcggcgagctcggcgacgaggacggggcgcgcggcggggtccccggagaagacggccgcgatctgggcgcagatggcggctgcgtcgccgccgccgctcatcgtggacttctgttatcttatcccaaagctgatgacgagcctccgtttgagtgggagtgtggtacagcttatggtcagcaagatcgtctgataatggatagcggagtgctgggaaacctgcgtccgcaaattggattttttttttacttttacattttttattaaaatatttaaaaactttaacaacttaacaaaattcaaaacattttaaacgacattggatgaagataaactttatataaaagttgtagatcccatcgagatctataaagtcaactttatagtttattactcttccatataaaatcatttagagcatcaaataagcattattagtttttttttagaaattgaaaccaacgaaaagggtctgaacataaataaaaattttacatttagatcccttaacgtctttagaaaaggcgatttttaaaaaacatccttccagaagacgtgaggcgtctatatttgtattccctccatcccaaaatataataacttttagccctcaagatttgtcccaaaatataacaacttctctatcaacattctcttcccaaccaatcaaaactctccaccgttcatttttttccacctaactccactacttaaccaatcagaatcttccaccattcatttctacctactttcttaataattatgtctaactctaaaaatgattataatatgggacggagggagtagtttgtaaatattttttaataaataaaaaatatcccgtaaattggatggtgcgtgcggcctggtcgactgcgctacagtttagcccacattggttgggccggaatggaagtacgtgcgagtgctgcgagccatattatttgggccggaactgtacgcgttgttgcatctttgcaaagtcgtgttcggtgacgttggcaaaaacccacaattcacaggagaactgctgcttcacagaaaggtactgtaacaattatgcaacatagcaccggtgcacgcatataaacgcatatacgaggccctctctgtcgaaccttgtctgatcatcgcatagcaacagatagacacacgattcgaacgcccacacgttctaggctgtctactatgctaccaccatgtatgcctgcaggttctcgtggaaacctcgtaaccgtcctgtgcggctactgttctcaacagtagatcagcacgcagcgaaacatgggggggagatctgtattctgacacgcccaacgaagcagcccgccccccgcatcatgcccgtacgtacgtgcactgcagccaccacttactgtaatactgtgtgtcacagtgtcaaccatgcatggcccccatatgcccgcgaggccgcgacgcgcgcgctcatcctcctctactttcatcgtacgcgaatacgcgatccacccccgcatgcatcgtccccacaccgagcgcgcggagccagccgccgagccgagctgtcccgcatgcagcgtcgcgtcgcgcggccggcaccgccgcgcgcgcgcgcgcatggtcccatgcccatgcatgggcgacgcagcgcagaaacgcggggggagcccagatcggaggaccatcggcgagccccggccgcagatccaatgccaacgcctaataactggatctaatctagtaccccgcggctgtcccccgtcgctgctacagcatatgaccaactcgctcatacgcccttctcctttcctcaacctcatcatcatcatcatcatcatcatctcgtcgtcattatctctctctcaagggaaaaataagcatatgcagtaatattatgatacggaatgcagagcataggagaccatatcttccagaggatctaattaaaccgggtgtagtataattttagtatttagtagagatcgtgtttgacggaggggatcttgtggagggattaaactaactaaccaaagttggaagcttgcaatgaatctaggagggatcttgggctagggtcgtggtctccgctgtcgacgccaagatgtactgcaagcaacaaaaggaaaagcacgagggtgcagggattaagatggagcaatcaagcaaagcgagcgcagctgcatttggctaatgcattggcagctgcaacgataacgataacgattattataactgctaactgcacgggctactaattgcacatggaatcgagcgtctgctacttagtatatgcaagataatgagatcatggagtgcgtaaagaccaattagcaacaagagtgatgagggtcataatgaacagctcgtgatcctcctacgatcggccgttgttgctgcaacttgaacgcaaaaccgctccaattattcaaggcgctaacacaatcattaggccgtggtcagaagggacagccttgcacccacgcaggcaccaccaccatgcctcctccgtgtgctcattcatgcccaattggtaattgtccaatcctgttctcctgtctgcaaatctaccgcctggtcatttttttctgaatttttgacagagccatgcctgcctgtctaagatttgccgttctgacaagatgctggattttactggagcagcgaaaagacggcggcagcaggagtgtgtgcgactgcaaacgaatcagctacagtagttggtcagtctcatgctgttctttgaatcccaacattacctgaaaaaacgtacacttgttactgcttctgttgtgttgttggtcaaggatgctggcttcaagctagctagactctgttgttgaccaccgccccttggtcagttaattctgaacttccaatcataggactaatggagaaacttgttcgcgacagcagaaatgcttgctaactcagcgactaatctgacctggaattcatctagaagcagtgtaatagcacgtgaagagttattgaacatgttatacggtcaagatgcttgttcttgcttggtccaagctccacatcttgattccgatttcccaatatgctattgtttcctagcattgtgctcctgatattaagctagactataaacgtgatgatcctgtactttagtaaaggattttgcagtgatgcattgcaccattgtttcctattctgtcacaagttactcatcacctgaagtcaaacaatgcactgtaagtaatgagctcatcaagcaaaaacatgatcttcagtaaacaatgacattgcatatcacctttgctttcttttcttcctcctccctagcatacacactacaaggaaggagctcattgtgtttggggtccatcttaatttatccatgaagctgcattttgctcagtgagctgtctgcattttgcaacctccaagatcccatctcccacgcatgaacagaagatgcacccaatgccaaatcgaaaagagcaagatggtgtattatcctatcttgtaccagcatgtctcccactgctgctacagcacaagacagctctcatatgacgcatcctctgaggattccatggacagtgcgcagcggctagcatcacatttcagatccagagcacattgcactgaagatttgtgttaaaaagggataatgaagctagatcacagtacattatactagcattagggtctgttttttttagacctacactatgcactgcacatcactgtcttgtgccggttttgaatgaatggcttcttgtcatttgtaaactgaatttcttgttgctaaaaaatcactgaagagagtttgatgtactagtactatttacagatcaccatgctgcaaaatgagctgttgctcagtgcaatgcaatatttcaaattgcttcaattatgcctgaacgagcgcaataatgcgagcgtggcagaatgttcaggttcggacagagtagtaaggctcaataattcgatggctgttgtaaattctcttctactgtttcgacagtgctgtagtaggagtgaaacctgctaacctccgaatctgcagccgtggccttttcggcttttccaacatgtttctgactcgcagcactgccgctgatctgagaaagtgtgtcaggtaagaaatgacacaagcagagagaggggaaagaaatcagcagtgacgaaacagctcacagcatgagagacagcgtgcttactttgaagctgatgaagctactaagcaatttgactgattgtttatcactagtcagctttaagctaagttaagcttctgttgaacacacttgttttataacgatggcctgatccaatgatgacaagaagtcaaaagccactagtacactataaaatactagtactaacagaaatgcttactatacaaaaccggacaacctgacagaagatgtatttctagatagtacagtatttgacatggtcagaatggtaggcttaatgtaaatagtctgcttaacgtaatcctaatatgacgacatgtaaaaactgcatttgcaaatctcgatatcgagtagaactgaagtataatccaggtgaaatgaacttacagatgactcatgagaactactactgaacctctaccaaacagagcttgcacgaaacagtgctatggatctgtcataatctaatcagtatcagaacacaggaaatagaaaaataactgcaattggcattagacttcaccttccatgatccatactgagtaacctaatgttttgacacacagggtctccccatcttggtcaatcactcaaaattctagaagcaatcatcgatccaagtgaggcatccgagtatacaaatgcttactattgctccaatgttctagtgagttgccgtgcagcaaaaaaaagtttcagtgagttgaatccgaagtagtcctgacgaatagcatcaaggccacatgtaccagaaccctttccagccctaaaatagccgggaattcgccttcctgacaaatcaagaaatgcacctacagaaactcccaaatttcaacagaaaaataggttcatattcagaaagtcctgacaaagagaagcctagaatggaatgcagaagtataatacttggaagcaaatcagaaagattgagaaaggatgtatcaacaaaatttaggcattctggaacagatcagcacccttctagagagagagaaaaatctgatgcacattcatcctagaatgctaagtccggactcaacagattcaggaccattagatttatgagatgcacagctaacatgggaaataaatcaaatgatcaaccacctcaggtcccattagaggaacaataatagctcttgagatgctccacaaggtccacagcaaacaacttgtgaccccaaacagaagcacaaattgcccacatctgaagttggacaaaatccagatcaggaagcagaagatgtgaaaaactggatgccaggttttaaacaaatgaatgattttttttttttgtatttgaatggaaaatatgtaactgcagttccgtcgacctcccagataacgaaaaatgggaggataatttacactcagatgagactaaaatttctatcatttcaatgagcaattgagtggggggagtaagaacaaatctgatctacactgaaagatttctacaaaaggtacaagctaccgggcctgccacgaacaaccactgatgtagagatctcaaaggaccactggtttgattatgtacaacgctggtccatgtacaattcagcaggagcaccaagcatgtgatgtcttgtaccaagtaaccacacgctgggccagcatagctgggtgcacgggtgcttttcttgaggccatgtgaggtgccaatgctgcgtttacttccatccaatgctcaaactattcactgatgcactggtaaaccgaaattctggaaatacctaatcctgccatcccatcctgcagtaactatcacttgaccccaggagtttgatgttccttggaaacagttccttaagagcttgaactgtgactcgtccaaatttacactggctgtggtagatggtagcatttcctctggccaagttgctgaacttttgcaagaggactcaatgaagaactcctggttcagattgaaaataccaggagcagcaggcgttgacacaatttttttaatggaagaatcctttccacagaggcttgaattgtatttgatagccttgctcattgaccagaaagtatctccttgtggtggtaaaatttgggacgacaacggaactgggcttcttggttttgtgccattccatggtattgcaatggctgcattgttggaccggaaatgctcagatgtctgtgtggtttttgcttgtttgcatgcacactcatactggttttcatggctccaaacataaacgttggagtcttcactggcagaaattatgtgctgcccttctggagtgaatgttgctgacaactggcaagaaccacttcggagtcctgatagattagcaaaaaaaaaaaaaattatccatccgaatacccaggaaatgactagatagagcagaaataataaacgagtatttgggtgtaccactataattctgaatcacattggtcccatcaagtattctgatcttcgaatcggcagatgtcaccattagtttacttgggttgcttgggcaaaactgcaatgggaatgaggaaaaaaagagtcggaaggatttctagtgaaaaaggactgatgaatttattgattacagcatgcctcttccttgcccaagatgttacctgaaagcctgtgattcttttgagagatgatttcttctttccattgagagcaatttgtgtttctagcttcagcagattgtctgatccaatgcaaaacagatgaaataagcataagtataaacacgtattctgcctatcaaaaatatattttaaagctaataatcatttggcaatttagtgtttagtactaaccagatatttcatagaagcgacaatttccagtaatagtaccaaccaccactccctgcaagatattcgaaaagaaaggacatcagtatcacaaattactgacgcagcaagttagtcaaaacagctaagatggccgctgataatcatacctttccaccaggccggtaacaaactgctgttactatgtctctaatatccacccagtccacaacactgcttctagtaatgtcccaaacacgaattttgccatcaattgatccactaatgaagagattctcgtcagctagattaaattggacacaagtcactgtaaaacaagaaaaaaaagttagctcaaatttatagatgaaagtgaagacctttgaggcagctaagtaggatcacataaacctaccaaagttgctatgtggataaactctgatgcagtttgcatatccaatttcccacatgcgaacagttttgtctgttgatgctgacagtagatgctgtaaagtagcaaatattaattatcagaaccaaaaagtacagcataaggaaaaacgcaaaggaacaattccaatacatggacaaaagagcatttcattaactaaccttatcgctcgaccatgacaaatcaagcacatcaccagagtgcccacggaactcatgcactggttcctctgagatctggaaaaccatcgttggaaccacaatacaagcagaatcggattttttcaggccattgatcttcgatttcttctcgctctcggcattcacaggagcaagcccatacttgcgccgcgcttttaggtagacgcaagaaggatcatccagtggaattttgcagtcctcggactgcatgacagcccaaaccctgacaactccatcttctccaccggttgcaagaagctgcccatcaggactaaacttcatcgtcaggatggcaccatcatgtgctttgatcacttgcccctgatacacggcggacaattccttcgaccgcttccggtacgagtgaaccttgattctttcatacctcccagccccaatttgctcactatctgaagaactggtgctggcttcatctgctgctccactatccacaacacaagcactgacgcccagcctccggagccacccatttctcctcctgtcgatcgtcttcggagcaccagaaggcttgccattgcggctcatgagcctctggatgaacgacagcgagctgaagctcctgctcgccttgccggatccactcacggagttgtcatccgacgcgccgtcgtcgtagctcgtcgtctcctccgtcgaccagctcgacatggagcactcgttctcgtccgactgcgacgaccacctcccgatctccgcctccgccgccacctcaccctcctcctccacatcgcccacgacgtccgcgaaatccgcctggcggaggctcgggctgcgctccaggcccatgcttcgcatgaaccgctccctccgctgccgcacgctgtcgagcccacccgaccacggcaatgccgccgccggcgacggcggcagcagctcctcccgcgtgtcaaagaacgcctcttcctccacctccatcctgctactgctactactactactacacctcgctaccaattggcacccctccatggatcgttgtggcgagcacggccgctgcaagaagaagaagaagagagaagcggcaagagggaaacacatctcagagccatgtccggggagtcgtttgcttatatatataacagtaagctaacaagaggagggcgatgaattgcatcagcggcaactgggtgacgacgagaaagaaagcgcggacgcggggggagcacgggagagggaaactaaactagcagggattgattgatcgattgattaaacaagaggaaattagcaccaaatccccaactattcaattcccccccgaatctctcaaatcccgcacctcgcatggcccaatcgccccgagcaatgcatctggccatggcgatccgaccaaccgcgcgcccattattaaagcggggagacaacagcagagccaagaaacgttgccaaaacgaaaaaaaaaaattaggaataaaaattttggcccgagaagaggaagcgctgaattcaccagatcatatctcggaaggatttggcaacgttgcggataaacaataaagaagaaggagatatctttttttcctcggcaaggggaaactcacctgggcgagatggaattcgcgcgcgcgcacgctcgctctggaatccaagaaaaggcttcggttttcgccccctcagggatgctgccgccgggagccccgcgcgtgttcttggctggtggtcgcggcgcgcaagaacagccgcggcagcatcatcgcgcgaacggggagcagctctattattaaagaagggattggattcgtcgagttggctagaaatcaaagagaaagctggaagaaaaaaatggagatgggagcgatttattaggacgtcgtggagagacggccttggggggggggggtcctcgtcaccatcaccatcgccagatttggaagcggcaagataattagaattttaattctggtaattcacttctgctaaaaaaattataccagaaaaaatactagtactggtagtggggaataaagaacaagtagtaaagaagaagaacaattatgtactgcctgcacaattaccacctccttttgcctaattgctgcatcaaaattgcatctttttagttcttgatgctgcaaaattttgcttgtcacttctgattaattattccacagtccctctcactccagacgattctgccactggtccagtgctgctgctcatgcgtgcctgcccagctgccctttttttttctcatttttcctatatttttttctctctttcatgttagtggagtactactagtagtataattttctaccacctctctttctttctttttcttcgttttggttgtcccccaataggtgaactgtgcagtgcctgcatgagcaataaatctcccagctctaggtccctagtctatagatcccctaggcctactgcaaacgggagcgtcgctgatgcatcactccgatttgctcgtgtaattaacccgcctcatattgcatccggctgcgcttctccggatcttttccttgctctgctccggtgagaacttgatgctgcagtacagtggttgcatacttgcatcgtcgcatgtaaggaggagtacttgttaccactggaatggtgccagtaaatggtaacaaggagtacttgtttggcatttggcaaaatcaattcgcaaccaaacagtgacgcaacgcaacggccggagaccggagcagtgcttgcatcgcatggaacgagcaaaaaatcctccaaatattcgttgtcacagacagagaatgcgcagtgcagtgccggtggaaaattttacgtcccttgttttgaaggcaacctctgcaattacttactgttcactaatgatgtactgtcctggatggatgtgttcagagtggctacagcttgatgcacctaacacgtactagtgaacagtacactactcttggtcccctggcatgatccaacagtgtaatttcctttacctagtcacagaaaaaaaagcacacgcaaattaaattcgggtcttttaatttggccgttccttttcacttggtctaggtcaagcggtcagctaagggctgcttgttctgaatctgggttgagaagagatcaacttccgtgaacagatcaaaaagactctccacctaatgactttacagcggatgacaaatcataaatgctactccaaggaattgatgcatgcatgaactaaaccaacccaagtgacctgaagattttcgccttacaagagggtcaatgcgttaagcactcgagcagaagagaagtgacgatgacagaaagcactaatcagtcttgtttaagcaagacacagctgatggagatagagatgatgagtagatttgtagacgtatccatctctagctaaccccaacaaccccaattgttacatggatgatttgtggttgggcaaaagccaagatgacaacggacaactcgacgacggcaacaaccggaggtgtacacgtatgcgtctcctgctttattttggacgacgtatgtatgtacgtgtctggctatctagctaagctgtgtgtaaattcaggtgcactgatcattatattagacgaaagcacaagtggatcattagtcgattccactgaaacaaacattcaaactaagggagtactaatggctaactaggctttgcattattggtggtgctagcttggaggcctataagtatgtagagagatttgttttttcatgttccccgagatgaagcaaacatggcgtctttaaacaattcagctggcgacgtcccagcaggctatacttaatcatatataaactgagctaaattcgagttaaatactcttctccggggcatctgccactagcacttggctagcaatggtccaattttagtacgacatatagaatatgcaagttcagtctcactgtgataaaggaagaagatatgatacctacaacaatcccgcaacttcttcaaattcacacaaaaaaatgttttacaaattaggtatgatctcactaaatgcaacagtgtctagtttgtccgagtttgccggtcatgcatccccctcaaaagatatatatggccctttaaaggaggcaaacagtagtagtattcagacaattatatgataattattgcatagattattataaaatgatcactacaggcctaaacaatccaaagtttttttggataacctaatattgttcctgttatattctggaatccgttgtgccattagtatatcagggcatgatcagtgatggcatccggacttaatgtataatacgtgttccttacattagtatttatattttcttggcacttagtggcactatccttttaaattactttattggttgatgtggataattccttgatgtgtcaaccccgaggtagtaacatattatcactagcaccagtctatattgtcctactattgttgacagtgtcacaagaggaaaatttttctcaatgttgatattttgtcctcttgcagccggtgaccacccaactgaatgggcagacatataggaagaggtgtcatcaaatcaatcactcaacagcagggtcagcatgcagcagagaaacatatcgttccaaattaaccactggtttgcttcagattttagatacgagaggattgggttggactgcacctgatagcgttcggtcgagcgatcactaccgtttgaaaagaattgggtgaaaagctaacatggaaacatcaacatgcacaaaacaagatggagaaatcagtgggaatcagcttggatgtaacggttgattccactgttaaagttggcgctcggtgtatgtaattatatgtatgcatatatgcaaacagtgtgcagtttggcatctcaacatcacaagttttacctgttgctaatttattgtcatgccttcgtacaaaggtcacccgaatgttattagcatccaatttgactgttttatataaaaacaaaatgccacacagaaagtgtcaccggatacttacccatcaccgctccaaacatccaatggttgattgctaaacttctctttctttcagtggacgagtgatccatacatacagaaactgttcattgaaaccggtaaaaaaaccaactttatcataggaaataaaacgaagctagtagatgatgtgatggatggatgatggatctaccgctgtacataggactcgcaagatttggcaggaactttctaaagtgattgcacacaatgattgtcctcacatgtcaacttgcagggcacataaaagaaagtcatgggctacctagctcatgagctcatagccgacaccgcggagcaacggagggggggtgcaaagtgaaaagaaattccttcgtacacgcgctgttcatcacggcgatcgtcggtaaccacacgcacaaaatgacgcccgatcgatcgatcgatgcatgcatgtgttgtgctgcgatgcgatgcgagcaaatgagcaagattgatcgatcgatctgtgtgactttaaaggctaaaatcgtactgcctgctctgctctgctaccgatctatccaacgcaattgtcgcgtgaattaaggggaaaaggatcataggatgcctgctgtaaagagcccgtagatgccgtgctcaataggggaaaaagattatactactacacatcaaaggcatgtaccgatggaattctcgggtgtgattgctcgtacgttttcagaattgatcacccggtgtgccgtattcatagcggatggggtgatggtacatgcatgtgtagcgtattcttatgcacgatttcagctctgcagttgacttggttcgctagctagctagttggctggtcgatccgtagacgagaatgccgccgaattgaattgaattgaatcccaagagcaacgaatggggatcggaaagatgttgcacttgcacacaggttggcacacacgacaacgacggcccgcccgggctagtaatactgatgtggtcatctttgccgtgtcgccgccgaccaaattttcagagtcagcgcaagcgtaattagaccctgtggctttctacctgttattttccgtgagtcccagagcccatcgagtgctctcaattgagggatgtacgtactaccagcggcctagctagctagagatagtcgtgtcatctgactaggaagtttataccgtgtcggcgtaaaaaaccaaagtaatttcgggaggctctgtgctgaccacgtcgcctgcgcaggcgcgcggaaacgtgtcggttccaaagcatcgcaaaagcgatactagaacacacgtctccaggcagcccatgccgtgccgcgccgcgccgcgccccccgtcgcgatctcccaagcctcaagcgtttcgccggggcggccggcctagtacgcgacaagcggacaccgcgcggcgcggcgctgcggttggggggtggaaacccaacctggcgtggcgaccgctgcgtacgtgctatccggccaaaatagtcagcggcttaactggctgggtgaaacagagttaataaaaaaaagaagaaggggcacgcgctgcacagtagacagcacaggagtaaacggttttgtactgtgcggtgggggtgggggcggcggcggctgccttgccgtgtggtgggtttgcagttgcaggctttgcttgcagctttgtggtgtgccttgcctggcttggctttgcacactggcctcggtaccggagccacaagcctggggctaccggcaggcgatggggcgccatgctgccgcgcatcatgttgttccgttgcaaagcgaccggttttacaagcacagtacagtactcctcctactcgttccgatgcgcagtaggttttggattatcgaagcctgcagtaacacccagcgtcagatccgggattaacatgggcatttcattgtcatgctcttaatcctacatcaagagaaaggggtcatgactcaagaagagctggcctcatttcttcctacattttgacttcgcaagtgatcaagcaccagtctgactttgcagtatataatactataatagaagcaaagcattaataaactgaggtgctaattaaatacggtcataataaaataggctagtgggaacctggaaaatatatgatcacattgcatcccatgtataaataaacaactcctcaggccggccctcacacacatactccgtattaagcaagcctaatgtagaaatattctgtgctttgcgtccctagttgctccacgtactgcaagccatcccatcctcattaatttacaagacaaggagagagtgaagaggaagagatgcatgcacactgtacccatatataactgcatatgggttcggcactgtcgaccctcctgacagcaaatcccatgaactctcgatcaggagcttaattactgaaccacaatatatacgcgcatagatcgtaatgctgaattaaactaacccggtttagattgagtcctaggaactgcatcgccggctccgaggttgcatgcgatgtacctcgttatcgcagcacacgctacgtgcgctgcactgtacagagcacacagcatatgcgatcgagcagctgacttgcacgtatgctgtgcgcaatttgctaagctatagataaaattgcatgtatcccagttgtcaaaccgcatgctaacattcgcaagtgtcatcgtgtcagtgacgtgtaggtatctggccatcctattaagaaaagagatctactaactgatcgagttaacaaatagcaacatttaaccgcaccttcctgaatcccgatctgatcactctgtaaactgtcatgatcgagttgctattccagcatagaacacgcgggtatgcgaaaacagagccaggattagcttatgtccagatcacatcacgccgaacttttcatgccaatacggcggtctgacagaggaagcatgggcggacagaaacgagaaatccagccgatcgaatcgaatcgtagtccctgctcatgtagggggcctaacaaactcacacgtcgcatcacggtaagttaattaatccgagccaagaacccgacaaacgggacaccgccaaacggtagcagcctcgatcccggcgcgcagtttcctcccgaacactttgtcggtgcccaagtcgtcgacggattatttctcaaggaaagcgagcacgacacgtacgtgcacgcgcttcggctgcactcaattaggagtagtataactgtgttgtcgtagtaaccatccaacaaatttaatctagagccagagtagcatagtattagcgcacgaagctgcctggcacccaggcatgggcgtaaacaactcgcgtactctacagtctactgcaccacgcacgccgcaaggtgacaggtgacagagcgaaacgcatacaaaaacgccgcggataaaagtgtgtgaaggacagtgagtgagagatgaagacacatgcatgggcatgcaccgtacctacgctagtaatagtggtggtagtatactgcacagtaggtgtgtcgttttgcagtataaaaattgtccccatacgcactacgtggcgggacgcgcgcacgtacggactcggcgagctcatgcaagcggttagatagaaactatagctacgagtgtagagtatgtatgtacgctccaaacatgtgccttttttttacttcttttgttttaaaataaacaaacttaatattaacaaatatataaaatagagcatgtctaataataaatttgtttattttgagatggaagaagtagatgatgagagcgcagactcagcagcgagcgatttctctcatcccatctcagtttttggatgcatttatccgcatgcattgatgcgatatatcgtcgatttgggcagcaagaccggatcgaccgtaccaaccgcgccggtagcggcaagtaggtcgtcgtcgtctcgtcggcatcctgcctgtacttgtcatctggcatctgccattgtcaaaatgttgtatgttcatccgttgtccaagcaccaagcgccatgggatcggagagtagctagtataccccacgtagtagcaagttggttccagctagctagctggctggctgcatgtatatagtcctatattatatagcgatataaacaaggtgcgtgcatgcacgcaccgatggatgcataaatacagtatgctggtgtagctgagcttcagatatggtcatgacataaaagacccagacgtgtgtgccggccgccgccgagctaattaagttcagtggagcgtccacgtccatgcccctggcgcgtaagtacgtaccaccagatagagagggacggccggccacggtgtgaggagttaattgggaatcatttggttggttgtttcatgctttgctttggtagtactccctcagtaccatatcaaatttagatggaggctacagaacgatctaccgttccaataaaatagataacatagatatcaaattgatatcatgacatcagctgttccattgaaatgattaactgttctatagtatttctgttaaatttatttttggcttatctcatttatctaaaataagtcttttttaaaataatcagtgcattggaatttgtgaaaatagaaaatagtgattgcactagaagtagataaaataaaaaatagttgcattgagattagataaagtagggtattctagtcttttgatgtttctttagtatgtgtggcagtgagggatcgatgaaaaataaacttattttgtgacagaggtagtagctacgtaatacctttgagatggagatgacaccagcttactgaaaaaacaaccgattatgacagttaatattgtcacgcattgtcaaatacagagatcaattaaaaaaccacttaaaagaagataagctatactgatagctcaagtaggcatgcagttgagagacaccacagtgtcccaacacccaactgggcctgatttgccctggttgtatttgattgttttctcgtgcgcgggccaggcacaaaaaaaccaccgtacgacggtacaagcaagacgaaggtcggccatcacctttgatgatgatcgatacatatgggccacacccaaaagaggacaccgcacgtcaatctcgaagctacgcgccagcagaccggcaatcatatggcatcgatcagtaccgatcgattgatcgtccatcgtccagggccatggatgcgtatatccatcctaccctatatatggagttttggccctgcccttaactcggtagagaacaaatcgccgttacatgccaacagtgtcgaacagttcaggcactgtgcatgtggtgtcgcatgtagacatgcatcgtgtagtagttgtactcgtaaaaaaaaattctagcaaaatatatacttctttcgtcctaggataagtcatattaatttcatactaagtttgtttagtactccattttggaaagaagggatcaagggcgtatgtgctgggataacggtgatgaactaattttggtggttttgtcagcctctgcctccattactttggggtacagtggcgcgtacatatccttcaggctacatagttaacgcctatctgatcaacttaactgctactatagcttactcctatctaatcaacacctataaacaaatgcatgcacgtggcaactgcgcccctgcatgcgggcccaatactagttcagaacttgtctagggcttttggcctgttcgttggatgcaagctcgccagtgacatgtatctatcttgttcgatcgatgcctcgatgatcaatagttccacgatcatgatcttttcgcctttcaagtaaggatccaatgagaaagaacaatcacgtatggatagttttatgggcttctcggatggttattttcgctaagtaggccgtactataggactccatgggctgaaagttgcatctttcaattcggtctagacaaaaagaactccatcctgcagatggcggaataagtccacttgccgatcctcaactttaggtcgagtctgtatgacatccctaatccccaataccagaaatgtctactcctaaattgttcaaaaccgtgtcaagtagatcccatagcagtatgcatggatggtttcgctgacgtgacatcctagtcacaacaagagaataaaaaatatgtgggctccacatgtaagtgacccaaccacatgatattttcgtagccaatccaaatgggcaagctcttctgcgacgactctgccaccaccatcaccaaggctctccgccgctcccatgcccctgcgcgcccgttcctcacttggcccaccctgacctcgtgctgggccgctgtcatcacgctcgaggaccaacaacgtcgccccatccaccggatctgggagcatggaatcgcctggaaacccccctcccaactcttgctcccaccccctcgtcttccgccttgaccacactgaggaggtcgacgctgatgacaattgcctcttcaccgctgccaacaagcccggtgagcgtgacctcaggcacaacatcgcccgcctcttcgctgatgtctatgccgcccaaatcacacgccaaaaccagcagccacctccccaacacactcatttggtcggtgcaagaacaatggcgacggtgacgaaaaggtgctagagctctaccccaactgtgcccgtggcgagggccggccaatgcccgtgaccttgcactgccgggattctacatcgatttgtactgatggtgtcggcctcgccaccgtcgtcggccagacatcagacttgataagaaaagagaagaaagaagaggctaacatgtgggccctttttttctgtgtgttgactaggatgcccttttttctccctatagattctaaattgcatggttttgtatagtttaggggtgaagatttctgatattggagataagggatggtaaacaaactcgacataaagttgaggactgacaagtaaacttattccgcagatggccgagctcgtcttgccaatgtgtgggccgaacttggcctcacgtagctaaccatgaaggaataagtctattttatctttcttatcttttcacttcggatcgaatcgtctctctcaagtctcaactataaaactagatgtaacatctccaacaaaatttgattgtgaatagtgtataccatttacactaaaatttattattttcgtttcttgtacaagttgaatttatcttttttttttatgatttcttagatgacatccacctccgaacctacggactttaactaacgaggggatatcgtgaatagtgtataatgattattttccatggttcagtgtttttttttttacaatttgattgtgaatagtgtataccatttattatgtgttgatgacaaatgacatgacttcttggatgcttttttaataacaatgatcgctatactaactggtataatgaatatcgagttatctagtaactaatgagaaatagtaaatgcaaatacttaatatatattggatggttgtgatgaaacatggaaatgatccaatgactcctattttgtgggtgtgatgtaattctatgcatgttaagcttttagttccaattatataagatatatagacaggattcgatttgttacataagttcgggaaaagttgttttagaagatgatggcacgctatcctgtgtttctgtttacagaattcggatgggctttttagatgggcctacacttgtagtatcggttgggccgactttccttgcctttctgtgaggaaactcgcttctgctggcagctaggcaaagcttttgcctctaaccggtaaccggcacggaaactcgcccggcggccagcgcggagagccggagagccaaatcaggctcgtcttcgagggcaagcgggcaggcgttcagcgcaaccatgcatgcgcgtgcaggtggcctcgttagttcgggttgcgctaagggcaagttttatgtatatcatgtataaaatttagatatgtatgaaattagatatgatagtcatctctaccatataatccctaatatctctaacactatcacatgtttattgaagcttgtgtaggggctgccccttgcatgagaggtgactatttctttctcatccttcttctcttctccaccttactatttgggccctgtttggaatattagcccaaggctaattttgagagctaatgtttagtcatgaattggtaggctaaacattagcctagggtggtatgtttggatctatgggctaattcaaggctaaaaggtggagagagagtagaaagagaggagagagagagagagcttccccacacaaaattagccccattagcaccccttggagaggctaatgttttgaggggggctaattcactttagcctcaaattagcccacctgtttggatcattgagggctaattcagggctaaaaggtgggggctaataattagcccatggaaccaaacatggccttagtcttatgtggcatcttggggcttgtgcttggatgtccatagtacgtgccctaagagcaggtacaatagcatgctataagccagctataaatatattttaaagaggtaaaggaagatagataagagcagcgggttacagatctgtagccagctgcagcatggactccaaaacataatgtgtgtatgataggtggaaccagtattaataatatagtaatcaattattatatgaattggctattacattagctataaatgatttggagagtagtgggctatactattaaacttgctctaaggcaaccaaatgttgatggtagcgtctactagggctagtttagccacgatgggctggctaagcacgcttgctaccttaagcatgataattgaggatttgagggatccaaacttagttcatccaatctttcgttggtttctgaggaaaattgctagtcattgtacccaaatagtttcacaggagtaactacaaggtttttcgctagaattatattctttttgggaaagatggagtagttagtaacttgaagagttcttagcactgtagcatagctcctcgatgggggcatcacatccatacctactgaacggtaagtcggtagcccaatccaactactcggccggtcgctcgcccccacacgatccggcgatcggtgccccccccccccccccccggctcgcgctccagacgcggacgtgccctagtggagagcggcggggcggagccatcacgctgcggggccctgcgcgcactaagctagcgtcgcgcgcacctgggctctctggctgtgctggccgcgcgcgggctggaggcgcgtcgagactccagagcgaaagcgacccccacggtgccgcgcgccgcgcttgacttcttcccgtagccgcgcgccctctggcgaacgaagagtcagaagaagccactagtagtacagtagtactccgctggtttcgctctcgcgcgcggccgcgccgcagagcgtacggtgatgcgccatgcctccacttccaccgagagctagcggcgggaggaaggtggcgcggtgcgtggtgcgatggagacggtgcgtgcgggggtgccggccggtgcaccagcttttgtcccgtttgacactcgcgaagtcagccggttcattcgtggtctccagcgtacgagcaactgtacggtctccgttgctgcgtgctgctgcatgcatggggtgaccggctcgatcttgcacctgtaacaaatcggcgacagggggcaatggatttgttaggtggtttaccgtcaatccaaaaatcagcgattgaataccactactacttactactagtatgatagtatcgcactactagctgggagggaattaaccacaatatagagcagttggacggtttgtacgatgagacgatgatgtgttttcgtcaaagaagacattcttgcgagtcgggtcatatacgcggatcgtggtctgatttgacctcaccggcagctgcgcaatttcttactacctccgtctcaaaataagtgcagtcgggaatatccgtgcccaatgtttaaccgtccgtcttatttaaaaaaattatgaaaatttttaaaatatttagtcacacataaagtactattcatgttttatcatctaatagcaataaaaatactaatcataaaaaaatttcaaataagacgaacggttaaacgttgaacgtgaatagtgtaaaactacacttattttaggacggagggaataatttgttactcttacgtcgcttgttaggactaccgatcggtagatcaaaaacgggactggatgcggaagtggagatggtgaagatgtgaggtcaggacggtgacagttgaagacgcggtccgatccggtgttgaaatttggagcattctgtcgggcgatgactcgttggcttctagcgaccaaccgaatggtggagtgctgagattaattaaaacaaggaatatgttcttctctagattgcgaatccacggtgacttgaatggtaaacaaacaaaatacgcaccattagccactctcgtggacatttgattcgtcatatacttttacaattgacagttccattaatgaagtctgaatatagtgcgcacaatttctcctgtaaattcagaacgtttgcatcttactttttccaaggaaaaaaagaggaatatttctcctgcatcctctccatgtttggaacaactcctttttttttttaaaaaaaactctagttatattcatgaagtctgaatatagtgcgcacaattttcacttatcttctgtaaattcagaacgtttgcatcttactttttccaaggaaaaaaaaggagaggaatgtttgtcctgcatcttctccatgtttgagacagttccttcgaaaaaaactcccacatgctactcaagtacttaatttgaaaggaaaatactctaatagtgaatatgtttacagaaatggttggtgctgctttgatcttttctacccgttttcatcagatcatcagacttctcctaactaccgctaaaactgctgattgctgaaaagttggtttcagaaatgaggtcgctcaaagctatatagttgattgagccatcaccattttgtccttgttaaccagcttcggtgcccctctaccgctctggtcataagcccatcatcatactttcactaattaatcccctcacctttgcaaccgcacgcacgcatgtgagttcattcttgagcctgttcaataacttcaactactcgttcagattcagattaggctgattggtgcaactagacaccgagtcatgacctctactttctactgctactttccagtttccactaggaacattccgcatgtctaaaagcatagtttctctcttttgttttcgcagaggatgcaatccgacttatcgcgcaaatccacccaggcacggcaaataaggtctttttccaaacattctcctttcccaatgatcggacgtcattgtgccttgctgctgcttccctgttgttttgtgcggtaaacgcagcttcctgaactcaactgaaagctcctaatctcctatacgaaacagtggcgcttatgtatcttcagatcgaccaacttgcccttcggcgctcgaccatcacgtcggaccaaacgccgattttatagccgggaaatccattgtcatcttcccagttcgctcgtcctcccactactagcttgctccagaacatccaatattcctcctatcgccacaacccacgcaatctcccaaccagttagagacaagatcaaaagggaaagcaagacaaaacggtagggggagaggacgcatgccgcatgcgatcgaatgtcaaaaataaataaatattgtttaagagacgcttgtaaagatatgaggatggtggctgcgcctgcgcgatgcaagtgacaggataataaaattttggaggccgtcggattgaaagctgcagttggcctgcctggaaccgaaaggcgagggggaggcatggatcatggaattccatattccattcccgcggatcggacagagatgttggattcttgcgatgggagcatcgatccactgaggctcagagatcaggccagccatcgtcaggtgcagggtgctgtggagtggaagcgtgcagtccacgactaattgccgcgcggacttgacatcagatgggacccgtccccatgttgttcgtattacagtatactcttggtttgttcctggattgatttgtcgctgaagcttgtttttgacagtggtaaagcatagtgagatgaggaccaagcacagggcatccatgcattacttcagtactgacgggtacagcaaagtcgtctagtaaaagtcgttgcctagagcatctctaatagattggctattttcagctctccaaatgctcatttggccagttatctaaaaaattggagagttaaatttgccttttactccaactgtctctccattcacattctccaatttaacatcgggtcccacatatcagtctctcattcctcctccttcctctcctttcttctcccgttgatggcgcagaggacggcagcaatcgtggccagtgacggcgcggagggcagcggtcgcggctggcgacggcgcggaggaaggcagcggttgtggccggcgacggcacagagggctgcggtggcagccgacgatggcgtggagggctgcggtggcagccggcgatggcgcggaggagggcggcggtcgtggccggtgacggcgcggagggcggtggtcgcgcctggccggcccccatctgccgccatttgggctcatcgccgccatacaccgccgctcgggctctgtccccatccgccaccaccacctgccgccgccgccgccactcaggttcatcgccaccatccgggctcgttgccgccatcctctaccgctcgggctccgtccccatccgtagcagtcgtcgccggtggtagtgcgcagatggcgtgggagccggctcgagtaggtagtacgggtgagagaaaaagcatctctaacgtggggcccatgaatggctaggcaatttgggctagccaaatatggccattgaggggaggagtttggccggtcatttggctcagccattctagtagagaggttgttggagtgatattttttactaaaatggctaaattttaacttgaagagtctgttggagatactctaagtggaattgagaacatggcacgcttggatttgcatcaaacatgtgactgcaatataagggcctctttagttcccaaacataatttttcacgctgtcacatcgaatatttagatacatgaataaagtattaaatgtacaaaaaataacaattacacagttcgtcaggaaattacgagacaaatcttttaagcctaattacgccatgatttgacaatgtggtgctacagtaaatatttgctaatgatggattaattaggcttaataaattcatcacacagtttcctagcggaatttgtaatttgttttgttattaaactacgtttaatactttaaatgtatgtgtgtccgtatatccgatgtgacatgcaggggcaaagttttttttgacaactaaacaagccctaaggttttgttcggcatcaaggtttgagagctaattctttatgcacgtaacacggagcgacacattagcatatgattaattaaatattagctaaaaacttaaaaaatgattcatcggattttttaaagcatcgtccagttaggtgtttgcgttgaaatgtgtcccgtgtcggagcaatgccaagcacccacttacaacccatagcaattcacaaaaacgtgcatctataggaatgttgaaagttcccatttatcggatgttaaggtaaacaatactccttccatccaaaaatatagctacattttggaaccgatagagtagggggtatcgattctaactgaatgattagacagattatagacagaagaaatcacttctctcttataaacgagtacattacaatttcggtcaaggttttttaacaatagtttaattttggactacctctaatataatgttttcaattatacgagctatgtttacctagtttgcactttggaccacccactctcaaattctctcttctcctctagttctccattgtatcagcgctaccgccgatgacccctccacccgctgctcgatcctaccagcggccgtggttgcactcgatcctacccgctgctcgatcctaccattgtaattttgcatggagctaggtttttagaaagagaatttaatttgctatgtacgacttttgtctttgtttgatatataaatacgatttttttagataatgggttaaaccggactctacacccaaagaatatacacagcctaaatatataaatacgattaaatttgtatattaccagtgtcgatcaatctttatcgtggtaatatgaacttggcaagataaaatgtgcacgcatttcatttgtttgtttaacgtggtaacctttaagcctcgagcaaacgtagcggctcattttcaccttctctcaaaagaataaattagctggccagtatagacaaagataatgctaaattggacaataattagccagacaggcagacaacccaagtccaagctaggtacacacgctgatggttcctgttgtatcagtcatcacacaaactccaacctgtggagttagatgacatgcgattggactgtctactttgcacttgcccccctccccaattgacacctcccaactattggagttggagatgctcaagcataactatttcaaaacactgttatatccacgtacccatccgttcttaaaaaaaaatcaaactctagaataaattaatctaaacacattttagagtttgattttttctgagacggagggagtaaaacgttgatactcccaccagccagctcaccttcgtaccatattaagttcatttttaagtctcttatatttgtttcaaaataagtttatttttaagtaatcattgcattgtagtgaaagtatacaataattgtacaatgagtaaataaagtgaggaataattttttttaataatggaataaaactgctcaagatctacatccagttattacaaagttcacaaaaaacaaactcacacagtgagtatgtagctaaagtaacaaaatcaaaaataaaaccaaactaataaaaaccaagcaagataaaaaccccacaactactgaattctattggtgaatctccacccgaagttagcaaagagctgcatgatcgttgactcaagtttacgacaagcatattttattagcttgatatgagcatcatgcatttgtagttgagctcattccggagtcaatatgttgcattgaaaagaacctgcacattagattttgaaggtgatctatcaaaaaccatttcatttctactaagtcagagagcccaacatagaacggaagctccaacaagaataagtttcttgatctttttattaacacccacaagccaattcctaaagatatgagatatattaggattacattgggatttgataaaataggagtgttctattttttttgttttgtattggtaggtgtgggatgaatgaaaaatgaatttattttgatggtaggtagcagtaccatcttgaactgtacaatacaaaccgaatgaatccatggtaataaagttgatatgaatctctgtaaaaactcatgtgggcatcgcgtccggcctctcgtgcagcggttgttgcggagcagcgtatggacatggacatgagggaacccccagccatcagcagcgagtagcccactaaaccgcggcgcagcagctgcaacgcagttgatgggacgcaagaaagccgccctagtacaggctaccgtgccatgcagaaacgccttctctagagcgcgagaggaggagacagcgagagcgaggaagaggacaggtccattaatctgcaaagtggaaatcagggccctctgtgctctgttccttgtcacccggaatgcccctacaacctcctagctacacctactgtcccatgttcgtgatcattttagcatgttactttcatgacctttttttttcgaaaaccactttcatgattataaatttgaacacaagtacttagtattggtcactactcacagtgatcaaactgtcattgatcatgtgttcatacaggtcgtcctgatcaagtttgttgaagacttgcaatagaaaagaaacgcagctgcagacttgcagtacttgttggactttgagaggagtctgaaaatgggactggctaattaagctggacttcctaggtcagccaagtggtaagcgagcaccagcggctcagcgcaagtgtcattatcaattggaacacccctggggccatacggatttcagagcaattttcaacagatttagtaatgattgcttggcctaaccaattccatgcttaggcaagtgaggatggaaactgctacatttaatgacgaaaatgatagctctagctagcaggcagaggagagccggtcctaaatcctaatgaaaggcggtgagtaatcggctgcaactttattcctattctcttcatactttttaccaccttttgactaaacttacacaagtaggcacttaaggtatcgaggaagatgattactccgggaaaaaaaaggtggtatttatttttcctcttcttctgccttctaagaaaagtaccagcagcgtggaaaatagactagaaactcctgtacttgtttctgcaccaccacttcacattgttccattgtttggcttaaactgagaccccctctgaaaaaagagaggacaaaatcatatacggctttccagaaaaatgttctaccaacacccgttttccgctaccattaagggccacttgcatcgtcaattgttggactgatctagtcagctccaggcgaaaatccgcgacattcttttcccacgcgccgacgcgctagctgctgtccacatcgcatcgcatcgcatcgcaaaaacccctggaaatccgttccggcgtcgtgtgcgccagcaggaggaaaactccaagcgaggagcgcggccgcacgcgcgtgcgcgagagagaacaaatccgtcggatttcacctttgcgaaagcgaacaaaaagaggaaggaagcagcccggggagaatgggacagaagaagagcgcgcggaagcgagcgagcatggaaacctcgtttcccttttcctgcttgggcagcagaataattaacgtagctgggaaaccattttttttcaccctttctggtcatcgctcgcgcgctgccgctgcgaacacagttggtgattgagtgggggcacgcgacggcgacggcgatcaagcgagaagagagaaccaggacacaccatcatgctgccgagcgtactcatcaatcatcatgcgtgcgtcccgcgctgcccccctctccgcccggccagccggcccagccaccgtcaccgcagccggcccggccggggccgatcgccaagaggcgcggcgcgcgcgtccgccgtccggggcgcactagcgagtgtgggtcggctggggccgctggggcaaggccaagcggcagagagagggcggcagctagctaagctagcgacgcgagcgcgcggcgtgcctcccgttgtcggagcggagggccccggtggagcagcacccgcgggcaacgtggcagcgcgcggtggggcagggaatccactaccgcgggtggtggtggatcaccggtactgtacttgtgtgcccgtgccgtgcgactcctcgagacgcctctgtgtgcctggctgcctcgcacgccttttcttctttctgcctgtacaggcgagagaacgagctgtgtacgctcaccggccggccggccagccggagcgaaccaacatcattcgcgatgcgtgggtgggatgatgagtctcctacaagtatgcaccaacctgggaatcgactggtcgagcgagccgagtagactggctgcatgcatgctcgtgacatgatgaccccgacacgcaggtggtgtggactagaagcttaaggctgcgtttagatctaaagtttggatctaaactttagtcattttctatcacatcgatctaccatacacatacaacttttcaatcacatcatctccaatttcaaccaaaatctaaactttatgctgaactaaacacagcctaataatacacgtatctcggctcgctggctaagtacgtatgagtatcaccaattgagcctattttggactagaagcttaataatacatgtatcttggctcgctggctaagtacgtatgagtatcaccaattgagcctattttgggactagaaacctaagagcatcgaggtcgctatatagccaggtgcgctaaagaaaaatgaccatacgtagagagtggtgagcactgagcagtgccaacgtagtataacggtgtaacttgtatatctggcggcagctaagaccgagtacacacacgacgaaaccgaaatggaaacagaaacgtgctaatgacagggatgcaagggggttcggtaaacaaattggcgaattttggcaggttcttgtctatacatatgtacgcatgcataatgactcctaggcgctacacatttcctacactacttgagaactaatctttaccgggttggccaaaaaacacattagtctcggttcctattctaaccggtaattaacaactttttttgttctggtttaaaactaccacggaacttagatgatctttagtcccggttagtaacaccaatcgggactaaagatcatttttagtcccgttcacaaacatgtgagtacaccattatctttagtcccggttggcggactaatgatccatatttagtccggttggttataccaaccgggaccaagattaaaaaaaaatcgcggcttccccgaaccgcacgctgcctgctctcacagactcgcagtctcgatcgtatctcctcccctctcctctcctcccccttccttcaatccccttcctctccccattttctctcctcccccttcctccccttcccggcttcccctcacctacgggcggcgcacgaggctgcggccgcgcaggcggatgtggccgcggtgggccgacggaaggggccgcggcggcgggctgcggacgctgcagcggcggcggctgggcgccggctgagcggcggcccggtggaagtcgggaggccaggaggccgtgcacggctggcggatttgtggattttttttttgatttgtagatgttgtaaatttttttagttcgtggataattttgtgaatgatttgtggattgtggatgggtatgtattgtggatgattttgttgtgcatgatctgtaacaatggaaaaaaagagaaaaaaaactttagtcccggttcttttaacctatagtcctggattggacgtgctggtttacgacccaagattaaaggtgttgtaaaccgggagtaaagagcctttttccacagtgctagtacgtcttatagcagctccagtatgcaaagaaattgaactgtgagccaaaaatattgaacacaacacacattggagtcgattgttgtgtgtcaaatagcaaaatcaacaacaaacatgaatcaatgctagacaaataaatactatttcttgcaaatgggattgaacgtacatatccaaatcgagtcacgcaatttacaatttcctctctacttcatttactgtatgtgggtcccataaatctatgcaaatgctgcagccaccaaacaaagttacattcgccattcatcaactgtagtagtcgaacacacactggggttgctcttagagcatctccaacagcctctccgaatacccattcaaccagcttgccagttgaatagagaatcaattttgttttcactccaacaacctctccatttttgtagtggaacccacacgccagctcctctccctccttcctcacttctctccacagcttggagagttcaagtccccacccactaccggcacaccggcgataattgaagggggaggcagtcaatggcaacgatggaggcggggcagtcgcaccggagagggagcaattcggcaaggatggcgagctcgggttccatcccggtcagctgtcgccgttcaggacgacagggctgtggacggcggtgttgtgcaaccgcggaagacggccacagcggtccggggccgcactggagggatgacggcgcaacgcatggtgtcatagcggagggaccacagcggtggtgcgcgcttttggagccgacagcgctcgatctaaggacgacgacgtggaagaaaacaaggcgcagcagaaggacagtgccagccatgcacttgatctggggagggggagggagtacgggaaagaagaaagagaaaaatgtgtggggcccacaattagctaggcaacttgggctagccaacttaatttggccaacgcatggaggagtttggccccggctggccatccggttggcaagtctattggagtgcatttttttctatccaaaattgcgaaaatttaacttggaggtgagatagccactctgttggagatgctcttatcttatagattcataataacccataattactaaaataggctccacctactatgcataaggaaatagagagatttgtgcaatgtatatgacatatccaactctataatgagacccacacccatgaccatcaaaatgaattcatggcatacttgtaaaataaatactgttttttatttaagatacctggtctcaagggaagagccctttactatacttgagacctgtgttcgcaatgtatagagcctttgctaccgtgaaaagattctcttagtgccccttctaattcccacattgcagatgctcttaggacaatcttaacccatgaagcatccaagaatttttcatacttattatgtcatatagacactacgtatagaaactatggctcaattggtggtttcttcaacatagattttcatccaatgatgtcttctctctctctccatccacatatccccttattttctttcttggtttctatgtagatccagtttcttgcatgagaaatggattattcatcttttttcctctctccacattaactctcttgccatatcagaaatttttttaagtggcagtgtatttaatgctatggaaactagctaaggtggaggtttgggactgtctaagagtaggccatgcctctttgctagagattgtccacgcatgcacgtaccaggatgaattggcacgagtgtttcaacatgtgcatcgaacttccatataacgtgcgctgtgcatacaattactttggtaggcttgtacaacatgtttattactttctccatccaaaaataaatcaatttttatacatggatcttaacatagtcttttacatagtgtaattattttataactaattaactgtagctcttctatataacttatgcacactagagagttcatgatttctacatgtttatatgatacagctacatggttactaaaatttaaagaatttaatctaatattcgatatacaatataagaactttatatctatatgtttatgtgtttatgtcagaagccacaataaagtgttttatgctttgattactatttgtggccttaatcgtagtgtaactatattcaacaatactattcattttcgttttcatatctaaggtattcgttcctttttttaatatatctgaaccatttgaatccttatatgaaagcgaccacatgcgctttgcctccttctcaccatttgctattgttgaagcacctagatgtcaatatgttcctctcccatcccttacccacaaggctacaatccatacatcaagaaaaagttgctcctagttgaattatatcttctttgtttaattaagctcaactcctaaagtctagaagtaatcttgccaaattacaaccctatctttagacacatgtgagatgagcgaccatacatgacctcaaaatattaggggccccttgtgtgcttcattatatgccaatgcgttctgatatgtttatagcgatctcttcggtctctttttttttatctttatgctgcactaatttggtcggaataatttttttctcagcttcaacgagtgttcaatgataattggttatctctaagaacgtacttcatgatgatgacgtggatgtgtgttgcaaacaatatatttctatttttttcacttaataagaaaaactaatttgatagtgattctttttctacttaagccaaatcgtcattagatggataagtaaggtctcatcttgtattttgcatcgggccaagatagatagggatggctgctaaattgaggtaagtttgccctttttcaattgtttatatacatccagttctacatacaaatgtacactagtaattaagttagcaaaaatctgttattctacccgtgatgttaaaaacccgttattctatatttctacccatgatgtaattctgactgcgctctctttccacaagtttttttctgaccctgcccctgttgctgctcccaccgttcatttccaaggacaatgtccaacggatcccactccgattgaaatctctgagtctcatatgggcccatatatcccatctcccggttactgttcaagtttaacacgacgatggtagtacaaccaccttcggtgtgggcatatgcactgcaatcagagaagaattacacgagccacaactgtacactgaaaacaaagaggctggtgccctgtcgcacaacaagaaaaggcacagccgctgaggtgggggagaagtagaagaagaagaaagaaagaaaaaaaatggaaaacggaaaaaaggtgacaccgcacagtgacgcccccatggaattataaaaagatggccgcggttggccgcacgtgccgcgccgtcctacgcacgcgcgacgcgagagcccccacaaaccgccattcccagggcttccaccggtggctttcctcctcttttcttcggaatccctgaccgaacgagcatccatccatccattcactcggtcgcatacccctgataataatactcgcgtgtgccctgtgcttgagcaagaagaacatcatcatcatcagcggccgagcttaatttgacagaaatatagtatatagcgcttcaaagttttggagtagtagctcatctcgtctctgccgagtttctggtagagctggaggagcggaggagtagtagcgaaatatatataataaaagaatccactagcagcttggctatttcagcaaaacgtatgtgggtagagagagagagagagaggagggtgcagagatagggaggaggcataattccactcactgccccaaccacaggacattctcttctctctctcccttctgctcaagaaatccaccagctgctgcatcaggaggtggagctcgctcgtcgtcttcgtcttcgttgcgcttcgtctcctcaggtgcccggaggagcaagaattgttgggggggcagcgaggtagacgcagttggagagccctcttgcatggatgcagcccactggcaccaggtaaaaatcgctttgcaaagatcgatcgatcgattgattctgcatctgtcagaatttcgctcttgtgcttcttcttcttcttcctgatcttgttgctgttcatcttcctttctgcgccttgttctcggtgcatatgcttttctttttttttcttctgattgtctgcctctcggaagatgttcttcgctttatatgccaacccttattctttgtgtagatctatgcttcagtattcatcatcatcagtagcacacacacgcttctctctccctcctccataggctttgaggggggggggggggtgaggccctttgtggctttaatccctctcccttttgatccttgaaagcagcacacacacacacaccatcgcctttcttctttctaatccccccctttcctcatcttcttttctcatagcttttctccttcttttcttctgtctccttgccgcttgcatcaaaagagtagccatgtccccggtgatgtgtagtagcagcagcagcaggagcagctgtggtactactactgcgcgcaaccctacaacagcacaaacaaagttgtgttttgtgtggtggtgtgtttctctttcatcttttctttccttcctttcgcttatcaccttttcctttcctctcccccctttaccagtttcacctttcctcccccctctaatctgcctttgtatccttttgcttggttcttagttgcaccataaagattctaaacaccctgcttgctgccatggctagctctctctctgtcactgcataaccacatgccatttgtgctcgcttgttcttgcgagcttgttgctgtagtagtagttggtgtgaagttagcaaggtgtttgtttgatctttgatcgtttgtgttctaatggagtgctgcaccatgtgtgtaccatcaggggctagggctggtgaagcccatggaggagatgctgatggcagcgaacgcggccgccggcgcgaatccgaatccggcggcgacggcgccgtcgtcggtgactgggggcgcactgaggggcggcggcggcggcggcgcgccgccggtggcaggtggcgcgggggcgggtagcacggagcggcgggcgcggccgcagaaggagaaggcgctcaactgcccgcggtgcaactcgacgaacaccaagttctgctactacaacaactacagcctccagcagccgcgctacttctgcaagacgtgccggcgctactggacggagggcggctcgctccgcaacgtccccgtcggcggcggctcgcgcaagaacaagcgctcgtcgtcgtcggcggcatcggcgtcgcccgcgtccgcctccacggcgaattccgtcgtcacgagcgcgtccatgtccatgtccatggccagcacgggcggcggggcgtccaagaacccgaagctggtccacgagggcgcgcaggacttgaacctggcgttcccgcaccacggcgggctgcaggcgccgggggagttcccggcgttcccgagcctggagagcagcagcgtgtgcaaccccggtggcccaatggggaccaacggccggggcggcggcgcgctctccgcgatggagctgctccgaagcaccggctgctacatgccgctgcaggtgccgatgcagatgccagcggagtacgccacgccggggttcgcgctcggtgagttccgcgcgccgccgccgccgccacagtcgtcccagagcttgctcgggttctcgttggacgcgcacggctcggtgggcgggccatccgccgcggggttcggctccagcgcggggttgcaaggcgtgccggagagcacgggcaggttgctgttcccgttcgaggacttgaagccgacggtcagctctggcactggcggtggaggcgcaagcggcggcggcgccggcgtagacggcggccatcagtttgatcacggcaaggagcagcaggccggtggcggaggcggcggcccaggcgggcacgacacgccggggttctggaacggcatgatcggcggcggcagtggcacttcttggtaatgcggcggcggcggccatgcatgcatgcatggctcatgcaaaagcctccgcgctgtggtggcgtgggttcaaattggagataggcagtagagacgacgagggttttaataagaggttggcattggcgataatccatcactgattcactgttactccgtataaggtgttttgatctctcttcttcttctttcccggtgttgcatcatcatcttggtgttctttcttctcccttttgctgtctttcatgtgattgttgatcggctttggtgctcaacacaacaaccgagctcacatgattcctcaaaaggatcatgatgcatgatcgatctctttctgaattctgatcttccagttctctccattgatcactgttactactagtcatcgcttgatcgatgtgtggttagagagctgcatgcgtcagtgcagtactagactagtagagcatgggaagcttctttttaggctggcttcgagtccgatggcgtgtacgtacgtggtacacaggcatgcatgtggtgtgtagctcattggttttgcaggggcattgtgaagcgaaggatgaagggaaggactcggttggggaggaagaaagaaaaatggacccccatcaccatgcatgtatgtcaaacttagctacagtatgtttggtaacggcaatgca

SEQ ID NO: 21274 - DNA, 1669 bp, Oryza sativa
ccgctgggtcatatcgacctcccggtcaccttcggggttccgccaacttctgcacggagcgggtggacttcgatgtggcggacctcagtctgccctacaacgcggtcctggggaggcccgcgttggtgaagttcatggcggcggtccactacgcctatctccagatgaagatgccgggccccggtggccccatcaccgtccatggcgacctcaaagtcacgcttgcttgtatggagcagcgcgcggaccaccttgccgcggcgtacaagcccgcgggtggcgacgagaggctcagcacctccgtcccggccgccccaaggcagcggatggtcacgtgcgatgaggtctcggtcaaggaggttgccctgggcgacggcccgtccaagaccacacgaatcggtggtcttttggacgacaaataggaagacgcgctcgtctccttactgcgggcaaacaccgacgtcttcgcctggagaccggcggacatgcccgaggtccccagggaggtgattgagcaccgtctcgccgtgcagctgggcgcaaggccggtccggcagaaagtgcggcggcaggccccggaacgtcaagccttcatccgcgaggaggtggcgcgacttctggaggccggattcatccgtgaggtcatccatccggagtggctggcgaacccggtcgtcgttcccaaggcgaacggcaagcttcggatgtgcatcgactacaccgaccttaacaaggcatgtcctaaggacccttaccccctgccacgcatagatcagattgtcgactccaccgcggggtgcgaccttttgtgttttctagatgcatactctagttatcatcagattcgcatggctagggaggatgaggaaaaaactgcattcattacccctataggaacttattgttatacgacaatgcctttcgggttaaagaatgcaggtcctacttttcaacgtactactcgaatttctttgggtagccagataggacgcaatgttgaggcctatgttgatgacttggttgtgaagacgcgcaaccaagagaccttactctcggatctagcggaaactttcaaaagtctccgctccgcccgcataaagctgaaccccgataagtgcgtgttcggcgtgcctgcgggcaagcttctcgggttcttggtctctgcccgaggcatcgaggccaaccccgagaagatacgagctatagagcggatgcacccccccagcatgcttagggatgtgcagtgcgtcaccggctgcatggccgccctaagtcggttcatatcgaggctgggagagaaggcactacccctatttaagctcctcaaacgctccgggccgtttacctggacggaggaggctgagcgggccttcactcagttgaaggcgtacctcagttctcccccagtcctggtcgccccggagccagatgagccgttgctactctacctggcggcaaccccgcaggtggtcagcgcggcgttggtcgtggagcgcgacaaggacaaccctcactccgcgcatccccaccctgtgtcgactcgacccgggagagagcagggaggagaggcccccgagccgaacggcggcccaggccctcgacggccggagctggccctccgcctgcttgtccgacggtgccaggtgcccccgacccccaggatggcccc

SEQ ID NO: 21275 - DNA, 7093 bp, Oryza sativa
gataccctcaggcccagaagatgctttacgctattctgatggcttcgaggaagttgcgccattatttccaggcgcatcgggtcacggtggttacgtcttaccccctcggccaaatcttgcataaccgagagggtactggacgggtggtgagatgggcaatcgaactctctgaattcgatttgcgctttgaaccacgccacgcgatcaagagccaggccctcgccgactttgtggcggagtggaccccagctcccgagcccgtctccgcccccaaggccagctcgggcccctcgcagctgcctcacaccgcctactgggtgatgcagttcgacggctccctgtctctttagggcgccggtgcgggggtcacgttgacctcgccgagcggagacgtcctcagatacctggtccgcctcgactttcgggcgaccaacaatatggcggagtacgagggactccttgcgggactcagagtggcagctggactggggatccgccgcctcctggtgtttggcgactcccagttggtcgttaaccaggtctgtaaggagtaccagtgctctgacccgcagatggacgcttacgtgcgccaggtgcggcgtatggagcgccatttcgacgggatagagcttcggcacgtgcccagacgggataacacggtcgccgacgaactctcaaggctcgcttcctcgcgagcccagaccccaccgggcgcctttgaagaaaggcttgcccagccgtcggcgcgacccgaccccctaggagagacggacgcgcctgaacggcccccgaggcccgtcggagtccaggcctcgggacccgaggggagcgctcccagctcccctagattgattgcttggatcactgagatccaggcgtacctcgcagataagactctacccgaggaccgcgaagggagtgaacgcgtccggcgcatctccaagcgctacgtgctggtggaagggaccctctatcggcgcgcggctaacggagtcctcctgaagtgcattcctcgggaacaaggcgtcgagcttctcgccgatatccatgaaggcgagtgcggagcccactccgtctcacgcaccttggttggcaaggcctttcgccagggtttctattggccgacggctctcaacgatgcggtcgacctggtccggcggtgcagggcgtgccagtttcatgccaggcaaacccatcagccgacccaggccctgcagaccatacctctttcgtggccgtttgctgtctgggggctcgatatcctgggtccgttcaggcgggccccgggcgggttcgagtatctgtatgtcgctgtcgacaagttcactaagtggcccgaggcttatccggtcatcaaaatcgataagcactccgcacttaaattcatcaggggcatcactgctcggtttggggtgcctaatcgtatcattacagataacggcacccagttcactagtgagctcttcggtgactactgcgaagacatgggcatcaagctctgcttcgcctcccccgcccaccccagaagcaatggccaagtggagcgcgccaatgcggaaatcctcaagggcctcaaaaccaagaccttcaacatcctcaagaagcacggcgactcgtggatcgaggagctgccagcggtgctctgggcgaaccgaaccacgccaagccgagcaaccggggaaacgcctttcttcctcgtctacggcgcggaggcggtcctcccatctgagctcaccctgaggtcccctcgggtcaccatgtattgcgaggctgatcaagatcagcttcgccgagacgacctcgactatttggaagagcgaagacggcgcgcggccctccgagccgcgcgctaccagcagagcctgcggcgctaccatcagcgccacgtccgggcccgatcactctgcgtcgacgacctcgtcctacgccgcgtccaaacgcgtgctggactgagcaagctctcaccaatgtgggagggtccgtatcgagtaatcggcgtcccccagccgggctccgttcggctggccacgggcgacggcacagagctgcctaacccgtggaacatcgaacaccttcgtcgcttctacccctagtgggggtcgggtgtcatgtctcgagctcgggccaaccccgcacccccccccccccgggcgtgcagggttggccgggggctaccacatgcatatacttaccttttttctcttccgtatttcaataaaagcattttcgatttcctgaggactgtgtctgtgccatcgtttccttttgaagaatcttggcttgaattagcacgctcgtgctcgaccctgccctcggcggcccgggccggctaaaatcgccaaacggggcccagaaccgagccgtgccccggggcgtggtgaactccgggggggaatcagcaaaggcccacaatcgggtcatccataaccctcggtcaccgcgctcccggcctggccagtctcgacacgaggatctccccaggcactagccccgacccgcgccgtttgaggctgggacctgggcacgagcccttgttcaagctaagacacagaaggaccgcggcacagaccatcctcgtctcatacacgcaacaaacagaactgacgcagaaatttcctctttacttgattgcagattaagtcagtctatacaagaagggggcccgaaggcctcggaagaagaaggaaaagttattaagattggcgggggcctgggggctcactccgacgcgcccgggtcgccggcctcgtcgtcgctgtcgtccgcaccgtcgtcaccgccctcctcatcggagtcgagcgcgaacgcgagccgaggggccgtaccctcgaagctgtggacgatgtggtcggcggcgtcccggacctgcgcacgcgcgccgtcctcggttccgggagggaactcttccagcgctgcccacggggagaagtcagggtccctggcctggtagcttgccagtacgagctccaccgccccccgggcgaggtccctcgaggatgacctgatcgtctcctcgagctcctcggggagccgctcgagggccccggccatctctgagaggcgctgggcgaggcccccctgattggcggcgtacttcgtgtaccgcccgccccagaggcctgcctgccgcccggcgcattctagacgggagacggcgtcccgaagcatgccgggccctacctcgctcgccaagcggagggcctcgacctccccggcggacgagtccagcgcgccctgcagctcggcgatggtgtgttcggcggctgcgaggcgggcggctaggtcgccgtggcccgcggccgccccgctgctgtgcgctctcgcgtccagctccttcgcccgtgcctcgagctcagcggcccgctgatccagtacggccctctcggcgcgggtgccttccagattgcggcgcgcctgctcctcccgcgctgcctcgcgaaggaacaggctgtccgccagccgctgcgccgcggcctcggcctcctcgagagcttgcccccgctcggtgagcgcgtcctcgcggaggcggagtgcggactcctcttcggcgcaggcggcctcgtgcgccgccagtgttgcctcccaggtggcgacggcggcctcgcggtccgccaggtctctctccttcgcgtccagggcgcgggcgcgctcctccagcgccgtggcgcgagcctcaagggcctcttcgcgctgccgggacgccgcctcgttctccgccgcccgccgttcccgggcaacggcggcgtcaaggactccctgggcggcgtcgagcttctcctctagctccgccgcccggctcccgtattggaggcggaggtcgtcccgcgcctcgtcgagcacggcggtggcgatgagggcagtctcctgctcctcctccacctccctggcgatctccgccaggtccctacgacgggcctcgagctgtgaggcgtgccggcggtgtgcctacggcccgcctccaccatggcctccaccgagcgccgcccctcctcgacgcgcgcccacgccgcgtcgagctccgcccgctccgcctgcagggcctccatctgggcacttaacccgtccagcaccgtgctgttcgcggcggccaaggcctgcaggaggggctccacgctcagtggggcagcggaagacagaggggagagccgcctcggggtgggtgccgcgcggctcggcccgccgatcgacgtgccggactcgggggcgtcccccgaagctggctcgtcccaagcgtcgcccgaggggtcaggcccgagcggcgcgcccgcggcctcgtcgtgggtggcctcggaagtcgtcgtcgcctcgggcggagtcgggtcgggggtttggcaggccgcctggcgtgcgcgcgccgcctctgcctcccggacggactccccggcccggcggagtctggcctcctcccgagcggcctcctcagcctggcgaacccggacggcctcctgggcagcctcctcggcttcccggaggcggtccgcggcttctcgccggttagcttcccgcctccgggcctccgcggtcgccgtctcctcggcctcagcccggccggacttggaatggcggggggggcgcgacgggatctcgctgaggcagaagaaaaaccagaagacaaaaagaaacgggtgagtgaaaactcgccttgggagatgggagaatgaatacggccgcggtgggcgcggggacgaacctgcggggaggtcggctaaacgaccacctcgggggcgagatgaggttcccccggcatggcacgatcccccccatcttgcggggccgtttcttctttcgctccccctcgggctgcggcgtcggcacggcaccctccaggcgcctgctgctggcacgcaccgccccgccccctcggggaggagatggaggaggggtaccctcctgcttcctcttcccccaggcgtcggcagggcggttgccccccgggcccccgtcgcggggcccagaagcacgaccccctcccggggtagattgttcccccctgcgactcccgcccgcgccatcgtggcctcggggggcccgctcccccgatgccccgaccacctgcatgatggtcaggatcttggcgcgctctggatcgcagcagagggggaggaccccttgggggatgagggatgcctccacggagctgagattcagcacccgttggaccaccatcctgaagtcctcagggtcccagtcccatttgcgcccctggtgggtcctcatgtagtcctcgggcccggtgtactcccaagcgccccgggcgcgccgctggagcggcgcgatccggcgacgaaggtagtcgccgaacaccatggcccccgtgagcccctgggatcgcagacccgccaggcggtcaagaacggcgtcgtagccgtctcccagatctaccgccgcccgccagctggaggcctgcgccgggggctggctcggaagacggaggcgcgcttcgtcggcgaggggggtgtagaaccaatcgctcttccagtcgtcccactttttgcggaggacgcagggaatgtagcggttcagcacctgcccccgcggctggaagtagcagccaccgactaccgtcggcggcgacaccggctgtacggtgaagaaccaccggaacagccggagagatgggcgcaccccgataaacatctcgcacaggtgcgcgaagatggccaacgtcattatcgcgttgggggtgaggtgcgccatctggagatcataaaactccagaatatccatgaaaaaaatagagaatggcgggaccagccccgccattgcgaaagagaggaagaagacggaccgccccgggtagtgtggcaccgggcgtccctcgcccagcgcgaccacctcccggccggtggcagattccggcatgaatcggcgcggcagcccggcctgcctctcgctcacgatgcgggaaggcggcagcacgctaccgtcgagcggtgcggagccccgtgccatgacgccggcggaggaggagcttgagagcgagcgagtgcggcaagggtagggcacaggaaacgaagagttagagcacaagtggcgaaggtaaggggaagagtggcgagaggaaagaaacgaatcccttcctcggcgtctttacacccttgccaacgctatgcccggctcctcgcttcccgcgcccactacctcgccccctcgtttctcgcgcccacgcctccactaaccccactcgcccgtttgcggcgcacgcggcagatgtgcggccgtggcggttgagatggggcagattgtgcgcgcattaactacgatcgccaaccgtgaaaagcgccatcatcatgtctccaggcgaaacgaaccggctcgtcccgattcgcgcgctgctcgagtaatgtagcggtcttaaagaggccgctcattattgtcggtcggttttcccttgccgatgcgcgcgatttgcgaccgctgggtttctgcccgcctgtagggaccggccccacctgtcaccgggcctaaggagtggcgtcacgctcgagcgcttccctcgaggggggcgatcgccctggcgtaacgccgggggctactgtcggtgacatggggccgggggtatcgtgactagaggcttgggtagccgcggtcacccacgtggcctgaccccctcggggggggtcgggcccaaggatgacgtggccacccctccctctgtctccccgaggggtcggatcgctcccgtttcggccccgagggctggggcgcccccgtttcggccccgaaggctggggcgccccgaccccctgtggttttggcgccacgcgtgtgggttaggtgagcacagcggggctcacctaaccgcatttatagcagggttggacgagcgcaccacgccgcatttaatgcggcgcagcgcacgcttatccggtccgtgaccggtcgcggtgtgtgaccggtcacagaccggtcagatcgcgggttaggtggcaacaggcggcctgtcacacgcctcgccccgtcccgtcggaatgataagagcttcttggctctcgtccctagccggagccggcgtgctaactcctgcagttggtatgtcagtcccggtcagatccattccaggcttcagcgcaagtacggcaaggaagtcgct

SEQ ID NO: 21276 - DNA, 12342 bp, Oryza sativa
tgaactctctctctcgctctccggcactctgtattccttcacgccacagatccaccagaacacaggagtagggtgttacgcttctcagcggcccgaacctgtctacgtcgcccgtgtcttgtgcactttctctctcgctgacgttcctcagatcgagggcgaagaacctcacttagcgcccccggccgaaccggcaaaggggggcctgcgcagtctcccggtgaggagccccacgctccgtcaatataaatacttgtaatacaggcagttggtttattattggttattactttgtacatcaacttaaggaaaattttgctagagaacatggccaaaactaacttttggaggaaaacactctataatcatagtattttgctagtggacaccgcgccaactaaaataataagagagaaatcgcgtcgcgtgaaatgtcaaaaatacccctaggcccacatgtcagctctcctatcttatatatgttgggggccacatggcagcgttttgaaccgccgacgccggcgataagctcgccgaccgccgctgcctctactcctcctcgcgctgagtcactgccatgtagaccccacatatacaagatagaagagctgatatatgggcccaagagcatttttaacatttcacgcgattgctttctcctcttcaactggaattattattttagttggcaatgtatcccctagtaaaataccacgatttatgaagtgtccctccccccccccaaaaaaaaaaaagttagttttgacggtgtcctaggattaaaaccacacaatagcaaatgttctgtagcaaaatttccctcgacttaaaagtagcagtacaaaacatcaagcccaacaaggcaacaggcctttgagacgggctcatatctccaccctatctccaggcctagtaaacccgaagtccgtatgaggcgaaagcaagtttagaccagaagactgtttcaagtatgggcttgtagcggttgctggcaattctaactcccacggcccaacttcgccccgctccttcgcaatcgcaagttcgcaactgcaccacgcggctaaacccgtggaggatgtctacccttgtgaatttgtgaacgaagccgcccccgcgctatagtttgcgacgtgtgaggcacaggcgacactcggagaccgttgtcccggcttttgcgatcacaatctagacgagccatttcgctatccatgtgtcgcttggactttttttcgtctgctttttacagaaaatttttgtttgtcacaatctagaggaaactatttttcctagccctccctgtttctcatggtttgtcaatgtgttttggaagcttgcgcataagaacccctggcctgacgggaacattggtccctatcgcaattgaagcgtccattttcgcatcattggacttcgatgtgcacaccgcgatctgtgtacacgcaatcaaacacatgcgctcttatttttccagcgacgagcatagggacaacgtactttcttgatgatcaagacatcaattttctttgaacagttttgcgtacgtcgaccatctagatgcatgccactctacgtgtacgtcggtaggatttgaaagggctgcagcccagggtttttatctttccgttttaagtaaaaaaacactcttagctgtttatccaaaaccgaaaaaaaccgacgactttcgatcaatgccgtttgaaaagcgtcttaaaccgagaagttttcacaaaccaatatctagcggtttcataaaaaccgaacagtttttgtttttttgaacccggctgtggccacaactcttttgaccatggtgtttgtttggttgcactatatagagctgcaatgcagccatctcctgcatagctgtcgcgcagctgaatagcccccgtactagttacatgttgcaatggaatgaaaagattaaaatgttatttggtttctttctattttttttcatgatcgatcatgtttatgagccttttagagtggttttctaaaagaggaaggagtggagttttctgggaaggatggatcattttaaataatactccctttgtttcatactataagtcactctgaattttttctagtcaaactttttaactttgactaaatttatagaaataattagcaacattttaaataccaaattagtttcattaaatctagcattgaatatattttgataacataaaacgtacacatgttttactgaaataaatgtcaaaacgacttataatgtgaaaccgagagagtataagatacatggactactgattgaatcgtcaatgagaaaaacatttcgttttataccaacagatttcgtccaaagtgcacagcaataccagaaaggcagaaacagatgtactcctaacaagaaaaggttttgtgatctttccatggagatccatgatgggcattctaaaggtgagaagggaggtggtgtgaaaatgtgaatagggacaagggatccattcatatgctccgtactactactcgcaactgttcgccgaaagcgagatacgatcatcatcctgtcatctctctcgcaatagcatttcatcctttcatggcctcgcgatggatacgagaccctgttgccttgccaacgcgtcgatacgatcatcactgtcaccgtcacacagactcgtccgtgtaaactcgatttgcaccagaacgatacatgaattctccgtccgctgaacggtggaagcgtagggtttcgtcacgaatgtgtggccggctggccgagctcgcagaagatcaacgtgcagccgtcgcgaggaccggcccggacgagtagacgacgacctctgcggaaagggcaaaagggcggggcgccacgctgccacacgaaaggcagtggcgcccggagacagtctcgcgagtggccaccggtctccttccgtttcgtcgagccctctggctgacgagacagggtgctgcaggctgcagcctgcagctgcaacggaacggggggacaggctgcagcctgcctgatgaggtgaactgaaaacaaactacccctgctagtaacgtctcagggctgtaataagatcctatgaatccaattagccctaaaaactaaattcaccatccttatagcaaggctaataatacagctgacctgctagctataaggttctttaagctttctctcagcctactcatataatagctagctcttcacagttaatacagtgctcactggtctctctcacagagtttcttggttcttgacttcttgtgtccaagccggctgtaaatttacagcctgcttctcctctctctcctctcttctttcctccaactcagcatttagccggcttatagcctactattatacttgctcttactccgtaaaaaaactttgtttttttaagtctatcttacacatttacgccagattttttttaatacaaagaagctcaagtgacgatttggagatgcacttgatactgcagtgttaataggtgtgtggtttgcaatcccgaggtcctgtgtttaatcctcaatttcaaacctaggaaaaaaaggaaaagtaattattaagtcaggtagagcttgccacttaataaaagagcgaaatacatggccagtctttaaacttatggggtggtgtcatgtaggtccgtgaacttgaaaattacacgtttagatccgtgaacttggtttaatgtaccaccccggtccaatcgccctttgaccatgtttgaccgccaacgtggcatgccacgtaggcaacacttttgtgctcagccccctccacatatatcttcgcacataacttgccataactagtgcattttaacccaaatctcccaaaatatccctaaatcggctagggtttcgacaatgaggttaacataaggaggctgagaggtagcggctgtggcggcctcggcggtgagattagtggtaggaggcatcgtaatgcagcgggttagtggtggcacagtgcggccggattagcggcgggagatagtgtaattgcaattgctaatcgggaccgtattttctatacatgcaagaagaaaaaatgaaagggaagaccaatttaaggattttttttaggggattctggtgtcacaatatagctaaaaggagatgacgtgttgtgatgtggagggggctgagagcaaaagtgtggcctacgtagcatgccacgttggcggtcaaacactgtcaaaggacatttggaccggggtggtacattgaaccaagttcacggatctaaacgtgcaattttcaagtttacggaccggccatgtatttcactccttaataaaaagaaaaaatagcattgccaaagtcaaggatcaaacccattaaggccttatttagttggggaaaatttttagatttggttgtcacatcggatatacggacacacattttaagtattagacatagtctaataacaaaacaaattacagattacaccagaaaattgcaagatgaatttattaagcctaattaataaattaattaggcttaataaatattgtttttattaggaatcactctccgacaacatacaatctatgtaattagtttttattgtctatatttaatactccatgcatgtatccaaatattcgatgtgactgggtaaaaaatttttgcgtgagaactaaacagggatttatttgaacttctgcttcctcgaatcatatttagggcatgtttagttcaaaaaaaattttacaatatcacatcgaatgtttggacacatgcatggagtattaaatatagaaaaaacaaattacacagttcgctagtaaattgcgagataaatcttttaagcctaattactccatgatttgacaatgtgatgctacagtaaacttttgctaatgacggattaattaggcttaataaattcgtctcatggtttactgacggattctgtaattaggtttttttattgtgccaaatatcttatgtgactcctgtataacacgtccaacctttacccctgaatttaaatacccctaaatatttttatggagggtgtaaggttgagccggttttacgcctcctacttctcaccagtcaggtcaccgcctcaccggcacagagaagcccggatacacggggtggtcacactcacggggcacctacccgagccaacccccgcacacacgccatctccagttctccacagtgtgggactagcagcagcacggcgcctttttgcgatttgactccgccgcgccgtgtcccctccgagaggaaaaatacaaggggtccgagcggaacaacggcgaaaagcgacgacgggactggacgagacgaggcgaagcggggcggctacgaaaacaatccagacaagcggccaagcccgacgcacgaagccgcgcagggttcgcgatggattggactgacggacgggacgtgatcccctcgccgcttgcgcgtgccctccccccgtagcgctagcgtcgtgtccgtgtcgtgtgtgcgaccgactggtggatggaagggagtggagcggtgggtgtggtcgtgccgtgccaaaacgccatgcgagaaaaacccccacgcaaccgaacaaaacatacacccccgccccattgaccggcccacccgcccgtgtgtccacaccgatccatccacaattccacattcttctcctgcgctgctgctgctgctttgactctcccttcttcccggctactccatacacttggcaaaacacctgaaccaatccaacccgcccgtttttcttcttttcttttctttgtttttttttaaaaatacaggaatacaggaagaggagcggagtggccgagtgggtagatggtgcaagggcggttctactagtattctcctacctcagtggtgtttggatcacggactaaagttttgatcaggacggttctactagagtctgattcctgtaacatcggatgtttagacgctaatttgaagtattaaatataaactaattacataaatgagagataattcgtgagataaattttttaaacctaattaatccataattagcatatgtttactgtagcaacacataagttaatcatggattaattagacttaatagattcatctcgcgaattagtccagagttatgtaatgggttttgttattagtctacgtttaatacttctagttagtgtccaaacatccgatgtgacaggactagtccctccaaccaaacggcccttcagtctagcaagtttttttaggccatgtttaaatcccaccataaaattttgtaccctgtcacatcgaatatttgaatacctgcatgaagtattaaatataggctaaaaaataactaatttcacatattgcgactaatttgcgagacgaatcttttaagcctaattgctctatgatttgataatgttgtgctacagtaaacaatgttaatgacagataaattaggcttaataaatttgtcttgtgatttactgacggattctataattagtttttttattagtatccagacaccccataagacactttatataatactctctccatttacttttgataaccatattttattttgacacacagattaaggataaacaattttacttatcattcatttaaaaagtgatccattaatatttacatttctctatgcccatgtaaccaatcttgtgtggaagaataaagagtcacacatcattaagatgttggattgaaatatgcctatcaaaaataaaatttccagatttggaaatatgactatcaaaagtagatggaggggtaactgatatgacacgccaaaactttaccaccctatccaaaacacctctttggcctggtttagtttctaactttttcttcaaacttctaaccttttcatcacatcaaaacttttctatatacataaactttcaattttttccttcaaacttacaattttaatgtggaactaaacacaccttttttttttttgttgggcttgtgacttgtggggtgtgcagaaagaaggctaggcagatccaggcagagtagctctttttgtttttgttgggacctaatagtactggcagtacagtagtaaaaaaatacaaaccctggtttccgtgtccaatgtttgaccatccgtcttatttaaaaaaattatgaaaaaaattaaaaagataagtcatgcataaaatattaatcatgttttatcatctaacaacaatgaaaatacgaattataaaataattttatataagacagacaattaaagttggacacggaaacccaggtttgcttttttttttttggacggctcgcgaaggaaggaaggaaggtggagccaggctagttaatagcgcgacatacccgagacgcacgcacgcactgctgctgctgctcgctctcgctttgcttcccctaatcttctcccgggccaggggggaagaggggcggaattcgggcacgagctttggagttggagatcacttcggcgacggcgtggtccccgccggcatgcagttcccgttctccggcgctggcccgggcgtcttcacgtcatcgccggcgctctccctcgcgctggtacgcgcgccttcttcgctgacgtgttggggggtttttgtttcttttttttttttggtggtgatacggtcgagtgattcggaaaggcgcgtcttttctttggttggttcggtttgtcgcaggcggacgcggtggcaggccggaacagcggcggcggtgggaagatggttaccgcggcccatggcggcgtcggcggaggaggaggaggaggacgcgcgaaggcgagggacgcgttggaggtggagaacgagatgagccggtccgggagcgaccacctcgacgtcgtctcttgcggcgacgcgggcggcggcggcggcgacgacgacgatgacgaggacgccgagcacggcaacccgcccaagcgcaagaagcggtaccaccgccacacgccgcagcagatccaagagctggaagcgtaagcgcgcccccacccacgaacaacgattcgttgcattctcctgtgcttggctgcttgctttggctcatgcatggatactggctcatcggtgcaggatgttcaaggaatgcccccacccagacgagaagcagcgcgccgagctgagcaagcggctcggcctcgaaccccggcaggtcaagttctggttccagaatcggcgaacgcagatgaaggtaagcgatcgaaacgaacagcaaaccatctttgcactccgatcgatggtgcagtgcagttcttgacactgtgtgtgtgtgtgtctctctctccctgtggtgattgaattggcaaagatgcaactggagcgacacgagaactcgctgctgaagcaggagaacgataagctgcggtccgagaacctgtcaatccgggaggccacgagcaacgcggtgtgcgttggctgcggcggcccggcgatgctcggggaggtgtccctggaggagcaccaccttcgcgtcgagaacgcgaggctcaaggacgagctcagccgagtgtgcgcgctcgccgccaagttccttggcaagtccatctctgtcatggcgccaccgcagatgcatcagcctcatcctgtgccaggctcgtcgctggagcttgcggttgggggtatcggttcgatgccatcagccacgatgcccatctcgacgatcactgattttgctggcgccatgtccagttcaatgggcacggtgatcacgcccatgaagtctgaggctgaaccatcggcaatggctggcattgacaagtccttgttcttggagctagcaatgagtgcaatggatgagctagtcaagatggctcagatgggggatccgctatggattccaggtgcctccgtaccttcctcgccggcaaaggagagtctaaacttcgaggagtacctaaacaccttcccaccttgcatcggggtgaagcctgaagggtatgtatcagaggcatctagagaatctggcattgtcatcattgacgatggcgccgcgcttgtggagaccctcatggatgaggttgtgcttgtgccaccttaccccctttcatgtttctgttgcttgtttgtttggactcacctgtagtttgaattcttgcgacagcgacggtggtccgatatgttctcatgcatgattgccaaggcatcaaccactgaggagatttctactggtgttgctgggagtagaaatggtgcattgcttcttgtgagtgatgaacattctgttgtggccatcccatgagtttcatgtggttaatcatactagcataacccctgaatggtaaatttcgatcattgcaacagatgcaggcagagctacaggtgctttctcctcttgtgcctattagagaggtgaagtttctcaggttctccaaacagctggctgatggtgtatgggctgtagtggacgtttcggctgatgaattgatgagggatcagggcattacttctgcatcctcgactgcaaacatgaactgccgaaggctgccttctggttgtgtgctgcaggacactccaaatgggtttgttaaggtactgagactgattatctttgttagctcctgctccttagatattcttaggtaaatgtcttaaaccgtgatatccttgactagttcacttcagggtagtatgtggttttacatctattaattcacactagtcagcatgctatcggttgacgtgaaactcatctaccttgcaaagtcgcagctcggtagtacccacgacgctgccactagaagtctgtcaaaaccagccatattagttgcaaagcttgttagctctactcatatgataatcatacatatggagagtgctttattagttcaggctctctgcaactaacatgacactcatggaaaagagtattcgtgtattctttcgtaatgtttcaaataatgtatgttagtttaatgtgtcatctggtgatcaccatgcaatattttgttcgtattcacaagtcatggcgtaggctcatgtctcctatagatatgttgtggttatgagtccataatccgaagtaaagtattgtattggtcagcggggaggggagtaaataaatgatttaggaatacttaagtggttctgagatccaacacttttccccaagtacgctcccttgcttttgtttagtcctgagttcagttctcctaggggattagatacttcttctactcctgggatggtgccccttgggtaacttcttgtccgcagtttaatcgatgcgtctcctcgttgaaatcttgactgcttcctctattgttttgtctcaatgtaaaagtcctcttcaccttgggttttgtaccagagttttatatagccttgatccaaattgctctggggcgcacacatgcacgaacgattctattcaaaattctaaattggacatctgaatgggacaaatatatctagtctacaatggtagaaacatgatttgatgagttataacgtctcattactatagattacactgtataagttaatctgatgtaaacccacaggttgaaagcaggaagtggttctttattttaagggttcaggaacacaatattttggaacactagtggtgtgccattcttggggcataccataagtcaaaataattaacgatgaagatactgtgatcagaaccatgctttataaaatgtaaacaaagtcaatctcagacagatcagctaatcctagatcaaactagagatactgtcgtctctcaagatttctacttttcttctgtaatttcatttatgtgcttttggtgcttttacagtatttagttcaaatatcagtattttctgaagtctataatctctctattgatcagtttctggatctgcctcctgctttcatggtacttctatggtttattctatgcaaaacagaatagacaaatgtgtaactattatccattagtcctatggcctatggttctcttacaaagtactagttacaatgctggggccccactatgggctaatatttcgaggtagcctctattttaaaacattgtgttgatgtcctttttatgttccattgattgggcaaaaagaaattaaaaaaaaacttagatggaaaaataatattaattgtaccattcagcttgtgtagtagttgcgtactccaggaaaactgcacctcaggcctcttttggtgtattacctctcaagacatttgcattttgtgcgtgcatttaagtctaacagcagatcttgaatggacgctgtaggtcacatgggttgaacatacagaatatgatgaggcatctgtgcacccgctctaccggcctcttctccggtctggtcttgcccttggtgcagggcgatggatcgcgacattacagcggcagtgcgaatgcttggcccttctcatgtcttctattgcattgccagagaacgactcatcaggtaaagaaattcaatactactgctaactttcaattggatccacccttctaataaagtgctacatttgcaacagctatccatcctgaaggtaaacggagcatgttgaagttggcaaggaggatgacggacaacttctgtgcaggggtgagcacatcatctacccgtgaatggagcaaactggttggattgacaggcaacattggggaggatgtgcatgtaatggcgcggaagagtgtggatgaacctggaacgccgccaggtgtggtgcttagtgctgctacatctgtgtggatgcctgtgatgcctgaacggctcttcaacttcttgcacaacaaggggctgcgtgctgaatgggatatcctcagcaatggtggccctatgcaggaggtgacaagcattgccaaggggcaacagaatggcaataccgtatgtctactgaaggctagtgtgagtattagctaacagtctgccacagttctgttcatagcttgctacttactaaacagcatcattaactgacttgtgggggagactgccatttcaaaattgttgcaaacctaaacacaacattttagaatttgttgggggcaccacatcactaaacactctaaacaatcacatgcttgtctgaaaccagtttaatgtgaaataatttagaatttgtgaaaagagtacccttgcttggccatcttaggtattttatattgctaaaagaaaggaaatgaagccaaggaagtactgcattagctggtggggaaaggataagaactatgtctattcacaactggaattttgtgagtcttaattctgtaacggttgtaccagtgatgatatagttgtacaaatacaaaactatatgtttagtcacacatttggcaattgcctaacaaatacaactctactataatatataagcatgtatagaaattccgctaggtcaatagagattaatggaggttagaaagatg

SEQ ID NO: 21277 - DNA, 6074 bp, Oryza sativa
tccggttcaatggttgtgtatgctcctgtagacatcccagcaatgcaccttgtcatgagtggtggggattcgtcatgcgtcgcccttcttccatcaggttttgccatcctgcctgctgggcctagcatcggcgcagatcacaagatgggcggttcattgctcaccgttgcattccagatacttgccaacagccagcccagtgctaagctcacggtggagtcagtcgagaccgtgagcaaccttatctcctgcaccatcaagaagatcaagacggcgctgcattgcgacgtgtgaacccaacaaggggggacttttggcctagtgggagcggctgtggcgatgagcctgagtcaagaacgaaccgcgacataggaagggacctttgctaggtggcaaggaccggacggggcaggtccttagcacagagcaatggtggtggttcgggtattgactcagcctctcccgcctccgttctctcctgtgactggtgcatgttgaagtgaacctgcattttggacgccatgtagcaggccatctttctttctttttcctttttctttttctttttctttttttagggagaagggagtcatctgtgttttttgttggctggctcagggtgttggtgtttctggtttctagcttttgttacagggagatgtgatacattttgtagaagctccgaattgtcgtgctggtatgtgaggttctgatcataggtctgtgtttgatagtctcgagctatcaacgcctggcaaatgcaaaccttgttatgctaaaatatgttttagatcaatctgattctgaaagctgtttacatgtcccactagtcgaagagcagctcggcagtcatgaaatgtgcaaatggaatcacaaagttctggctcactttgcaaaattcaggatgcaaaatgtcaccgtgtaacaattccattttgtacctaagctttccggaccggtatcgtgttgcacgcatcttcctttgatggtgcaatgcttcgtagcctatcattggtcgaggggccacctaagctcagttgtgtggtggcacagatgtacaactggaaggaccatatttctcatccatcccatagggaaagatgttctttaccaaaatgtaaagataagaagagaaatatcctagtctcagggcaaaatttctatgtcaccatctacaaacgtcaaataatgtactggactgttcataccaacaaatcgtttgtgccaatttgacttgcgacgggcaaggccatacaggctacatcacttgaactggatgcataatttagccccctttggccatgctggatcattcattcgacataaatatatagaagttttactcaagcgaggcgctatcttccattgcacataacatagatgttctactttaagcgagacatgattgtactcagcaagccagaatattgttaactaagatcattaggttaccgtgccaggacagttgcacgtacagctattaccatctgcaacaagttcatgatgcttttgctgtttctctcaccaacgcaaactttgccagaaggcctgataattgaagaaatgagccaacaccatcgcagattctcatgtgagcaaatccggtttcctaaggaaataaacatgatatttttattcaactgtagaaaagaacgataattggtttgcataggttgcaccttgataggctgtaaagttaccttcaacaattccagcttcagatattcagccatgtcgtagttcttgataacccggaagagagtagtgattatgtcagtgggagagtagcccaaatcatataattgcttcagagcagagcaagcctcatcaaactttccatcaagcacatttttcaccatattcttgacatgcaacggatgtggttgatcacgcacctggagccaatacagcattactattagctgaagaaataacgcacaaaatacagggcaaaagaagctatctgcaaaccttgaacacattttcttgattaacaaaacggaacccactaactgtagcttgcaagttgttcaaagcttgcctcatgtcaccatcagcagtaaagatgatagcttcaagtccctctggcacgtaaggaaccttggttgtacaagaaaataagagattagataaaattaaaccagcacccatatattgggagcaaatacaaattgtatgaatggtagggtggtaataggatataaacgattgttgtggttcaaaagattaatccaggcacttggaacaaattaactagatgatcaaacattcccagtatccagtatctacatcacagagagaaaaggaagaacttaaaagaaaggtagagggagttgcttggctgcaacattgcaggcaagaaaatgcctagtgctgaacattagaatgaactgaagagccattagaggatgactaacaagatttatgacctcttcactttaacagctagatgtgcccactcagctgggtattttcagtaaaccggtgaggacttaatgatatttgttaagacaaattaattaatcctaataataacagcagataattataggacaagaaacgcagaaacacacgtaaatgcacaatcatagcttcaaggttacagggaagaacaatatatatgtaggtgtaaacatagccatcagaaatgatgtttaactaaaaaggttaataacaattgcagtgtttcaaagaaaccatgaatcataaccagtgctatgagaaatctgtcgatttaagaaaacttaagcaactaggcaataaaatgtatagtcaagtcctcgcatttataagagctatcaatcattaccttctcagctgctaccacaatcatgagtcggccaagaatctcctgatctgaaagccttgagaaccgtacaatagcacaacggctttgaatgggttcaatgatcttagatgaagtgttgcatgcaagcgcaaaccttgtggtgttagaataaatctccattgttcgtctcagtgcttgctgtgctcccgatgtcatgctgcatgtagcaagtgcatgtgaggcaaactcagaaacaactagctatatccttgatatcagtagttatatgcttaaaaatcataatgaacaagtctttaattcataactacttcaacaatcatcagaagtcctggccggaaattgcccaggtggtggtggaagaagctgcactatggcgcttagcagggctttggtcatttaggtcgcaacacccatgacacaagattcagccctagcatccctttttttttgccttttttttcagttttcaccttgtaaatgttatacaactcctcagtcttaatgtaaaagatgcacaatccttgtgtattcacaaaaaaaaatcatctctacgagataatatagctttgctcttacagagatggagcagccactaggtttctccattttcacactgttggtatcactacaatcctactacatcttaacctctagcaatccgtggtgaaattggcatgtctggactaaataaggcacagtactagcaatggtgtcacatcatccgcactagggggtggcattacctgtcagcctcatccaagatgacgatcttgtgcctccccggctgcagcgtgaccttcttctgcgcaaacatcttgatcttgttccgcaccacatccaggcccctgcaaaagcacgaatcaaccgtcagtccgtcacacacccagtccacaccacgggcgcacgccgcacggctacagttcgccaagtcaaaaccacgccacggccgcaccaacctgtcgtccgaggcattgagctcgagcacggcctcgcggtagctaggtccgagcagctcgtgtgccagcgacaggatgctcgtagtcttcccggtgcccggaggcccctgtagaaaacgatagttaaaaaaaaaaaaaggttagaaacgattcgtcgtactgctgcttgggtgttagcgagagcgcgcgcaaggtgttcgaggaaatggcgcttacggagaggattaggtttggcatgttgccgtcgcgggcgatgacctggaggcgggcgacggcgtcggagttgccgacgacgtcggcgacgcgggtggggcggtacttctccacccacgggatgtcgtaggcgtcggcgagggcgggggcggaggagctggaggcggccatggcgcggggcggatgcgcgggagaggggaaaaaaccgcgccgcggtggagggaaaagaggggaaagctgccccgccagcggaggggagggttttttttttttttttcgggcgtgggccgccttgaggagcaaggggcatcatctgttgggcctgaagcccacgatgagcacggacggctgccgtcgagactcgagcggcgtcggccgtacggagtggccaccccggaaatttcactacttagtactatcaaaatatccaattcacagtccttaaagaaatgcccatttaatttgtaaggctcttggattttactatagaaactatgattttctattagttatcactcccatcattctattattagtctaccccacactagtaaattcatccaccaaactatcatcataaccgccacaccaaagccatgtgcttaacaacctccttcagatgctcctagcgaggagcaggctgttggaggagctcatcatcacggctcctatcatggagcaggccgttggagaaactcaccgttgcggtagcactttacttgcccatcacactagagcagccatgaaacagggacgaggagggcaacaccatcaaggaagatatggagatcatcgcccctcgtcgtcaagatgtaagatgatgggttagtcccgcatcagggatactggaacaacttctcgtggcaacgtcctgcgacaaagtagatgacgtcggagcaaatctcgagacaatactgaaaagtgtgcatagtcaagaaggtcactcatgaagacaaaaaggcagtccttgctggtgccagtagcgagtgtgagaaggtggttggtcattcctatgtgctgggttataccggttctctttactcatccaccaacgttgtggtttgtggcattgagctacatccgcaacaacaagccttgcggatggacttgtcaatggtgggggtagatgtatcggcaaacaacaaatgcggtacggaacggagtaattcattgttccgatggccaaatctaaaatccttgcgaattttgtggcaatttctaaaagtacttggatgtcgatcagtgaaatctctctctataacaggactaaaatgtgtcccaatatattactgtaatatactcctacgttttataccacttagtagaaaatatagtataacgtaatgtgttttacgttattctatcaaaaaatacaatatgcaccatggtgtaagttattccctcgaagggcgaaacattcggacaatattttttctagtgataaagtatttcttattaatgataaattgtaattagaatttttcgagcggacacacgttacttcaaatcaatggtatagttttcttggataaaatttccactaccaactactccacatataacgagcatcaaaacgtgaaaaaacaagttgaaaatttttttggtaaggagcaaaaaaacacactttagtttgcgaacaatggactgttatccgtcagtttttttttttcgaaaattaggtttagctgagttgccaactgcttgacatcactggtttctttctggtccaaccccacacggccattcggccatcactgaatagcggaaaaacgagggagcaaatagaaattctgtccagtcttccaacccaccccaattcctccttgcccccctccccctctctctccccagaggagcagcaaggtctctctcctcctcgatctgccgcagggggtcccctcgatggcgacgcctcgctccccgagcacccgcggcgacgcgctccttgactcggcgcccctgctcggcgggggcggcggcggcggcggcggccggcgccgagggggcgcgctccgccggccgtcgctccgcggcgcggcgcggctgctgcggcgcggggggcggcgggcgatgcgggagccgtcggtgctggtgcg

SEQ ID NO: 21278 - DNA, 4374 bp, Oryza sativa
atcgagtaccggatgcgccgggggcagcgtgacagggccccggcgtctgccgacgaggaaaggggaagtgacgggtcgtcttcatctagcgatgatgatgtcacggaggacgatcgccgtggtagctgcaccgattgcgtcaggtaaatggaaggatctggctagtaagcgtgtttcctagtccgtgttactcacgagcggagcagctcagatttacgatacagtaatagggaaatgtttcttctgtttgcccttacgcaagttcttaccacggtataatgagccttctattagtatgaagaaagaggggtgagtagaaaaggctagataagtattatactcagttttaacatgccaagttttatgcatggtttgctgttctatgatgtcctagaaatatttatgttgagcatatcaatcaggctaatgtcagtaagacaaagtggctctgtcatacataggatactgattacagtcatgaagctcactccagtcagtcatgcccagaatttctagcctagtattctcttctaagtgggtttcaattacttaagaggtcaaataatctagcgttgcttgttctcatgacatagcaacagtgttgtgctttgaaattggtatatgcgcaccataagaagctaagagtggatcctcctaaataagctataaattcaattaggatagtataagattgtacctgcaaaatcatttcgttcaacataaactagacaaaatgaataacctcattgatgttcttttgtagctgtatatgtgtgttatgcttcaatatgctaaaagaaatgtggtctaatttatgggataaggcatctaatggatccaacgttacctggaaaatgacatttgaatgagtggcacataacctgtttaggtttctttttaagacacaaattatacgctatttggtattcagtgaagagacccagtatctgattggaaaggtcaactgaagacttttgtgacctcaaaacctgattcttttttatgttttaatacacatttctgcagtctcattctattgactatttgactgttctatttttttaggcaacacataagtttataactgttattatatgagtttcttagtgatgaggatgattgaggaaacatgcttcttacgctgctagataatattcaactgcatagacaattgataaaaacatcttccaaataaaacattggtctgttccttcccttttgttttctctatattgaattatactgcagatgtctgtctctgttatgtcataacatggtttgctgtttcctcatattcataatgcggcttgcttctgtcttctactttaatttagtttctgaatgctatcgcactatctagatgtgctgctatggaaaattcattctctctattaactattgtatcatgtgattttatttaacaatattgatattgaacacatgacctctcctatatgtcttgtgccttattatttttttattgttaactctggcagtattgcaaagcacctggagtcagctaatacaatgttctccttcatatggtggataattggattttattggatatctgctgggggtgaggatgttatccgtgatgcacctcagctttactggtatgcatctttaaattaacagtcggcttttcataatgtcgtcatttcattatattcttttggcacggtaaacatgtttctgtatgactcactttgcaggctttgcatagtctttctggcatttgacgtgttctttgttgtattctgtgttgctctggcttgcatcattggtattgctgtatgttgctgcctaccttgcattatagctattctctatgcggtttctgatcaggtatggcttttcaagtagagataaattggttatgtacatgcagaagatgtacataattttatatgacattcatgcaatagataaccttttgcaagatcttattggaatcaggaaggagcgtcagaagatgatattcgccaaattccaagatacaaatttcggagaacagatgaacctgaaaaacaaactgctgatgagacaggaccttttggtggaataatgacagagtgtggcaccaatcaacctattgagaaagtactcgcacctgaagatgcggtaagtttttataaatttgtgatacatgtatctctgaccataacaatgcccgaggtgctaaaactcaaaaccttttccaattttattttagacagactcacatcgtatcgcccattcatcatgactgttgtactctgtctagtaaattcgatagtgtgaaggcaagggatactgaaacaatgattatgtgtttgccgtagctcatacatcataaaatattttcaacttttggtgaatgtatttgtttgtaaaaaatcgtaatgaaccatttattcaacatacaagttaaaataggaatgattcttacccaattaaccctgaccatgttttgaccaaaccgtttattccagccaatactgccatgtgccaagctatgcaaaatccagaggatgcacaggataattatcatgtccatgctgaatctctatgctatatgaaactttagattcattcttcacttgactactgcaggagtgttgcatttgcctttcggcatatgatgatggtgcagagctgcgtgaacttccttgtgggcaccatttccactgtgcctgcattgataaatggctgcatatcaacgcaacatgccccctgtgcaagttcaatatccggaaaagtggcagtagcagtggaagtgaagaagtatgattgtgtgaatatcctccggtcgagaacaccgatccatttcaacttcacacctgtctctgctaatgcaaccacaggacctgaccagtgtaaattttgtatccaaaatgtgtgattagcgtcatatatgtacttgaagtgactcaagactgctgttcatatccacatacatggttgtccaatgtgtcttttactgtccggaatacatgcttagttgccccgtgagttgtaattcttcgagtgatcctcacatttcctgcttgtgttagcatggtttgtgcttatgctcctgccttggtcattggttcagcacaaaaactgttgtaaatgggctatcggtcctgttgaattgtcaggtacaaacgaaatgcgtcctgcttatgattcatctcttgtactctcgaagtcctacagccagttcttccgaactgaagcattttaccgagctgggagtcataaaagatgtttttgatcggtctgttgttgaactgataaggtaataaaatatttgaaatctgagttggatgtgcgcatgtagccgttctgtaatcttgcatcagatgaggaccattatggtaccgttcatcaaatccggtccagcagctttcaatacacaaaggaagcagaaatttcgaggcctgtgtttagttccacgctaaaattgaaagtttgaagaaattagaacgatgtgacggaaaagttgaaagtttgtgtgtaggaaagttcgatgtaacaaaaatttgaacgtttgaagaaaaaaaagttgaaatctaaacagggccctggtacttgtttgtgtaaagacacagcaaaccttctccttccgtcccataaaaaacgaaacgaatctagaaccagatatgatatattctatatgatgaatctgaatatatgtatgtccagattcgtagtattataataatgtgttacatctagtaccaagttggttttttataagatggagagagtagttggcaaacgagtgaagtgaagtgcgcatgaattatctcgtcagcaaaatcccatcgccgccgcaaaaagatttcaaaagaaagacggccgtacccggtacgcgtctcgtgtcgtgtctgctgctttgaaatgttcactgcgccttgggccccacgccctgttcctgttctgtgtcctgttcaatgttcatgcgtgcggccgtgttcaacgcctcccaaaacctccccccattcattcccctttcttcctctctcagctgctttcgctgtgcactccgcactcgcagtcgcggccccgcagctttccctcccggcctgattccctcttccggtctccgcttccttcctcctccctcccccgcgagttcccgaaaccctcgtaggtaggggagccgccgcgcgcgagggcgaggctgcggagcagccatggactcggcggcgctactagaggtgtaccgccgcgatcgccgcgccctcctcggattcatcctctcttccgccggcggccgcgccgtcgacctctcccgcgtggacctcgacgccgtcagcgccgactacgccctcggctgcgtcgcctccggtgagccactgtcctcgactaagtgcttgctcgtctgtgttgaggcggaggcct

SEQ ID NO: 21279 - DNA, 16269 bp, Oryza sativa
tttaggtgacactatagaatactcaagctttgtgggttcggaggagttgaattgatgggtgcaattagcagttgacccgtccgtttacactgatggtaaggcatagctgtacttgacaactggattgtcatctgtttaaatttgagattaaacaaaaaaggtgaagtacttttaccgatggatcaactggaatccccataagaaattgctaatgggcatcttagtactaatgccttctttagagttttccacttgaatacttgataggatggccaaaactttgttgactttaatctgctgtatctctttagtttagacaagtctcccagaatcagtgctgacggttcagctttctcccctaggatccaactgacaaactagcttctttgggtacatgtcagcttgttgcagaaaccatttcagaagtttattactgtttataccgatacgctttaaaacttgaaagctatatttgatggtgagtatgaaaatgagaagcgcgttagttcagcattgccccggcccggcgaattagttcaacattgccattgcaaggaaccattccacggttgtttcgctttcgtttttttttctgaacttaatttccctatcattgtatcatgtggtgaggttaagctttcgtaaatcgtccatttgcaccgatgattactggaaaaacagaactcgatgtggacgcacgcacccagttgcctcttcttcctcgacactgcaaaacagctcgtattcgtatctcctcatttgcaactgaaatgcgcttccttttctttcctgccgtcctggcatttcctctttcccgtttcaccatatgtttctctacttgcatctagccatagctggatagtactactacagttggttcgatctttataaatcgctgcataatgggaacccactcaactcctgctaaactaggaagaccaatgcaaagaattgctctatggttcaatcggttttacgtacacgaagatgcataattgtggacaataaatggtactactactctgatcctcctaacgctgaactgtaaacattttcctctcagttccctggaaacgtgaactggtggtccacagaaagatatcttaattgtgtactcctttatgtgtaaatgtagccaaatgtaacttcagttgaaatgattaaaagaaaactacagttgtgttggcttcagcaacgtcagaggacatggtttgcagctcgcgacgacgtctacggtttccttgcttggccccgatcgagacacacggtaacggcgtatagtacaaaaacagcgtcgcgtgcgcacgagccaggctcgttcaacacggcctcagggaaagcaacacgcaggcaaagaaagcgtaggaatttcggtaaaactagctgggcggcccgcgcaattgcgcggctagcatcaatttaaaattatttatttttacatatgatttcatttaaaattaacattcttgtgattataataattttatagtttttaaaaggcacgccagtcgctacccctcactcactccgttgtcacatttttatttgcttactcgatctatcactatttctattcattctcttcagaactttaaaaattaggccttatagtttttagagttcattgtgttgttgggtttcgttttcataattttaaattaggccttatagtatttagagtttattgtcttgttgagtttcgttttcataatttttagaaatatcgttaaacatcgccaatttactactctacggcccatccgctgccacctcttttttttgtcactaagattttaaaaatcaaacataattttgtttgtgttcttttttactttccatacgtctcgccaaatcgttagtggctttaccactatactcctctatagcccgcccgctgcctcccctccttattgtcattgagatttcaaaaatcgaacatgattatcattggggtttatttttactcttcataagtcccgccaaccgtcgtgaccatgctgcttaacggcatgcccatcatcactcctcttaatcgtcattaggattctatttggggttttgtttagaggttttagatatcccatcaatcgccagcactctaatcctttgtaggcctacttcttcttcactctttattgtaatttgtcatcgttgtgttctagatggacatttttcttttgaaaattgcatatctttcattccaataatttttattcgtacttgaacttttataatcattttcctatttttgaaatttattttatttgttatttcaaattttaattaatctcatcatgtgttctagattgtctcttatttcaatagtctttattatttttattacaaattttagttatttataaattgtattatagttgggctcttatttttatatttctattttctgaattatttttttattttgaattttaattaatctcgtattgtgttctatatagactatttttttaatatttcttttttatttccaatttcaattgttttaaaattgtgttcccacttgaactctcttttttatgttttctaattttggatttttatttgattttttattttgaattttaattaatatcgtattggtgtcttatatggacttttctttcaatatcgcttattttaaatttcgaatttttgttattttcaaactgtattcctacgtggactcttcttttatttccttttctctaatttcggattttattttatttttattttaaattttaattaatgtcgtattggattctcatatgtactcttctttcaatattccttatttttaattccaaattttagctatttttaaattgtattcttacttggactctttcttttttttctaatttcggattttattttatttttattccgaattttgattaatctcgtattgggttcttatatagactcttctttccatattgcttatttttttaattccgaattttagctatttttaaattgtatttctatttggactcttctttttctttttctccaattaatgtgggaatttctaacccccacagcgaacgtggtacctcctttcaaagctgttttaataatataatagtatttctacttggactcttcttttctttttcttcgattaatgtggaaatttctaacccccacagcgaacgtggtgccttctttcaaagttgttttaataatataatagataatagatagatagatagatagatagatagatagatagatgtttctcgtttttctttcctcacgaaatggacagagtctggtatagcagttccgttgctttgctgctacgcctgtttgcaaaccggccatcgccgtcagcctcttcgtgcatccccagccgattttctcttaagctctactaccttccgtataacccaggctccaactgcaaatcgttgttgatgccgtaaccaataaatcatgcatgagtcaggacggagtactcgcgcttgcggtctgatacagatactacctacacacccgctcaatccaatcaatcatgcactcgtgctaaccgaagagagagtactaatgtgtacatcagctgtgtcgattttttgtgcaagatgattatgttcctcatggccaaattgtccccctttggccctttgtcgtgtacacgtttctgatttatgaaaagagaggaaatctcgtgggatacggacgtatgcaggggttggatgcagcgtggacttgcagcgtttaaacagccaatccctcgaaaagaaagtcaatcgatcgccgtattgacatgttcagctgctcacgcgcgcacggctacaagcagggtcgtcatgggctcatggcctcataggcgcggtcgctgctgcaacctgtagctgcaggtggagacgtggtccgtggaggcggggtcgccgcacgctggctcgaaacgaggacggcgcgtcggcgagaaggccaggagcggctggcggttgacggtgtcggtcggatgtgatgatatcgagaattcgggatgatggctggcacgacacggggattttgcagagaacttcggagcggagtgggcctgcggccacgtcggggctacgggatcttggactgcttgacaacgcccctcggccctcgcagccgaaatattttgggagtacctatacaacattcagaaataaaaattttagaacataactaagtatataattgtagtgtagttatattataactactatgtagcttctgtagctcgagtataactcttaaagaagtgtgatggagcaactggttaatcgaatgagaacgtaagctgcggatttggatttggtgcagttggtagtgtgactgcaacttatacagtccactgtcagcttttagatctggatccaagggccaaaatgcgttcgggtactgtagatcactgtagcaaaattgtttagtattttttacatctgccactgtagctaatggtctggtccattcatcaatgaaatagatggctcctattgcttgcagtagcttaacttgcagtccatatacaaactgcatgtgatcccaattcgtaagctgcaggtcttgaataaggaccccactatgcgcatgttaatttttttccatcttccctcacccgcacgaatctcaaagcatatctacggttttaaatacgaaagtttccaactaacttttttaagcagtaggatagcaaatccaaataacttttttaagaactcatccgagtgatttagtgttttatgaatatatatgtcggtgacatggggccgggggtatcgtgactagaggcttgggtagccgcggtcacccacgtggcctgaccccctcggggggggggggggggtcgggcccgaggatgacgtggccacccctccctctgtctccccgaggggtcggatcgctcccgtttcggccccgagggctagggcgcccccgtttcggccccgagggctggggcgccccgaccccctgtggttttggcgccacgcgtgtgggttaggtgagcacagcggggctcacctaaccgcatttatagcagggttggacgagcgcaccacgccgcatttaatgcggcgcagcgcacgcttatccggtccgtgaccggtcgcggtgtgtgaccggtcacagaccggtcagatcgcgggttaggtggcaacaggcggcctgtcacacgcctcgccccgtcccgtcggaatgataagagcttcctggctctcatccctagccggagccggcgtgctaactcctgcagttggtatgtcagtcccggtcagatccattccaggcttcagcgcaagtacggcaaggaagtcgctggccattaaatgaaggttgaaatgggcgtccaccggaaaagcaggcgagcggggcaggaggtgtgtgctctgcttgtcagaggtcacttctggctgtagactagccctcattgtaaaaagcatatttcccttcttaggcagctagaggcccatgtggtgaccgctgaccagataaaaaggaggcccaggcctaggagagggaaaaaagagggaaaaagaaagaggaaggagggttgggactctggggaatgggttctagaggctgaactctctctctcgctctccggcactctgtattccttcacgccacagatccaccagaacacaggagtagggtgttacgcttctcagcggcccgaacctgtctacgtcgcccgtgtcttgtgcactttctctctcgctgacgttcctcagatcgagggcgaagaacctcacttagcgcccccggccgaaccggcaaaggggggcctgcgcggtctcccggtgaggagccccacgctccgtcatctggcgcgccaggtagggggcgcgcgtgtctttctaagccctcgtcctctttcgtgtgcgccaagcctctcccgctcagcccaatggccgaacgggcagtggcgcacagcctctctccgaacgctagcggtgacgacggggagcagaacccgcgccgtcgggctcgcacccctccgtccccctctcgccgaaatcttgggcggggggaggcgctcggggaggtcggaggatccgcgacttcgccgcccgcgggcgacgggggaggacggcgagacggggcgcgtcgccgcctcgtctacggcgatggcggcacgccccagggcgcgctcctgcgtcacccgcccgtcgtccccgatccagagactccaacccgacgttggctggatgacgtggccgacttggtcatgacggcgcagcagcgcctaggcgccgttgggcggtcctccgccaccgaggcctctggcgcagccgccgccggctccatatcgtcgaggcggagggcgcggcgagcggcggccgttacccgccgttcgtccgccattccctcgtcaacgcctccgacctaagaagatgcgcgtggggggccggatgcccgcctcgatatcgagcgccggcgcgacgttcgtcgcgccgcccacgcaacggagggcgcttcctcgtccggagcgccacttcggtccgggcacgggggccggccccccgtgtccccggttggcggtgccggctgtcgagcctttgtggcgagccttcggaacgtccgttggcccccgaggttccggcccaccattgtcacaccccgaagttttcctcccaagccaaatttgtaatttataaatgaccctaagaaaataccggtgcaaatcaggagaaaaccctaagaaagtaatgcaaataataatcggatttgacatgtggaattttttccctgagttctacatgtcgaaattcattaacaggatttttagtggttttttcagagctctagaaataattttaaccagttaaaattgagcaagcaatattgtaattccagggaaaatcctttttcctttttcgttttcttttccctccctttttcctctttttttttcgaatgggccgccggcccattctcccctttcctttccccctcccccttgctgggccggccgcaggccgaggcccagccaggccgcccgcctccctcctctcccggggtcgccgacaggtggggcccacctgtcgggtctttccccttcctccggccgacgccgcgcccgcaaccgccgcacccgaaaccgccgccgcgtccacgtctccgcttcctccgggccacgtcggccacgcccgcgcgtgcgccgcgtctcccgcgcccactctcctctctctcccgctcgcgcccgcgcccgagatggccgggattcgattttcgaatcccgcctctctctcttcccccactcccccacgtcggccggcgattcccgcctctcccggccacgtccggtcctctctccccctatttaagcatcgccgtcgtcccctctcactttttccccattccgccgtactctctcgagcctcccatcgctctcgcgccgtgcgcccatccgcagccgccgtttccgctactccggccgccgctagccgccgttagggtcgccgccaggccgcgccatcgccgccgtcgggttcgcgtggccgagatccaccccgtccacctctcctccgtcgaggttcgtcgccggagtcctcgttccctcgcactcgggtgagcaccacctctaccgccgccttcgaccatggcttccggtcgctgtggctcatctccctctctctaatccctctctcctccttccttagggcaccccgaagctcgtccgctcgccgacgtcgtcctcccgtggcttgccgtcgccgttcgccatcgtcttcctccgcgccggccaccctcggtgaggcatcccctcccctcttttccccttcctctcctcttagtgccgcgccgccgcttcaagtcgcgcgctgtcgccttcgaccgccgccgcctcgcgtgccgccggtcgctgccgtcgtcggtcgcatgcgtcgccggcaacgcgttcgcgcgcgcgtcgtcgccgtcgccgcggtcggtcggccggccttgagccaagccgagccgcgtgccgccgccctttctttccctctcccgggtcgctgaccagtgggccccgcatgtcggcgccgctcctccccggtccgtggacccgatccgccgtggaccgccctctcccgggtcactgaccggtgggccccgcatgtcggcgccgcactccctccgtgctgacgtcagccctggaatatattgcgcaataaatagtttaaggtttttcttgtatagtaataaacacagtgaatcttctaaaaatcataactaattcatccgagctccgtttaagcccattcaagtctcagtaaatcaagaaaactgtgccgaatccattaaaaatggttttgttccctgtttcagtagtcttatagcctgtttgcaatgtttgctttgtatgtcgctagattccgtctcctccgacgctccggtgtacttcgagatagtcgccgaggttcctccagcagcagagcaaggcaagtcatgcttgtcacttgaacatgttgatcctatattgcaaatgctctattgttttctttcaaataatgcattgttttataatattactatgggatggttacctattgttacagccatgcttttcggataccatgctcctttgttagcttggggttataacatgattagagtttggactaggaattgcttagccatgcttagttcaactagttcacaacggggaaaatcatattaatgtttagactgttggttccaatggtgtagttggattagtgacaccgtttggtgttggttaattaaaataaaccacatggtgggctgtgggtgcatggttttgctggtcgcacccatggcagttaaggaccggttcgcgggatgccctggaagaacttatcgtacttaccacaagccagcgtgggcaacggctggacttgtagtgtatctttcccctagtcgacgcatccaggcaagggtgggcgtgatggagcggggcgggccctgcgacggcctctgtcgcttccggattcacctaggcacgagaggggactgcccgttgcccgctggggacgggggtgaaacctgaggtgtggtgtgcttggctagagggggttatgcgaagggtcctgtcacggcctctttccggtatgtcgtggtggcatgtcggcgcacggaaacgtgtcgtggggctgtgtcttgtgggtacagttgtacacctctgatcagagtaaaactattcgaatagccgtgcccgcggttatgggcggtcaaccagattcaccgtgattagtctcaccttagtgtaatcttttaatttggatagtttaggtggatggttgggcctgtcgcaacatgggttagcgttggacagtggatagttgatgttaattaattattacaactgtttaaatctttcaatttctgtttataaatgctcgctttatgcaaatgaaccacttcagctcttctttgatgattccctgcatcatacccctattccggtatgacttgctgagtacagtgggtagtactcagtcttgctctacttttcccaacctcagagttcgagttcgggtcagatgaaggtttctccgaggagtaggctttgtccgtgccgtcgaggatgcctgtggagtggtgttcccgctgcagttcaagtcgaggcttagctcctgttgtctttctttctttccgctgcatttatgtaagacttttaagatgtttgtaagacgtggatctgaatgtcaacattgtcgtttgtgtaccccggctggtcctggacggggattttaatgcacattctgcttggaattctattcgggaatttttgggcgtgacaagttggtatcagagccgaccttgatcgtaggacaagccaaatggaaaaacctaagagccctctgaatccttttcattgcatatgttctttgcaattggatttgttccgggaaaattgggatctgttcttgtggttcaagggaaaaatcttggtcgctcgtttaagtgagattcttcaaaacgagtcagtctagggttttagtaaaactattgggatttattcgtcagtcagttgggatttgatgggtgaaatgcattaggtcctagctcagtaacatgggttccaaggtatttatgctttgtttgttattattaatatgtatctaatttctcattattttatcgttatgtgagtcggtcttatttattcgctctcatgcaaaataatctatgcataaaattttcgctcttattcgtttcccttatttgagtcttttattgctttatttaaatttggagtctgagcatgcattgatcctacttctttgtcttctctagatggccggccacccacccaaccaccgcggagaaggcatgatcgactttgtggcagagttggcacgcatgacactggtggtgggctaccccaacgcgccagagtacacgacgattccacagctcagtggcgagcttcctcaccgtgttcgcttggaggtccacggctacgtgggtacctgcctagctaacatggtggtcgaggcatctggaggcacagcagatcatgcctgtcaggaggcagcctacttgatgatggccagactacgggagcgccacaactacatcttccacgacacggcgtaccgcttccacccccgtcgagccaacggtgatgacgtcagctccttccgtccgacagctggcgagaacgacaccacctttggtcacatgtgtgctgtgatgaggggattggacaggatgcactcggacctgcacaaggcgaccaaggccttgaacgatgggaagctcatgaggatcgtcgctctgaaggacgagatagcgcgcctgaagagggagaacgctcagctaaagggtcttccagcgccaggaggagtccggatccgcactacgccccgcaagacgacgacggcacccgtgcgcatccagcttgcgcccaggaacccacctccatccgcagctcccgcagcacctccagttccgcccgcagctccggcagttcctgcagctccagctcccgcgtccgctctctccttcgctcccgcatcagccgccaggggtccagccagtggcaatggaggttggttgtctgctactcccagtggctcagagtcaggcagtggcgagacttatctgccaggctccgggagtcgctcagagggacctggtgacgagcaggaggacgccttcgactccaccgaccgcaggagccgttccgagcattaggctcgttttccattagtttatcgactgtctagcttctgcttgttaatttgtgtgtttaggttgcttgtttggggttagtcgacggtcgatatcatgtgcctatgatatggctgtcctaataaggatttttgcttgctctttaagtgttttaattcagatcagaacaattgcagttttaattcctttgtaataaagcttagttcctgagcatctgtttttcttcttttccccgtctacttttccctccagatggtctacaccaggaatggtagccgcgcaacaggcgagggcagcaacggcgaagaacgcgctgacggtgtgcaccccagcagtgattccggcaatggtccgccaccacttcccgagaatccgacccttgcccaagttatggcacatcagactcagatgatggcagccatgatgcagcagatgcagcagcagcaccagcagatgcaccagaggatgatgcagcacgtcgaacagcagcaccagcagtttggtccccctccccctcagtccaagttgcctgagttcctacgcgtcagaccacccaccttctccagcaccacaaaccccatggaggcgaatgactggctccatgccatagagaagaagctgaatctcctgtagtgcaatgatcaggagaaggtcgctttcgccacacaccagcttcagggtcccgcgtcagcttggtgggacaatcacatggccacccgcccaccaggtactgaagtcacatgggcagagttctgccgtagcttcaggaaggcgcaggtgccagacggggtcgtggcacaaaagaagagggaattccgggcactccatcagggcaacaggactgtgacagagtacctccacgagttcaatcgcctcgcgcgatatgcaccagaggatgtccgcaccgacgctgagaagcaggagaagttcatggcgggtctggatgatgagctgaccaaccaactgatatccggggactacgctgactttgagaggctggttgacaaggcaatccgccaggaggatcaacgcaacaagatggacaggaagaggaaggccgcacagttcagggcacctcagggaagtcaccagaggccgcgcttcgctcctgggcagcagggtggacctaccaccatgatcgttcgtcagcaccgcccgttcaaccctagcaactttccccagggcgccagtggcagtcagaaccaccatggaggtcagtccaaccgcggtgcagcttcacgcccaccaatggcaccggcacagtcaggccagcccgcgcaagccaagaaggagattggagcaaaaccagggtcctgcttcaactgtggcgagcttggccacttcgctgacaaatgcccgaagcctaggagtgccgggccaaggtttatccaggctcgtgtcaaccacgcatctgcggaggaggcacaagcagcaccagaggtcgtactgggtacgttccctgttaactcaatccctgcaacagtactttttgattctggtgcgacgcattctttcatttcaaagaaatttgtcgggatgcatgggtttataagagaagaacttagcacaccgatgcgggttcataccccagggaatagctccacttcggttcaattcagcccttctataacaatagaaattcaaagatcaccatttctagccaacctcattcttctcgaatccaaagacctagatgtcattcttgggatggattggctgaccaagttcaagggagtcatcgattgtgcgaatcgcacagtcaccttgaccaacgagaagggggaaacggtagtgtacaaatcaccagactcaccaaagcaaggagtctccttgaatcagattgaagcggaaatcccagtggacaccgtggagaggaatttgaggaaattggaagacatacccatagtctccgagtatccagaagtgttccccgaagacctcactaccatgccacccaagagagagattgaattccggattgacttggcaccgggaaccgctccaatttacaagagaccgtacagaatggcggccaacgaactagcagaggtcaagaagcaggttgatgagcagctgcagaaagggtacattcgaccaagtacttcaccttggggtgctccggtcatttttgtggagaaaaaggataagacgaagaggatgtgcgttgattaccgcgcactcaacgaggtcacaatcaagaacaaatatcctttgacgcgaatcgatgatttgtttgatcaactgaaaggagctaaagtgttttctaagatagacctgcgatcaggctaccaccagttgagaattcgggaagaggatattccgaagacggccttcaccactcggtacgggctatatgagtgcacggttatgtccttcggacttactaacgcacccgcattcttcatgaatctgatgaacaaagtgttcatggaatttctggacaagtttgttgaggtgttcatcgacgacattcttatctattcaaagtccgaagaagaacatgaacaacatctccgtctggtactcgagaagttgagggagcaccagctatacgccaagttcagcaagtgtgacttctggttgacggaagtcaaatttctgggccatgtcattacagctcagggtgtggcagtcgacccatcgaacgtggagtcagttaccaaatggaccccaccgaagaccgtgtcgcagattcgaagttttcttggacttgcaggttattaccgtcgattcatcgaaaatttctccagaatcgcccgacccatgactcagttgcttaagaaggatgagaagtttaaatggacagccgagtgcgataagagcttcgaggagctcaagaagaaattagtatccgcaccagttttgattctgcccgacccgatgaaagacttccaagtctattgtgatgcatcccgtcacggacttggatgtgtcctaatgcaagagggcagagtggttgcgtatgcctcgcggcagttgcgtccacacgaagggaattatccaactcatgacttggaattggcaacagtggttcatgctttgaagatctggaggcactatctgattggcaaccgctgcgaagtatatacggaccataagagtctgaaatacatcttcactcaaccggacctaaatctccgacaacgaagatggttggaactaatcaaagactatgacatgagtattcactaccacccgggtaaagccaatgtggtggcagacgctttaagccggaaaagttactgcactgccctatgcatcgagggcatgtgtgaggaattgcgacaggagtttgagcatctcaacgtgggaattgttgaactcgggttcgtagccgctctggaggcacggcctacgctcgtggatcaagttagagcagctcaagcaaatgattctgaaatagcagagctgaaaaagaacatgagagtcggaaaagcccgggatttccacgaagatgagcatggcacaatctggttgggagaaagattgtgtgtacctgacgacaaggaactgaaggatctgatactcaccgaggctcatcagacccagtactccattcacccaggcagcactaaaatgtatcaagacctcaaagaaaggttttggtgggtcagcatgaggagagaaatagctgaattcgtcgcactctgcgatgtttgccaacgagtgaaggcagagcaccaaagaccagcaggtttactccaacctcttcaaatcccggaatggaaatgggaggagattggaatggactttataacaggactgccccggacatcatcgggtcacgattcgatctgggtagtcgtggatcgactcactaaggttgctcacttcataccagtacataccacatatacgggcaaaaggttggcggagctttacctttcgagaatcatgtgcctacatggagtacccaaaaagattgtatctgaccgagggagtcagttcacctcaaaattctggcagaagctacaggaagaactggggacccgtttaaatttcagcacggcctatcacccgcaaactgatggtcagaccgagcgagtcaatcaaatcttggaagatatgttgagagcttgtgctcttgattttggtggagcttgggacaaaagcttgccatatgcggaattctcgtacaacaacagctaccaggccagtctacagatggcaccgtttgaagctttatacggccggaagtgccgcacacctctcttctgggatcagacaggcaaacgtcaactgttcggaacagaagtattagcggaagcagaagagaaagtcagaattatcagggaaagattgaggattgctcagtctcgacagaagagctacgcggataaccgtcgaaaggagctcacttttgaggcaggagattacgtgtatcttcgtgtcactccgctccggggagtacaccggtttcagacgaaaggcaagttggcaccacgcttcgtgggaccatacaaaatcttggaacgaaggggagaagttgcttatcagttagaacttccatccaatatgatcggcatccgtgacgtgttccatgtgtcccaattaaagaagtgcttaagggtacctgaagaacaggctgattcggagcacattgatatccagggggacctaacatatgtggagaagccggttcgtatacttgataccagcgaaagaagaaccagaaataaggtcaccaggttttgccgagttcagtggagtcatcattcagaagaggaagcaacctgggaaagggaagatgagttgaaagccgcccatccgcacctcttcaccagctcctccgaatctcggggccgagattccgtttaaggggggtaggtttgtcacaccccgaagttttcctcccaagccaaatttgtaatttataaatgaccctaagaaaataccggtgcaaatcaggagaaaaccctaagaaagtaatgcaaataataatcggatttgacatgtggaattttttcacctctcctccgtcgaggttcgtcgccggagtcctcgttccctcgcactcgggtgagcaccacctctaccgccgccttcggccatggcttccggtcgctgtggctcatctccctctctctaatccctctctcctccttccttagggcaccccga

SEQ ID NO: 21280 - DNA, 753 bp, Oryza sativa
cccgcggttatgggcggtcaaccagattcaccgtgattagtctcaccttagtgtaatcttttaatttggatagtttaggtggatggttgggcctgtcgcaacatgggttagcgttggacagtggatagttgatgttaattaattattacaactgtttaaatctttcaatttctgtttataaatgctcgctttatgcaaatgaaccacttcagctcttctttgatgattccctgcatcatacccctattccggtatgacttgctgagtacagtgggtagtactcagtcttgctctacttttcccaacctcagagttcgagttcgggtcagatgaaggtttctccgaggagtaggctttgtccgtgccgtcgaggatgcctgtggagtggtgttcccgctgcagttcaagtcgaggcttagctcctgttgtctttctttctttccgctgcatttatgtaagacttttaagatgtttgtaagacgtggatctgaatgtcaacattgtcgtttgtgtaccccggctggtcctggacggagattttaatgcacattctgcttggaattctattcgggaatttctaggtgtgacaaccatcatcgaaaaatacgacggaagcgtcaaccccgccgagtttctccagatctacacgaccgggatcgaggccgccgggggtgacgacagggtcatggcgaatttcttccccatggccctgaagggtcaggcgcggggttggctaatgaacttgccacccgc

SEQ ID NO: 21281 - DNA, 548 bp, Oryza sativa
caacaccataccgtgcatccccgcacacgcggtgatctaccgttcagggggggcgtgcggcacaaccgcatgctcgagaagatcgcctccaaggagccccagaccaccgcgcagctttttgagctcgcggaccgtgtggctcgaaggaggaggcctggacctggaactcctccggttctggtgtggcagctccggccgcccccgggtccgccgctcggtcagggcggcgggacaggaggaggaagaagggctcggcccgttccgacgacgagagtcatgtcctcgccgtcgagggcgcttcgcgggccccccgaaaggggaggcctgcgagcaacaaaaagaaggaggccggcgctcccagcagggagcgcccgaccggcaagtggtgtaccgtgcacaacacctccctccacgacctcgcggactgccgcgcggtcaaaagtttggctgagcggacgagaaagtgggaggaggagaagaggcaggagcgtcgtgagggcaagaccccggcggctcccgcccgcaaccggcgaggtgaggccaagcag

SEQ ID NO: 21282 - DNA, 738 bp, Oryza sativa
actaatgaagtagcttagtgagattaaatcaacagaacaggtgcgcctaaatcaataaacatgaaaagcatccggaggaaagcacatacccatgccgagtgccgagagctccacttcgttatgcagctgcatgtacctctgcaacaaagcaaacatcaagcaccaaattagctatctccgtttcaaatccagccaaatccgcagccatgagccctaccgcaagcggggtttatctagggtttagataaaccccacggagagcagagcaaaaacccattccaaatatacaccctcataagccaagaaacgcaacaaatcaaaatccccacgaaacaaggcgcttttcttctcgcctctcgattaatctttctcccccacttaccttggcgaggttgacgtagaagaagagcggcttcttggtgttggagacctggatgcggttcttcttgtgcgcctccgccgcgccgccgcccgccccggcggcttctcccgcggctatggtgaggttgccgaccgcctccgtcacctcctccatggccgccgcccgacgagtccccgcggagcaccgtgcgcgagtgaaacggagagcgcgaggcggcgaagaagatgtggaggatttcggcggcgacggaggtaagagggaggggggagagccctatcgcccgcgtgtgtgggattttatacggggtagggttacggtttggaggctttcggtttttccccatttctgttttcgga

SEQ ID NO: 21283 - DNA, 2025 bp, Oryza sativa
  unsure (1)..(2025): unsure at all n locations
tgggaagcaatatgtccaatgggttggcactgctgctgcaacggagagacattgaaagcaaccaagtgaggtctcacactgcttttctggtgatgaaattagcctgcactggaggggaaccatatgtccataggttcttagaggctaacattgttcatgagctaattgacatgatgcagtgcaacatcaacgatctccaggattcagcatactatgcccttcaccagattatctttgcgaaggggggatcacttgtattacagagatttttacaagcaggaaccattgaaaaattggttaacttgcttgaccgcaagtcttcaaagacaaaggaactaacaatgcagcttctggtagacattgcggtggtcggaaccaaaccttgcatcgaaagaatgctctcgtcccaaatcatcgagaaatttgtggcactcgagaaagcaggtgggtctttcagtggagcggtatcaagatacgtgcaggggttgaacatgtgcaagaacgtccagtctgctgagagatcagtcatgaagcaacagattctttgaggaaaagtgnnaaggnaaaacagagataagaggtcatgatctggaagcaagtctagttgcctctgtggaagcttgcatttctgaaaaaggagccagcagcaggaggaaaaagtagaaaaaatttctgccaaatgcagcaactttaaaagtatagacctgatggcgcctgctgcacacttagataatttactcaaaactaattcaatagtgagatttcttcacaggttcaactttatagtgtgtgatcgttgggtcttggacgtaggtacatccttggtcaggattttagcaatgaccatccaaggaatcgtaaacatcatcaaaccaaatgacacctgaagaagatcccatttatatgtattgcttttcagaaatccaatctgatgtatatgatactgaaatatccttgactggttataccatctatgcaggttgacaaccatttttttttagtgcaccgtggcaatcgtttcgctacgttcgcaaatcatttcatgggtccaaatgcattttcatgagttgcaaaaacactttggataatgtttggaatgcatagaattttctggatcagctagagttaagcttaatgtttactaaatgttaaacttccgttaaatttccacggttttcctatatgactatcgggtgaaattcttttcatcagtcatctgtattagttgtagctattattgcagagatggatcacatcacaaccactcatcttgcagttgcattcctttcagatatagatcctctatagcactgtggtgtagtagaggtggctgacatatgggtctggatctatacgtcagtgtcagttattgccccactagtactacgtacaatccccgctgattcctttttttttttgccctcgtcattaggtttgcttatgcggaagtgctaatgggcgatcgatcgcccggcgacaagggtagcgatcgatcgcccggcgacaagggtagcgatcgatcccccttccccctccctccctccacctggtttccttttttggcaccgcattatttttctattttagtaaatttatgcacctaaagtttatacacctcaagtttacacatctaaagtttatacacctcaaatttacacatctaaagtttagagaccaaaagtttataagtcaaaagtttatatatccgtttcaaattcgaatttgaattcaaatatttttttatatatagtatttctatacatctaaagtttataggcccaaagtttataagtcaaaagtttacatacccgattcaaatttgaatttgaattatatcgggattcaaatttgaatttgcattcaaatattttctatatatagtatttttatgcatctaaagtttatatactaaaatttatagacccaaagtttataagtcaaaagtttacatacccgattcaaatttgaatttgaattatatccgtttaaatttgaatttgaattcaaatattttctatatataat

SEQ ID NO: 21284 - DNA, 5941 bp, Oryza sativa
acgccctgggtgcgccgccgctaggaaaggagggaagagggagcaagggaagagaggctgaggataaggataagacatacggttgagaggaggaatgtgtttttttagcgcctgagatttattttttatagcgactggctacgagaaccgctcttaggctcttagccatccgccagtaaaaatcgtgttatttttacaagtggcccttttaagatgatcgcttgtaaaagtaaattttcacaagcggtttctaatcagggacctctgattgccctttttacaagagtttcttattttgtccgccaaaagaaaataaggtggagccaggaataatcattttttagtagtgccacaagccaccctcgaccacggagcttcatcttccacactgccgagctccggcgaacgacggtggccggccgcctctgtctccaccatgaccgtctccacgcacctcgcgagcttgcccgtctcgagcaccctgtcggcgccggtgacggcacacacgctgacgccccaccatgcgttcctttcggatggggaactataaaggcgttactatatatttgtattcctttcggatgcagaccctctttagtgctcatgatatagtagcagtagttcaggtgtacgtcttatggtctcagtgtctgttattatactaatggtactgtagataattctcattgattcctttatagtgcccacaacattcatatcactttttaagtgcccacagcattcatctcactgataaactaaataccttcatatcatccagagatctatcaacctccattacgtactcggagccagaaagctaacaagggttcaactgcagccaagttcctgaggcattagctgcgtacttgcatagatagatgtcactgtaggttcccaattatgtgtgagcgtggctatcatggattaatgacatgtctacgccctgaaatgagcaccccaagtctacaagagcaagtttaatactcctacgagggaattaatgggatcccacaccataacaagaaatccatgtccttgtgcatgcaactgcaaattaaaccaatactacaatgaacaacggtgttgctgctaacaaacaacactcaatgccaaattgccaatagtgatgtgatcatgtgaaatacaaaacttgtccatgcaattgcaaaccaatactacattaatgaacaacactgttgcctgtatagcaagcaacactcaatgccaaattgccaatggtgatgtgatcatgtgaaagacaaagtgacaaacccgggatcccattgattccctcataggagtattaaacttgctctttgagacttggagtgttcacttcagagtgtagacctgtcactaaggatatggattttttttttcacctaggtgcaatcccacctaatcatttacatgtgacttgaatagatatggaaaaatatgaaagaaaaaaatgatagtattgttcacaatggcacaagtctatacacaatcgagcaagcctaaaatcaatatataatcagaaaaacaaaaataataaaattagactgtaaacagtacctatctagcacaaatagaacttgttattttctcgatgtgcatgtttgcatagtggtttatatcatctttatctaccttgtcaaattttatgaaatatttatttaattacataggtgacatagatacactatgttggattgcatctacatgtaaaaaaaatacttttcccgcatgcacaacgacaaccctcctgtgtgcacgttacgcggaggttgtaaattatttccattttcacgtcaaaggattaattttttaggttaatttgatcgatgccattgtgacttaatcaatttaaaaaaatattattattattcacgatattaataggatatgctactaacattttacaaaattaaaaccatatatcgtcgtcacgtacttttacctttttttaattcacttgaaatgacacgccaaccttagccattttgacacttagccagacatcatcatcatccctgacgaacggtgaattggattatctacgcaacatttgcaattcggtccaagaaagccttcaaattacgatccgacgagccgccctcggcgacggcctcccgcaccttcgccttccacgccaccgagctccggcgcacggcggcagccgcctccgtgtccgccatgaccgtctccacgcacctcgcgagctcgcccgcctcgaccaccctgtcggcgccggtggcggcgcgcacgccgacgccccacccggcgacgagccgcgcgttcgtgtcctggtccgaccactgcggcaccgccaccatcggcgcgccgcacgccacggcctccagcgtcgagttccacccgcagtgcgtcacgaagcacccgacggcgccgtgcgacagcacgcgcacctggtcgcaccactccaccaccatgccgccgccgtcgccgtcgccgtcgccgtcgtccctgtcgtcgctgcgcaccacccacaggtacggccgcgcggtggcggcgaggcctcgccggagctcctccttctgccgcctgctcaccaccgacatgctcccgaacgacacgtacaccaccgaccccgccggcttcgcgtcgagccactccatgtagcccttctcgtcgtgcctgtacaggtcgtgcgacgctctggcggcggcggctgcgccgccgccgtcgagcgaggtggcggccgggccgatgggtaggatgtcaaggtcagggaaggaggcggcgaggacgtcgagctctagttcctcgacggtgttgacgagcaccatcggcggcttgctgctgctccggcgatcgatgtccagctgctcgatcgtcgtccggacgccgtggaacgcggcggcgagcctggtgtcggcgaggtcggtgaagaagctggggaggtcgcggatcgccatcggcgggaggctcggcatgtccaccgtgaactccggctcgccggcgtgctccgtcacgagctcctcgagcccgtggaggtagtggtagtacacggcgagcatggtcgccggctggatccagtagagcacccgcgggatgccgcgctcgcgcgcgacgtcggccgcccaccacatcaggaacgcgtacacgacgcacgtcgcggggcggccgcgcgcggcgaggcggtccaccacgccggcgaacgcctcgcggccgacgcgcccgaacgtctccgagtgccgccacgccgcctcgccgtcgctggcgaacagccggaacccttcgtcgtagccgtcggagtacgggacgtaggagatcccgccgccgccggcgtcggcgtcgtggacctcctcgtcgggggcggcgagggacgggaacatgcgccggtgcgccgacacggcgacggacagggtgacgtgcgcgccggtggcgcgggcgaggcgcgcggcgagggctcgggccgggttgatgtggccctggccagggtacgcgacgacgaggaagtgctggcgcgccatggccggagttggggtagcttgtgttcgcgacaaagacaagctttgggtgttgagagatgtagcctgcattgcctgccagtatatatggctgttcttttacacctaagtggccaagtgtatgcgtgtaaatgtgtgataagtagttgtgaaaaaattgataagatttaacaagatatatcatgatgattaaatcactctgtaaacatataaatctaaattcgatctatctcttctctgctattataaaaattgaagatgtttttgccgatactttggtacatcatccatccgtgtatgagtcagtttttaagtttattcgcttttgaaaatatagaaggaatcgtataagaaatctctttaagaaaaactcacatgctaatcggactcctaattgcagctcatgactttctaacgaaaaatatatccaagcgaatttaacaaagtgaatttcaccttaattaaccaatataacaataataagattaaaataatattctccaattgcaacgcacgagcatttttttctagtagataaataaaataaaaatagcaatcctatttacggtccgagtttattaattttatctatataattatcgaatgaatttacataaaaatagcaaatcctatttacggtccgagtttattattttggtctatataattatagattgaatttactctcatatatttttatcgacttatatcatcctaataattattaccaatttattttcattttttctataggtatttaagttatgcaaatgactggtgcgaatgcactagacactagtgtagtaaaaaaccttgtccatgtggctgcatggtgcatgttactagtactagccagtagtataaaaagtcacacctcgtgatcataaaacacgtggttttagatatttagatggttttcgaactacaactttatcgttaatttctattgcaaattacttttagaaactcggctagtattatatatgaaagtagtattattttgaaataaatttaaatgcacgattttccacactccaatcagatttatgtttcttcttcttgtttgaaaggaaggacatctaaaccaatatgtttttaaccagacaccataacattcaagatctttatgtaacaacagtaggtttgatgatctatgagtggggtaaccaattcttgaaataaatttaaatgtacgaattttcatacatccaatccaatttatgtctcatgtaaaagaaatgacgtataaaccaagatattgatgtaattgtaacttaaaattcaagttttttaatataatggaattacattacattttttggaaatattcaacatattggtgcaataataatacaaggtttgatgatctgtgagtgggcctcgttaatttaagagcactcttagtttgttgtgtgcttgcatgtcatacttttaaagttacgtcggtattatgaatttgtgatgcatccaatgtgttgcatttaattttattcttccagtgaggctagtatttatcaagctggcacctgtaccttaaacatctgtctgagcaaccacccataccccacgttgtctctggaggcaacacgagcaaaacccacaaacgccaccccccatctcttctccttctttctgaccacttcccgcttcaccattatccaagcgagccaatgaaaatccgtgcagccatagtgaagacaacggcaaggcttctctaagccgagttgggtggccaccacaacccttaagctggaagagggtgcgggtcgtatgtggctagatctgacatcgacgcacccgattcatcgcactcatggtcgaatccatcaccccggcatcggggttgagagcggcaatgatgaggcagcaggatgtagagtgggtagccttggaggcgaggcagtggaatatggacatggaaatgaggcgaacatcttggaggctcaaaggcaatgtgcgaccagtggcaaggcgaggaggcgatggggtgatgctgcaccctctagacccttggtgagatgttggatggtgcactctcttccgtagctagcgtgacagaagggttggtggaggaggcggggctgacgacgccgtgcactagatcaatgttgaggaagggtgggtgtgcctatccccttggaagatctagctaaaatgatttcttttggtggtaggcctaagatgctgtcagtgtgatgcatttgcaacactagcatgtggaggcaggaggggggttgttggtacaatggtgtttacgtgctaatggtgggaggctggttgtggagcttggagcagcagaacatcagggtggccgacatgtgaaaatctagaacggtcttgttggggcgacaatgatgatgcctttgggagtcattttccgtcttgggagcattgtcaagacacctctcccttcctaacaggacatcatgatgaaatacttggagtctcctagagaccaggaggga

SEQ ID NO: 21285 - DNA, 30719 bp, Oryza sativa
agagggatctttttttgctcccaccctctcggtgttgggtggtatggttgtagctccttatgctagcggcggctggtcacgtacgcttagctattaccggtctagcgctagtcctttcctcagctgtgtgtgcaggcgacgtcggtgtgtggtggtggtggtgtatctatttttgtttttccaaatacaactttttagggttttagagttgtcatttttttcgctctattgaatgaaacatctgttgcctgttaaaaaagacaaaatttgctatatgacaccgcgatttcgcgattttacctgttggacatagaaaaatcaatctttggggaaatacattatcaaaatatggtaatttactgctagacatcatacctattaaaatattaatttctagttaataaaatagaagagagaaacaacgtgaaagtaaaaaaatacaactagacccacttgtcatattgtttctcttccactctagtgccagcagtggtaccttttttttacctttaaccatttcttcgtttcggaatttttctaatcatatataggatgtagtcttgctcgatcaggaccctagctttattgcgagccaaaacggctgcgctattctgtctttattaaccacttggctcagcaatatcacaagccacccagccatttacaaactctgggagggggtccaaccatatagcagattgacccaggtcccagctccttcccacttgggctaaattatgagcacacaaattacaaagatctagaaataaaagagatatcaaccctgaaaactctaactggggccgtgtttagttgcaaagtttttctttaaactttcaacttttccaccacatcaaaacttttctacacacataaacttcaaacttttccgtcacatcgttctaatttcttccaaacttccaattttagcatgaactaaacatacctagatgagaagcttttatttctcggaaaatagggttgcccgttgcttgatcatagtcctgactcctgctttttcagcgccgtgaccagcaatgccgaatcggattcaattccaatatcaactataagggctggtagtactggcacagcgaggcatgcatggttcagcttcggcacacaatgcatcatgtactggttccattcgtcctgtcccagcaaagcatacagcatccactatgatcacgtcccacaaaaccccatcctccaactttcgttgcttccaacttcctggtaggaatcatcaaagtttaagcttcaggttcccctccgaaggttgtgacgagcttacagtctcatctttttcgcttatatttatacttatcagccaaaatttaaatttttaaccttgaatttgaagttgattttgggattttttttcatcgaagtttattttaatttcagtttttgcttttaaatcattattaagaacatgtatataaaaattttattcataaattatttctcgtttgcaaatatgatatttgtcttatttccaaataaacaaaacgatgggaccttaatctccctcaccattgatttagttcgatgtaccatgtgctcagatttgtaattacaacactgcatgtgttaatataaaagaaacaattcggagtcggttaggtgaaaactggtacaggttaattcaaatgcgaggccacgtcggcatcatgggtgggcgggcgtcctcgccagtcgccactgaagaccgaacgcgtgcagcgggcggagagatgagatattagagactaggatttggatcaggtgcagtttcatcgtcggatacatatcgaacggcctggatcgagcagctactgtagcgcaggatactgttcacatagctactgtagctttagatttggaccgttgattataaaaatggacgctccacgttgtgtgcagttgctaacgttgtgactgcacctgatcccaattctagagactattcagttcacaggattttcaaatcacagaaatagaaaaaacgtaggaataatgtaggaatgcacgtacaaaacaaaggattggaacacatgaatttttcctacatttagctaaacaaaagaggatggagtgaatgtttttattcctatggaattagtacatttggaggatttgtggaggattggcatagtgttcctatgaaaaattttcctttgaatcctagaaaccgaatgaatgaatagtgcttattccaaaggaattgagtttcctttaggaatccttcaaaacgaatatgccaagtgggtttagggatttttttttggtctttcatgtcatttttctctcctatttaactagtaggaattaatattttaatatatgttgtgtccactgtcaattgtattccccagggatcactttttccatgcccgttggaatgttggatcatcaatatccaatgtccagttgatatactactccggccctgtttgaattgaggaatattttttaaccctccctcaaatagcctaaacagcctaaaaagatctaaaagggtgagctattttagggctatttggaaataacccacccaaaaaaactatcccacccaagatgtgctaattggggttatttcagatgaggcccactgaaaaaagtgtttttttctctctatctctctccatgtgaaggtacattaaaggttaaaaagctcttaaaataacccttggatccaaacaacttagaactatatctatgtacttaaaaaatagctttcaaaataactcttggttagttctccaaacagaacctccgtcccatagaaagataactctagctataaatctggacacatttcataaaaactaatcatagctacgatttataggacggaggggtggatgatatgtgcattcaataggtagaggacaaaaaattgatatagatggaacaaaagttggcctgagatatgatatgctcattttggcatggctctggcctgtagatttttgtttaaaaaagactttataaaattaaagttgcttgattctcttattttaatctatggataaaatgtctcacgtaacaaccttaatctaacggtagctctaacttcaagattttttttagtagactatgtacatctgatgattaatatggatattttttattaagaaacagtctattttactccatgaaatatttcatcggatctaaatgatctatggactcattttaaaccctaaattattaaaaatgattcactttacccgagccacattgaaatagcgaggaggaagataaggcctagtcgcggacatcaactcgtggagacgtaatcggtggatcttagtcggcgtgttagctgttagaacatctaacctgcttcccattataattaatgtgatacttttcaaatatacacatataaactggagtaagttattactcgaacctaaaccagtataagaatctttctctttgtctccttacaacaattttgcgtatatcttggtgccgatgattccatactctacaaatatcgttgtcggatataacccgtcgccttaaacaataggaaaaaataagaaaaatattaaaaggtactcatgcaggtgtcgatgctacaaactttcaatgcaaaataccacttatatatagagaaacaaaaatgagaaagtgttaggaagtaaagtgaaccctttttaatgcttttggatggagggttaatgtttcccgataaatagatcagagaagtaaaatggaccatttttttcattaagacataagtatacgaattgaagtagcctagcgttttcagtccggcacttatggtccatgtgaaaaaataaatataccccgcgtggagggggctggttatgatttgttaaaaattgttgttgttcactcaataagtaaaataaatagtccctcctttttgcttgcagttaaatatagaccatgatacttaaaaaattaatttatgaataaaacttttatacaacgatttaaaagctaatataaaaaataaattatgataaaaatttaaaatcaacttaaaattaagatttaaaaatttcaattttggtttagatgaataagctgaaaaacaaacggtagaagtctactaacagatgttttttaacgaacagcactagatagtgttgttcattgaatagagtaggaaaatattacaagactagcactcaagaaaacaatagccaggaacgaaaaaagaaaacatcaccatcacgcactgacagcgcctacacacaacccaggagaggctagcaccgggccagccgtcactaagcatgaccgaccgccgctagaccaacaacgaagttatagtcggtccgcccaaaaccaaaccctaacagacaagcaccacactcaactctatccacgcctttgggattgaaggagagagggtgagagagaagaatagaaccgctatcccccacaagacccgccaacatggtcaatttgcaaaagctagggtgccgctgcaagaggacgaacatctagagagatcacacacaagttatcggagagacgttttgactagggggcctcctagatgatgtctctagggagaaaagcgacgataagtaccaccaccgccgttcgtcgaggtctcaaagagaactaggagaactttctgctcgacagccccactagaggaagagggacaactcgacaacgcccccagaaggccggagaacgacactcggaatgtcgtcgttgacggtccagcaaggccgggctaggttttcacctactgcccatcccctgtcatccgaagctatcactccatcgctccaccacccgtcatccttcgatagtgcgtggacactattgaaccgacccccctgctggccaacctccgcatgcctatgttccatacccaccatcaccggcttccctgctgccacgacgctagcctccctgccgtcgccgcgttgacctcccacgctgtcggtcgggccgacatcccttccgtcgcccacaccaacctctaggcaccaaccgtgttggcctctcgcagctatcactgactctcccacggccgctaccgctgtcgtgtttctaccgcgccgctcggccatatctgtcgcagggttccgcaggatcgctcaccgcaccggccacccgccaccgtcggtcatgcctcctcctcgcgctcaccgaccgctcctttgcagcctcccggcgaagacgccgctgggacgtcgaagccggctgaggggggtggatccggccgccttgccccgatcccctctgcctcgagccgcctcatgctacctccacttccatcgtcgacaagtccacaccggtgaccgagttctgaacccgggctagaggcattagatctggccggccccaccgttgttgagctcgcctgggagaagtgaggatgtgggagcaaccgcctcgtagcctgtgcgtatctgccaccgcaccgccatgacagcctcgccgcacgccgccatcttgctcagccttacaatgcgcatgcgccaccgcaccgtctctctcgcacaagggatagctcgccaacgagaaaagacctcaccacgactatcatggctcaccgcgcggttgtccagcgacttactccgacaacggcgaggtggatggccgagggaggggtgccgcagcgacagctagggtttttttagccccaagccacccgcgcggggaacaactcgtgggagcgtggaaaggttcgcccataggccctgctgacaaatttacttgacttactgtttcttcttattttctagtcatccaaccttcaacaataaaatctacttcctccgtcccaaaatataagtatttttgactatgacacggtctccgagatgctattttaaccaacaatatctataaaagtaagatattttaaataaaacgagttgcatattatgatagtttatttaatgataaatctagcaacatcaattttacatgattgatattttttatatttttgctattaatagttaaagtttaaaatgtttgacttgttactatgctaaaaatgcttatatttttggacagagggagtatgtcagctactttgataatgcaacattgaaaactatatttggctgacacacacaagcagccaaaccaaacaaagattatgacgatccaactcttcgtttgacagtcaaaaaaaaagaaagaaaagataattttctggagtaagtgagtactacagtctacaggtacaactgtgcgagtgagtacttctttatggataaagagattggcatgtgacgagtagatgagtacgagtacaatctcgtcagaacacgcaattgttcaccgtaccaaacacttggagttggtgagaagtatttgtgtctgtgtttaattaatatacgttgagatcacggcgaccggcggtggtggttggctcgattgatactactccatctgacatcgtagttatatgaactggtgcttgtttaaattatatgtcaaatttgattttggatttatatattttgaatgaagggagtagtaccgcgtggttcattttaatatggcacgggtacgcagcacaaaaggatctacctttgcccacccaggttgaggcattttccaatttccaattatctttttttaaaaaacaatttccaattatcttcaggtttatttacccgatgttctggttcattgcctgacgtgtacgtggatgctttgccctcacccgttcacatgccatgatttttttttcattccctacctacacgaagctcaaaacaaatctcactagcacaaaaaatcgttttcccaagcaacaaaaaatcatttttttaggtggagaaaggcctgcctgtaagcacaagttttcgcaggaggcatctccatcttcgcaggcgccatagccacccgcttgcaaaaatattttgggcgaataaaaaaaaattgacaccaccccaacctcacgcgcgcccgccctacccacctctatctaggggtgaaaacggagcggattcgatcggatagtgctgataccatatcctaaaccatattttttaagcgaattcgaagcgggtatggatgcggatgcggagcggattgtttcggatgtcggaaatagtgcgcaatcagttcgaaaacggattaaatttatcggatgttacatgtatatgcaatcaatgcaacatcgagttagcaatccaaggaacaataatacaataatcaataaatgacccatcgtaataattatacgattaagtgctaaacaacatgaatacatgatgtccataatataaaaaatatagctacatgcgacgataaaagccttagactaaaatatctatgttttttttgagaattacacagtacaacgcagacactcacaacacacgcgcactcacccctatgaacacacgcacacaaaccctacccctatgagcatattcgaagattgggctggcaaatcctggagagattgacagagttaccacaggagccgggtacgtcgcctaccactgaaaggacaacaccgttaaatcatggaaagttcgaccactgaaaggacaacaccgttaaatcatggaaaattcgctcccatggggagtcgaacccaggacctcaggtgctactgaagctcttttaaccactaggctacatgcccttttgtctaaaaaatctatgttaattgatgaatttgggcattggatataccaacttatgttatatgcaatagatagagtggttatatatgttgataatttcggattatctgacaaacggcttatcggataatccgacaaaaatgtcggataatccgcatccgccatattttagagataccatatccgcatccgcatccgcctcatactatcctcattcgtatgcgacagatttctaaaaacccataccatatcctcgttttggagcggagcggatgggatattatccgatccgtttttacagacggatctcttaagaggtccgcctgcaaaaataaaggtatttttgcaggcagatctctcctacgaaaatctattttcgcaggcggacgataatctcgcccacggttgtcattttcataggcagccatttagctctgagaggcctacccgcatggaaaaaaatgtcatcgtctataaaaatggttttttaagtagtgtctaactgttcaaattacataaaatgatatagtcttcctctatttttaatatataacgtgattgactttttaatatatgtttgaccattcgtcttattaaaaaaatatgtaattattatttattttgttgtgacttgatttattatcaaatgttatttgggcgtaacttttttataaaaatttaccaaaaagttaacgatgtcatatatatatatatatatatatatatatacacacacacacacacacacacacacacacataaaaaacgaaggtagtactaaagtttttttttatgagagttcatcgatagatgtacagcaaaatcgtgttggatatatggtttcggtcggtacataagtttatgacaaacaaatggtgaaggcctaagatccataggagtagtgggctgctctcctccttccagcccagcaaagaaagaggttcggcgcagcatcacggtcgtcggctgccccaaccaggcccagtggaagccaccgccgccgccggagaagacgagtcccgggcgggcgcaggacatggcgccggcgtgttcaccgtgggcgtcgccggcgatcgagttctctgtcccggctatctttgcgcgccacccactggtagtgctcttgccgcttgctcaccgccggcgtgctccggaatgacacgtcgtgtttgtaacaggcccagtgtggatagacataggtaaattcactttgattgaacgaacttttatagcagactcccactcatgaggcccagtttagtttccaaaaagtattttctaaaaacatcacatcaaatctttaaacacatgtatagagcattaactatagataaaaacaaaaaactaattgcacagtttgcatggaaatcgcaagatggatcttttgagcctaattagtccatgattaaccataagtgctatagtagcccacatgtattaatgatggattaattaggctcaaaagatccatctcgcggtttccagacgagttatgaaattagcctttttatttgtatccgaaaaccccttccaacatccgatcaaacgtccgatgtaataccaaaaaatttctttccgcaaagtaaacagggcctaaatttagcccatgtgcaggccaggccaccagcccaccactcccactgttgttcgttcgttcctcgcgctatcagagcaataagtttaatagtataacccaatgttagttccaattcatcaatctaatagtctattaatgcaatagttggttactatactattaatatattaatatatgatcccatctatcatacacacattgcgttttgaagtctgtgctatagctggatacagatctatagcccgctactcttctgtcttttcttttatctttttaaaatatatttatagccctgctattgtacgtgctcttttatctttttaaaacatatttatagccctactattatacgtgctcttttatctttttaaaaaatatttatagccctgctattctacgtgctcttaccgccgtgaatgcgagccctgcgacgcatggcgacaacacgcgcatctctcaccgatcccctccttccctctcccgcggcacgcgcgccaggtgaaaagcgccccgcgcgagtcgctgacgcatgggccagagcgtacgtgggccccgcgtgtcggtgtgatcggcgggggcgggaacggccgcggcgcctccacgtagcgggcctccgcgcctttggatggcgccccgcgctgcatggtctcgcgggtggccacgtggaggcgttcgggggcgtcggatcttgccgggttcgacggctgggatcgcgcggcttaaaacccaaaccccacggacgcaataaatgccgtcgctggaggatgggtttccatgtaacccctctatctctcgtacaatcatcaaatagccccttttccctctccacttagacaacgtaaggactatattgtaaaacagtaagggtacatatgtagagtacttgtatttttaagggggttttttgtgaaatatacatgtggagttaaagccaaaaagctctcatggtccatgcttcacgcaagcagcaaggacgagaggagaggacagagtggggaagctgaagctgaagcaagcggaggagtgcacgcgaatccctcctcgccggcgagaatgcaggagcaggcgacgagctcgcggccgtccagctccgagaggtcgtccagctccggcggccaccacatggagatcaaggaaggcaaggaagcgccacttcgatcccttctccttccctttcttgatttccattttactgttcctctttcgggttcggattctttggttgattttcattttacttctgtttcttggaagagaaattttttttggttcttgtgtggtatgggagattgatttggttttgcaggaatggagagcgacgaggagatagggagagtgccggagctggggctggagccgggcggcgcttcgacgtcggggagggcggccggcggcggcggcggcggggcggagcgcgcgcagtcgtcgacggcgcaggccagcgcgcgccgccgcgggcgcagccccgcggataaggagcacaagcgcctcaaaaggtgcccgcctttatatttactagagtacttttgatagttcttccctttgtgtttatgtgtacaaatacagttgttgttttgcttataattgttcatgagattaaaccaaaagggctgtgatcattggagtaagttgtgtatggctatctatatttaatacttagtggttagaattagatcatattggattcgatggagattaagatatgaaaatagttaatgcttgttgagcttgggctcatgcatggtttaagattaaacaatatggagcaagaacaccgaatttgcgatgataatcgatcgaaacggcgagatcttggagtatgatgtgttgattggagtttggagtttaggagtgatgaagaaaagaggggttgaatttaaatcctgatgaaatcgatggggttaggttacatatctctgtaaagcattgctcctagctagctagctttcatggtgagttggacgcagtgtacgatcgatgtcatgtgtcgcatgcgtgctcatctagatagttaggttgggaaacaagtggatgggaagagaacagttgtgggcacatcatatatgatactattgatatctcactataaattgccccccccccccaacctatctcattcagtgttgcaaatcgcaatgcatgctatgcagccaattttgagcttttgatatcaatgggagtagtgttatattcttgtaaaaaggaaaggagtgtcacgttatgtttgcatcagtataatataatgtgcttccattatatcaacagtttgttaccacatgaaacttgagttagttatctcagtaacatcaacagtatgactgcacactgatacacttatataaacacataatattgtaatggacaaatatattattttagctaagactatactatgttaacctgccgctgtttattgtaacaatttgtttgaattaacataataaacttcttgttttgccatcccaaaggcaggtgacagctttctttgtgtcgtatttgaactctatttttgaattggttgtcataataatatgaattgtatgatagcttagagtatataatctatttttttcaattgtttggtcctgcaattgtaccacgagagtatggccttttgatttgcctactgtaacttctttgaaattcaatacaatgatatacaaatcttttgcatattcctgaaaaaatctattgtaaaaattgtcaatctccaaatttctattctttggtcaactcgttttaaattaatacatttgtgtacattttagtttagaataaagatatctgtgtacattgttagtaatgtaggattggtgtcaaatatggtttgcttattgtgtctataaatattaaggttgctgaggaaccgggtatcagcgcagcaggcaagggagagaaagaaggcatacttgaatgatcttgaggtgaaggtgaaggacttggagaagaagaactcagagttggaagaaagattctccaccctacagaatgagaaccagatgctcagacaggtaaaattcctaattctaatgcatctttttcgtgtggtacaagttttacaagtttaaatagttgtttcctgtttatttttcttcttttaagcaccatagaaaatgattcctcagatgaaaaatgttccggattccttgtgcagatactgaagaatacaactgtgagcagaagagggccaggtagcactgctagtggagagggtcaatagaggagaagatgacagcaagtagtagaacactttatgctcgaatatgcttctgggtttgaattgatcctagaacttggaacttaatttggttggattaacccagggaaaaaaagagaacttttacggtacattcttcttgaagtatatactaccagtatatttgatctaacggtgtaaattcatctgatatttctcccaattattctgcagtataaattgaatagggtatatttatctttttatctatttgcgtgaggggtaattttgtaaattcgcgtttctcacctagtcagatctggccttttgcgcccagtcaaagcgattttttcttgaagccgcgcgcatgggcgaccgccgtcgctgactgcctctgcgagcacgccgcgccgcgcggccgtcgacaaccacaatcggcgtcgccgccatcgggaatcgattcgatttccttccccctttcttcacccaaaacctagttcttctgaaaatccccaaatcgggtctgcgggaggcggcaccagcgggctgcggaggtttgcgggaggcggagggcgacgagaagtttgtcctcaacgggttcaccgccgcgaatctcagcttcgatggcatggcgacggtgaccccgaacgggctgctcatgttgaccaacggcacgaaccagctcaagggccacgccttcttcccggcgctgctccagttccacaggacgcccaacagcatggcgatgcagtccttctccacggccttcgtcatcggcatcatcagcgcgttcgaggaccagggcagcggcagcccggcggcggcaggtggcagcggcagggcggcataattagcataactaatgtaattagcatggttacataccaatataactaatgtatgaacaattctgtgactactatccattcaactcccacgttctagtcttccagagaaggccttgaaagaagaatgttcagacagcacaattttttggagcaatgcagtatagagttgggctgaaataaacagctgttacaagctcaaattacaaagcaaaaaattgctcaaattacgtggatcacgagatccagaaaaaaaagaaacgaaggaattaaaattcacccgatggaaataaatctctattttaaatgactaaacaacccttttaagatttttaacaaataccaaatctaccctattatatactggtagtatatacttacattacaatgtactgtaaaagttctcggaaagaaactggggtaattaaatgggaaatatactaggttgtgcagatggtgataatataccaaactacctgatgtttaggactatttatgttacataatccaatgttcagaattccgaaatgtagtgttcgatttgcgttacatttacatgacatttttgtgacgaatgcatgcacagtctacactgaacttgatttcccttgcttctgcacagttttgtgagttcagtaattgtcaatctctgtttcattttcacctttgctttggttgcatttttcacccaggctgatgcgtactagtgctcacagttagcagaacccatgaatttccatgcaattatcgcgattaacacacgaaatttgccggttttttcacgcatttaacgtcgttttaggctttgataaatccaaagtcatgctggaacagtaaaataaacatcaacggtcaagtgtcaatttaaccaggccccctttgaaaaggtctctcgtgcatatgccaaaatagatctgaaccactcacagatgtgtcgacacattttaggatgattttagtcagatttcttcttcattttaatcgataggcatgtgttgacacgtcttgggatgattttagtcaaatttcttacgatgtgaacatcactaaaccgtgcatgttgtttttttttttaccgtcctccctgactctcacaaattttcactcccttaatttcaaagtgaatcaacttctggctatgtatctgatctatccaactttttaaaaaaaaacttctgaatacaaatctaatctatctacctgaaaaataaattaacttaaattttgcacaatcagaaccccacacatctggtgttggcaggtgcagccctgtgacctgatacctctttcatccatccattcctccccttgttttgatcccaaggaactcaagctgatggcgtgtgcttgttctagatcagttacaattttgacattaatctcttggtgttcttctctttgtctgcttctgccacctttgaaaggttccgtcatcatgcaccagtttctttgctaaatgttctttgctttgccatcatcatgcagaaggggtcaatcatgcataaccagaaagtgatgctactggctaggaaaattgcaatcaaggcctctaataataaagaaatcaacttgcaagaacagcagcagtcaaacgtacagacagcaacaagaacaaagaaactgtcactacctagaggggagtagaagctaccttaaaaaaaaagtcacatttgaataacagaaaggagaagagagcagcaaagcatgttgttatggtgtgcataaaaaaaattaaaaaaataacccaggggattatcctgggagagagaaaatttaacgaagcaaacaaacaaaggtggttgacctgtgaagcaagagaaagggatgaagatttgtccatggccgtgctgtaacctgagactgtgcagtgggccccacatgtcaggccccaggcttttaatgtgagaggtggtctccatttattagtgccaccaccttctcatctgatgtcttctccttgacccttcttcttcttcttcttcctcctcctgatgatcaaccagcataaaggagaggcttctggttgggaggttttgcagttctcttaccctcttctgttcatgaatcatgtgcaatgggtgttggagctgtagaagcatggtgatgattttggtgtgattatgtatatatatatctgggtgattggtggtgagtagttgttcttgctgctgtggtttcttgatactttgcttcagggacaggccatggacagaaggaaccaagctcctccggtgagtagtcttactttcttttttttttcttctctgtatttgttttgtgtttttctccatgaaattgttgcatgtttctgcatggatgtgccatcctaggattgatttttttggtcagaaattttagagggtttcatggctctgtgttggactgaatttttcagcttgcttggctggtgtttttgtgttagaagaatagaagatacaccatgccttgtgctcatcagtgtgaactgtgaagttgttttggttgatcagttcacatagagttcctcagagcactgcatattgaaagaacctgaactgtttgtggataggaaaatccatttcatacttcaaattgtaaattaattaggtcaacaaattactgggtttgcatgattgtatcaaagcaactttctttttcttcaagggaaaatctcttcaattagccgtgcaaactccaaaattagcaggatggtaacactagatttgggaatagttgggagtgctaatcatttattagaaggttagaaattgaaacaacaagagacatggtcccccacagggtagttcaactgtttctgtaagtagctgttgtttcatgacaccattgtctgtcttatgttcttgtctcatcattctaggtatcattcaccaattagcagtcacttttaagaaataaaaaccaggatttttcatccccgaaaataaccaaaattatgacacatacgcatccattgcctgaaaaacattttgcctacctcacattgttttttttctttccaaacacgcaaaagattatacgcgacattgttgcactacaaatttgcatgcaaaattgcaatatttgtgtagctacccgaactccttttcttgtcttgtgaagttgtgattgcaaaatgtaaattatgtaaacaaattaccaggtttgtatgactgtaccaaaaccaaaaaaaaaaaaaatccccaaatggcacaaaaattataacacacacatccattgtgtgaaaaacattttgcctacctcacattgttttttttttctttttcgaacacgcagaagatttacgcggcatttttgcactacaaacttgcatacaaaatgcaaaattgtgatattttgttcagctacctgaaactctcttttgcttgtgttgtgattggatataggttgatagctcagcatgcttgtgcagagtggagagatcggtcgccggcgccgccgcggcgaggctgatgccgagggcgaaggcgtgcgcgcagccgagcctcagggcgtccatccacccgctcaagcccaagagatcgccggggcgcgaccaccgcggcggcggcggcgccggtggcggcggcggccggcagtgcccgctcatcccgggtctccccgacgacctcgccgtggcgtgcctcatccgcgtgccgcgaggtgatcactggaagctgaggctggtgtgcaggaggtggtcccggctgctcgccggcaactacttctacggcctccggcggcggctgggcctcgccgagcagtgggtgtacgccgtcaagcgcgacggcgaggggcgcgtgtcgtgggacgtgctcgacccggcgcggctggcgtggcgcgcgctgccgcccgttccgggggagtacgccggcgccgccgggttcggctgcgccgtgctcggcggctgccacctctacctgctcggcggcagcgacccgcgccgggggccgatgcggcgggtggtgttctacagcgcccggagcaaccggtggcaccgcgcgccggacatgctgcggcgccggcacggcttcgggtgctgcgtgatgggcaaccgcctgtacgtcgccggcggcgagggttgcggcgttggcggcggtggtggtggtggcctcaggtcggtggaggtgttcgacccggccaagaaccggtggtcgttcgtgtccgacatggcggcgtcgctgatgccgttcgtcagcgcggtgcacggcgggaggtggtacgtgaaggggctgggcgcgcagcggcaggtgatgagccaggtgtactcgccggaggcggacgcgtggtcggcggcgcacgagctcgatgccatggtgaccgggtggaggagcccgagcgcgtcgctcggcggccgcctctacgccgccgactgcaaggacgggtgccgcctgcgcgcctacgacgaggccgccggcgcgtggagcggccgcgtcgacggcgggcagcacgcggggagctcccacgcggtggaggcggccgccatggtcgccctccacgggaagctctgcgtcgtccggaacgacatgagcgtctccgtcgtcgacgtcgccgccgcaagcccgcggtgggagacggtcgtcggcaaggggcagatgaaggcgttcgtcgcgaatctcctctccgccatcgccggcggccgcggccgcgccaagaaccgcgtcctccattgccaagtcctcgaggcctaagcttcacattcacacagtgatcgattctgctgctctcatcaacgttcagaaatcagatttttcttttttttcgtgttctctgcacattctattgtggcaaatacatctgagctgaagaactccaaagcatgatccgattaatgtacagtattttttctctttttttttggggtttcttgaactttgatcggtgtacagttcgtacagaaatgggagttgtccggtgaaataatcatgaaaagatctgggtttcttttgggtcgttgttgctgaatcgtcaaggaaagactaggcaagtttgtgaatgtgctcctgacctgacaagatgttccaagtcagttgcagtccatgaccacgcagtgaatgcgactgacacatgacgaggaagaaactcttctatggatgatttttcgtaggatcatatgatatcatatcaccgtcgacgtctcgacggctagtattctagaagtgcgaaaatgactgcacgaaatgttctaaccattaacaaaaatactcccttgggggatgatatgatggtgaaatcgtgggtgcatgactccaccaactaggatttaaatccgtgtgttagcggataggggtgaaaatggtcacggaaattcccaatcgaccgagcgccgttttcgaccattaccctttttggctatatataaattttgttttttctaatttctttctaaatcatagtgatgtcgatattgagtagtttaaatgataattatgatcaattaccggttaaatcaaatgtcgtttccaaagagatggtacgattccgaccattttcacccctaagtgcatatgcggagtatgagtgtaattttgcatgtgcagtggtgtgtatccgtcatgtaattaaaaaaaatactccctcggattttaaatttgagagaatgtcaactgctagtaccaccatacaaattataagagcttttttttttaagcacagacgtaaaatgcttgtataaacgcacacgcgctcttccctataaacaagaactatattaattttacagtctagaaacctaaaagttgtttcaattttcttgtgtaatccaaataagtttcgattttgctatatatttatcgataaattctgtcctaaatattacagtataatcgtagtgtaacttttatacaattacaccgtgacttttatgtaactttcgtgtgattttgaatagttggatttgcttcatgattcgtgcaaataaggaagagaaaatcacaacatgcatataggtgaagggattcggtcccacgacctccgattcgtggaaatagcatgataccgttgggatttttaaaaattgcatacaagtaatattctagttacatgtactgtatttatatacattgttgggttctcatctatccttattagagcaggtacaatagtagactataagccatctataaacacatttcgagaagataaaagatgagagagataagcaacgggctacagatttatagtcagttgcagcacggactcaagatgtatgtgtgtatgacagatggaaccagatattaattatgtagtatatatttatatgtaactattatatgaattggctattaaatcgcctgcagatgatttggagcccatggtaggctatactattaaacttgctcttatctcaggcacaatatcttcccagcacaccaactcattcggcccatttgacggaggagcggaagtgaacaaccgcgccacgccatggggcgaagcgagtcggcgtccgcaggatttccctctccgcccgtgccctaaaccgctcgccgccggcgacgttgcgcccccgaccgcgagtgggccggcggcgatgtccggccccgtcgttcccctcgcctggacggctcaagggccctgcgagccctcccctggctctggcccgctccccgtttccgccgccgctagcgatccgccggcgccctcctcgtcggtgcccgccggcggtcgtgagccctccgctagcgggctgccccccgcggtgactcctcagcttggggtaatgacctttggtttggcttgattttgatgtcctcttgatattgctcattgttcatttgaggtatagcagtagaatgattttgcttgcagcaattatgtactttctccgtttcatattgtaagactttctagcattgttcacgttcatataaatcgtggacaatgctagaaagtcttatattgtgaaacggatgaagtattttattaaaaaaataagtggacacgtgtacctggatatttctatgttcaatatacacgaatttgatctttcggtgtcaccaaaccaaattattccttgacagtttgaacattgttagtatttttgttgtccctaaagtgaacatctttcttatttttattttaccatccatgttgtgtaggatcatgatcaaggtggtttacctaactgtgtgccaaaagtggggatgacctttaattcagagaacgaagcttatgatttctacaactcctatgctagaaatgttgggtttagtatccggaagaaccacgcaaatactagggcggatgggagtctttgctccaaatatttcctgtgcagcaatgaagggcagccggtggcaagcactacccagccggggcggaagaaacgttcttcaacaagatctgattgcaaggctcgtcttcagttctatatttcccgagaaggtatctggacagtgcagaaggttgagctcgatcataagcactatctcgtaagtcctgataagtcacacatgttaaggtcccagcgccgtttgacaccgtcatatcaacagatagtgaatgaaatgcggcaagaaggtattacagcagctgatatgcaaagagtatttcggcaatggtccaggggagctgaaaatgtgcatcttctgaagaaagatactcagagaaagtacctccaaccaagttatgcacagaaattgcttgagtatttgaagaacaaacaaacagaaaatccttcatttttttatgcagttcagctgaatgatgatggtcgaatagcaaacttcttctggacagattgtcaagctattgtggattatgcttgttttggtgatgtcgtgtcttttgatacaacatttgaaacaaacaagtttgaaatgccgtttgctccatttgtggggactaaccatcacaaacaacccattttgtttggagcttcgctgatatatgatgaatcttcagagtctttcaattggctgtttcaaaccttccttacggcaatgtctgggaagcaaccggcaacaattttcacagatccctctgctgaaataataaagtctgttaggttagtgtttccaaactcaagtcaccgcctgtgtttgcggcatatctgtcataatgctgttaagcatttgaatcacgtaatttgcaaccatccagaatttctatctgattttaagagacgtatctatgaagaaaggtctgtaacgttctttgacttgaagtggaaggaattggttaacgcatataatctagacggcaatgattggatgaataatttatatgcaatgcgtgaaaagtgggctgctgtgtattcccgtgactcattttacgctgacatgatgacaatccaaaatgctgaaggcacaagtgatgcattgaagaattttcggaggaaactctgccttccagaattcttagaggagtatgagaagtgcataactagtttccgccaaaatgaactagaagcagattataattcccgtcaaaccagtccggttccctatgttcctgatttgcctatgttgaagacggctgctgagtcctatacaaggaatttgtattcgcattttgaagaagaattcaaaaaattgttcactctgtcttgttcgttgctatcacaagacagaacaatcagtacttacaaattgacacctttaaattctgaagaagaagcatatgttgtttttaattctgaggatacaacagtatcatgttcttgcaggatgtatgagtgcacaggtatgctaccatattggttatgtttccaaaacgtaaaagtttgattttcttgctataatcggagattgcatgtttttgtaggtatgctatgcaagcacgcgctgcgagtccttaactacagcaatatttttacattcccctcacactatgtttacaaaaggtggacaaaatatgcaaaagccggactatttggctgcagaaacaattcccaaagcggcaatggaagttcgatgttaagatgtgcgcgtatatctcaaaagatgcactcagttgctctaagatattcgatgtcagaaaaggcgcttcagtttttggaaagtggggtagataagttgacatgtgaagtagaaaatttacttagtcacataaacttaaatggaaatggaaatgataccggtcaatcttctggtttttgcaatggtgcaatggcagaaagtttaggccattcagaatcaatgtacagcgaaggggcctaaccgcctaacctgcaaaaatactagaaaaaagtgttctcaaggaggaaaatggaaatgcactgctagaaggagaggcacctacaatcaactgttattttctgtttatgttaaattcaaatctcagttcttaactgtgtgaggcactactccaaaaaggaaaaaaaattcaaagagaatcatgttggtctcatcatagatagagggcatccaattctctagttgctgtagttctcttaactttttctcctctttgttcagggatgaatcatacataattctgggcatatcatcagctctccatctacttggagttaacttcctaccacttccgtcttcgtccaaagcgaggcagagtccataaaactctagttcggtgatttgccgatgttgtttcgccatctgcgtttgaactgctgtgcttaatttggtgatccgctagaaatgcactcaaaatatagcagcgtaggatagttctaaaaatgtccgatatgttatattttaggacgaagagtacatgtaaggaacaagtgcgtaggagcagtaacttgtttaggagtagctctgcacaatgaaaatagtattctggttctctgttgcctttctgcctatatacagtactccctcggttttttaataggtgatgtcattgagttttaaacatacgtttcagtttcatcattcgttttacttaaaaattttatgcaaatcatgcttaaaagactttaagtgataaaacaactcacaacaaaataaattgtaattacgtaaattttttgaataccacaaatggtcaaacatgtgacttttgaaaaaagtcaacggtgtcatttattaaaaaaatctgagagagtatttatttatcttccaaaatgtgcaatgtgttagtttcgaattgagatccactgcagtcctaactgtggctgcgagttaggaactgcacatcatctcagtcatccatttttccagtgaacggtctagatctgatgctatagtgctgctgctacagtagttctgcagtttttttcagatgtgaacagtactttgtagattctagacccttggatttgcatcaaaagttcctagtgtgactgctcacactaggtgttgcaccggatccaaatccgttagtttctgttggctatcaaggtcgctgttgaccagagtctgccgctgcgtgccctcagcctaggtgcagctcgcgccgttggatcacttggtcgaagcgtgtccgtgtgccacgtcatcgtgtacaccacaccacaccagcttcgagctctgattggttggctgacgtgtccgtctccacgcctatttattcgctcttcccgcgcgcgtcccgcccggcgacggcgacctcaccggcgtcgacgtcaccggccgacgacgacgagacttcagcgatgaccaccgcccagccactccagcacgagcatgacccgtccccgccggagccggacgccgacgccgacgacgaggaggaggagtcgcgggtgtggtcccagatcaaggccgaggcgcgccgcgacgccgacggcgagccggcgctggcgtcgttcgtgtacgccaccgtgctctcccaccccaccctcgccggctccctcgccttccacctcgccaacaagctcgcctcctcctccacgctgctctcctccacgctcctctacgacctcttcgccgccgcccacgccgcgcgccccgacctccgcgccgccgccgccgccgacctcctagccgcgggcgcccgcgacccggcctgcgcgggccgcctctcccactgcctcctcgactacaagggcttcctcgccgtccaggcccaccgcgtcgcgcacgcgctctgggcgcagggccgccgcgccctggcgctcgcgctccagtcccgcgtcgccgaggtcttcgccgtcgacatccacccggccgccgccgtggggagcggcgtcctcctggaccacgccaccggggtggtcatcggcgagaccgccgtcgtcggcgacggcgtgtccatcctccaccacgtcacgctgggcgggaccggcgaggccgtcggcgaccggcaccccaaggtcggcgacggcgtgctcatcggcgccggcgcgaccatcctcgggaacgtcaggatcggcgccggcgccaagatcggggccgggtcgctggtgctcgccgacgtgccgccgggggccacggcggtggggaacccggcgaggctgctgctcggcggggaccagcgcggcggcgcgccggccggtgaatccatggaccatgcctccttcatgctggagtggtcggattacaccatttgagtaggagtggcatcgtacggactacatttgtactactccttagccatgtgtttgtacttgcctgtaaatgcaagtgtgtaagcagagttagcttgtaaccacctgaatttcgtcgaattttaccaattctgctgaatcccatcgaattataccaatacgcgccctgttgataaggtcgaaaaccgagcagttactgtcggttttgtgaaccttttgcttccgacacatgtactgaaaattcacctgtaatttcgcaaaagttccttaaaatttcggcatatgtgcttttgatttttagactttcttttacgagtagggccttctgtgaatccggcctgtaaaaccgggcctagttttcacatcggaagctgggcctatgctaaggcctggcctacagatccagcttcatttctcagtctgacactgggccccacctgccagtgtctgcggcttccacggactgagctgcctcgcccgcctccgagcagttggggaagagaaccgaagcacaaaccctagcggcggcgcagctcagccggggtttgcggaggaaggggaggggcaccgcccgcgatgctcgcggcgtcggctcggcgggtggcggccgccgccgccgcgtcgtcctcccattccaggctcgccaaccagctcgcccacgcgctgaatccgcaggtgaggctgggcgtcaaatggcacggcttggatttggccatcttttttggtttcaatctcatctcccccaatcgggaatgctgcaaaacctagcggggtttttttttttttggcgttgtagctcgggcgttcggtgatggatttgacgatataatgggtgatttttttctgtacgtgattatgctttgtagaggtggatccatgaccggaacaagaaggcgatggagttggtggccaaggggtggagcgccctgcaggaggttgatcgcgtcatcgactacgccgaccgcaacgacaagcgcctgatcccacttctcagggtacagctctggatgattcgtctttgtcatttgctccatttattcacgatagtctaagtgccctagaattaagccctaagtctaggaaatgaaactttgtgttgcagtgttgaatggtacttaaccagctaacccgattgtttggacctttattatttccaatcgttcatttgccaatgtgtaccaagtaccaattggttcttgccattgccaattgaagtctggagatattctgtgccgaactgtcttgctaatctttacaagttgcacaccacctgcatatagtgtagtgcgtcagctattggtttggaccaatgttttttttttacgttctgttgtgtaaatcttctcgatgctatgcattagggtgcaaaggaaaattttgagctggctctggagatcgacaatatgaacactcatgcgagattatggcttgccaagatgcatttcaagtatcatgttcctggagcttgtaaggccatgtgggttaactttcacttctggcaatgttagtattgcacagctttctttgctattatgtcttacaagttgcatcgtggtcattttcttatttcctattcattcttattccaagaacctgcaagcacattgcaaaagctagcttagtcactgcttctattgttgttttgaggtaattgaagaattatttttaagtattgttgttttgaggtaattgaagaattatttttaagtttaggtagttccttccagtggcgggtttaaaattttatcatgagcctgggcaagactaacaacaaatgaagtatatacaagtctatataattcatataccattttagcgtgagcatttgcagtataagtttgtgttaagcatgttttctgctgtgctgtttcttcatacggccttgccagtgactaagcaaggttattaggcattaatcaattggtgaattgctgcatgctcctggtggagcctaggccatttgcccatggtagccggccctggctccgccactgcttccttctataagagcccacacaaattgaacatgtcagtaggtgttgttttctttttttatgtaatctgtaggagttgatatggctcccaaagaaaagatgctgacatgtattttccgtttaatgtgtttctcatttactcattattgggtgcacatccaattgactgcatcaaagttcactaccacagcagttaaagctggcaaaaactgggttacaaaatatttgagattagcatcttgacttaacaaaaatagttagtaagtgtgctgcatggatcagctcaggtaggtagttaagttctagaggaattctctctctaggacttctcgttgaacattatttaatttgctgcaagcacagaacttactgttgatagatttgcacacgtatctttcgatagtcaattctctcttcacttttcatgggtgcagtggtgctgctctgttggttgaagctgcaaacatgggtgatccagatgcacagtatgaacttggatgccatttgagaattgaggttttcatgctctgttcgcacttttcccttccacttaattgattaaatcatgcagttttatgttatgctattgagcaattcattatacagattgattcacacagacattgcattactttaattgatggtttacctttgtttctcttgtagaatgactacgttcactctgaccaacaggctttttattacattgagaaagctgttgaccaggtttgcttctctgaattttgaacacatctttccatgtatgcttcttgctgaatcttctcaattacacttaatgcttgattgcagttgcaccctggtgctttgtatcttctaggtgctgtatatttaactggagactgtgttaagagggatatagcttcagcaatgtggtgtttccacagagcatcagaaaaggtagggatttctcttggacttgcttgtgaatagaatatcaactcaaacttgattttctttgttctgctcaccacctgcagggacactctggagctgcaattgcatatggatcacttctattaaaaggtttgtacaaaagtaaccctctagtgcgtcatgactaaggagcaaatcacatataactatttgttgtggaatattggtcatttggctctctaaagctggcggtgaagctatgtatcccaccattaaaaacttgttagctgattctatgaaagttaatgttaatagtattatcccgaagctcattcattttgtgattgttcaggtgctgaagtgcctgaggttattaccaggttcaactcaggtaagagtccatcaactggaaagatgcgaaaaaggcccatacagcaggatccagtgaagctagcaaaggagcagtttcaaattgcagctgaagctggatgtgatctcggtttgcgatggctgaagaggcttggggattatgaaaagcagcaagaacaaccaaagcaaatccagcaatgaccaccttcgaaatgatttgcttcacttcggcattgctctatgttgacatgcgtttgtcatacacactatacaggtagaacgtcagattctcaactgtaatcatgtaattgaatccaagcactatgtaaattttgatatctggcccaactccttgaaaaggtagacttgagttgatcccctttctctacaaaggatttttatcgtaccagtccttatagagttcgttactttgttttttcactttttctccccaactgtctactggtataacctgttacatgtcccttaattattccccggtgtgtcagaaaagtgtttaaattcaagcatacatgaaaaaactggactttttccgtttgtcaagtactgtcacggctaaggactattatgaatcctttttatctctaaggattatcctgagaaacccccaaaattaggcctctttgtaatgtaggaccttttaaaatcttacggaaattgagatgattcctattaaaacccagtaaatattttgcggtcggaaggagctcttatatcatctggttctcctattttagcctggtgaaacttagagcatctctaacagcctcttcatcctactcaccaaaccaaaatttagcaacttgaatgaaaattacactccaacaacatctccatcccactctctaagccatccagatgatcaaacttcttccttcacatgccaaacttggctagcctatttgctatccatgggtcccaccacctcttattcacttttccttcgttcgggagtagcgtgaaacttaggccatctccaacatcctctccatcccactctccaaatcaaaattttagcaactttgaacaaaaattacactccaacggcatctccatcccactccaagccatccgatgatcgacttcttccttcacttgccaaacttggccatcctacttgccatccatgggtcccaccacctcctattcatttttccttcattcgggagcagcgtggccgagggggagagccagtgtccggtagcagaagctcgatgatggtgagatctccaacgacccgatggaggcaagggacccggtccactcagactggcaagccaacagcgagatctctagaggcggcggtgccccttaggagaagtcggagaagaagcagcacgccctacaggaccaccattgctgttcgtcggcctatcgttgccactgcccttgcggacacgagcaggaggtctcgcgttaaccattcgcccgaaaccgcgtcgtcatcgtcctcccgaatccacgtcgccgccattcgcccgaatccgcgccatcgcttcgtcactagcccatccacgtgcggcctccaccgcctatgcccgagacaatgaggacggtggcagtgacctccactcccccacccccgcacggcctccaccaccaccagccctgcgcggattcagccggtggtgcgacagagaaaaggaagagagagaggaggggtgaaggagaaggggtgaaatagtaaagaggctggcaggtgggacccacttttagtttggatagtgtaatagaggttgttggggtgaaatgtaaattagactaccatttggtttgtcaaactgaccgaataggcatttggagaatgagatttgaagatgctcttagttggcccaatatgtcatttacacaagacaataagcactcaattttttgatataaaaagagagtatgcgctcctcattgtttgcttgttgtcttactaatgtcatttcaagattttatcgtagttttatctttctttaaacctccaataacataaatataaattttgtgcccataaactatggcttattaactgtagatcaaacaattggaccatattttaaagatgttctagttgtgcacttgctaataaaaagaaatatactctaacgtagatccattgtttcgggagatatttgattcctggtttgagaaatacaaggtgttatatgcaacttgcaatcattggccttagacccattacatgaaaaatcttgatgttttggcctccacgtagttactttggactgttttacccactggagttgaatccaacacatgagccataaccacacgggataagaatctatactaactagttcttactacttattcttttatttgaccctttattgtctttttttattattatattgccttttcctcctctttcattctagttatcattcttctttctttaacctttaacttgaaagactcctctttatcacaaatcatcaagcagtcatgatattttagggaggacatagtgggagactttgttgtagatgaataggagcattaatgggcagtacaatgatgtggtggagggatggatgctgatgtaatatacttgcatgttaaactttataagttagtgagtatcaattttacagtaagatatgattagtggtgccacgtaaatgtatttaatatgcgtaaagatatacacttgaattatataagagtgtcgacaagactaaaaataatcacaaatatagcattactactctattaaaaaataaatgaggttagattttgggacgggggggggggggggggggggg

SEQ ID NO: 21286 - DNA, 5353 bp, Oryza sativa
ctaagctacttcattagtgattagttgaaatgtagatcagaattaccttttggttatagaaacacctgcaaattggtgggtgattgctaatttataactgttcgtatttttagaggtctttcaaatgtaggaattttgcaggcttttctattatggaaaccaactagcttgagaagtatagatagatagatagatagtgtctgtattactaaaagcatcaaattattgaccaatggatcagtattttcttttataacagtagaaattcttggggttactctgcctaggcttcccggatggaataatgtgcccaatcgtcagtatttttgttcttaacaagcaaaatcatagcaattttttgtttctgtaaaaaaatgatctgtgttgatcctttgaccaaatccgaaactaccaatgtcatgttcaccattatttttttttttgccctcccttgtagcttcttgttgcaatttacgattgtctggtctacttgaataaggcaaagtgataagttacttatgctatggcatgtttttggcaccgaaggattgcaattcacattgattttagtataccatttatatataaaaaagccttaatgttggcgtgaaacattttctgtattttaatgtttcggacaaagtgttgacgtgaacttggttcgttgtgctttcccttttctcccccttggacttatgctttgttcatatacatgaattcctttatgctctccttacctgttaactttctccctgacagctattgcaactgtggtgactgttgctgaaattctgaaaaataatggccttgctgtcgagaagagtgagtcttgtttctcataattgataacttgattgcatcctccttctgttctcgtagcttactccaaaatttgtgcagagattatgacatctactgttgacgtcaaagatgattcgaggagtcgccctatgcagaaagccaaggttaatgttcttcccatgtttaacgtagatctttactttttccagatgtataagtgagcgtttcctgaaatcctatgattgtcttggccagattgaaatagtgctgggcaagacggacaaatttgacgaactgatggcagcagccgcggaagagagggaggccgcggcagcggaggctgaggccgaggagcaaagctaatattagaagccaaaaagcttcctgttgtagctttaattttagtattctgctgctaggtgttgtatttggaactccttgatacatcaagggcttgtgtaatcaattagtggcacagcttatttggtgtgcttttacttgattggttaagttttgatgccaacttatgacagtgaaggtgtatgagtacggtgctcatcttgatttgccccaatttacatttggaagatgtctaattgctttaaaagtcttgttctttgtgtagttgatggatgcttctctccatcatgcgctaaaagtgaaatcaaactggaaatacagggatcagatgcatcacagctgcatctccagatagtgaaatcatgtgctgggaacgaaacttagggccctgtttgattcagtttagaattattataatctggattattatgagtaagatgaaactgtaagctgaaacaaaccagtagattattatgctagattattataatctataagccatattactataatataataatctcctctagagatgctttttctagattattgagtggctaaagacccactacccttatatgcctctaataatccagaaaaataaacaactcgtagcttattttatgtcagcttattataatccagcttagagtaatctagatttaataatctagattataataatcttaaattgaaacaaacaggtcttaagctgaaacaaacagggccttaattcatcagacacataaacccatctgcaaatacttaaattaaattgaaacatttggtagagaaatccaaatcacaacaaacccatctccaaatgcagaataccatccaatacatcgcaggtacatcggtctaaaaagttgaaatctattatataattaaaggaatagaaaaaggagcctccacattcgctctcatggcctagaaattctcacattaatcggagaaaaagaaaaagcagagtccatatagaaatacaatttagaaatagcttaaattcggaattaaaaaataaggaatattagaagaggagaccggagtccatatagaaatacaattaggaaatagctgaaattcggaattaaaaaataaggaatattagaagaggagaccggagtccatatagaaatacaattaggaaataactgaaattcggaattaaaaataaggaatattagaagtagagtatagagtccatgtagaaatacaattaggaaataactgaaattcggaattaaaaataaggaatattagaagtagagtatagagtccataataaaatttggaataaacataataaaattaaaagtagagtttagagtccgtataaaaatacaatttacaaatagttaaaattcgaaattaagaaaaaatgggaagaagagtttaatgctaatataggaatacaatttagaagtaactaaaattcgaaattaaaaattaaataatattgaaagatgagtttagagtccacatagaaatacaattagaaataataaaatttcagaaataaaaataaataatattagaagaagaacatatagtctatatagaaatacaatttacagaaaaaagaaatattaaaagacgagtctagagtccatatatgaatatatataatttacaaataactaaaattttatcttaaaaataattaataactaacacgtatataaaatgcaatatgaatattacacattagtagttttgtaaagttattgcaaaatttaaaattatgttgtcattttaatatatttgaataatataatgagaaaacatatatgctattatatgagagaaaatataatgatgctagccgcgcaatctgcgcgggccatcatgctagttgaactaaattgaactggaaatacatagattttattgaaaacaaacttgaaatgcaatacatagatatattgaaaacaaacttgaaatgcatcacttcattgaaaacacaccatatgcctcctgaacagaggaaatcgaatcctacgatgattcatccaacttcaaaccacagcaaccacaaacttctctccattttttgcttcttttttttcttcttttcttgcatgcttccatcatcacacccatgcacaatcagccaccatcttctccggcgccggcgagcccaaaccacttcacgcaaccttctccttgatctcctccgcgcactccgcctccagctccggcgccgcctcctcctcgacgagtaccttcttgagcgcctcgtagcacatgaaggagatgccggcggcgggcatgagcttgatgcagctggggccgaggccgcggtagaggcccgcggcgccctcgccgcggaggatgcagtacatggcgtggagcacgtggcggtacacctgccggccgccgacggcgccgacctgcatctgcttgcgggcgacctcgagcgggaaggtggccgtgctggcgatggcgcccgccgccgacccgatgagcagcgtcgcggccgggccgacgtcggcgcgccccgtggcgcggcggtacaggcggcgcagcgtctcgtaggcgtagaagttggtggccgcgtagggcaccacgccgatcaggctcggcgccaggccgcggtacagctcccccggcccgccctcccgcacgatcttcacgaacgcgtgcagcacgttgtcgtacacgtccttctgcaagaaaacgcaacaatggcggtggtgattagttggaaaactcaatttgggatatctcctcatttttacatgtcacttaaaagatcattaaaaaattttagtagaatagagatatgtcacttcacaaacatgcaaatttaaatttaacttgtacgagtagaacgcgtaatttatgggtcaaatttgttatttttgtttcgaattgtataagttgaattttaacttgcatatttgcaaaagatatatcatgtattgaatcgcatacacaaaactaggggatgtcatctggagggggaaaaaaatccactttcgtgattagtttgatcgattttgaaggttttgatgggggtttgtgtgtgtttgtgtttacctcgatggtgaggcgggtcttgacgagctccatggggtaggtgcagagggtggaggcgacaccggcgagggcgccggcgacgagggggacggggatggggatcttggcaggctcgccgtcctccggggtgaggtacttcttggccgtgtcgtaggtgaaatgctgcaggacgccatggattcgatcacgagaaattcaaagaaaaacaaagtggagggtgtgaggttgagttggttgcctcgatggccttgctgggggcgacgcggaggacgttgacggcgttgccgcggaagaggccggtccagccctcggtgcgcatgatccagcggaagacctcggccatggagccggcgccgcagctgccgaccatgaggtgggtgcggatggtctccagcggcgccacgaaggtgcgcgacacggcgccggcgatggcgccgctcaccagccggcgaaggtgcgggttcccgatcttcaccctcaccttcctcagcgacagcagcccgccgccgcccttcatcttcctgccctgcctcttcttccccgccgcctcctcggcctccgcggcggcgagctgccgcgcgacgtcgcagttgtcccggcccttcgccgcagacggcaagctgagcccgacgctggcgaacagcggcggcgcagccgtccggcgagggaactccaacctcttgctgctgctgttgatgcactccccttccaccgagctccacgggaacgacacctccgggacgaaccaccccttcctgtccaccaccgccaccgcgccgccgccgacggcgttgttcctcgtcaccatcgtcgtcaccgccatcatcgccgccatcgatcacaccaaaattaaaactacttcctgctgctacaagcgcaatcaaaattaaacaagaagaactaaaaccgatcgatcaaatatgacaactacgcacctagctcgaggaggaaagaaagaatcagagcgagcgttgctgcttctggcttctgattcctggctggtgttcttgggattcttggcaatggcgccccattttatagccattccgtcccgtccaccacctgcacggtggcgtgcactcctcgcgacgaaaagccccccacacagctagcaagccccgctccccgccgggcactccaccaacggggg

SEQ ID NO: 21287 - DNA, 7990 bp, Oryza sativa
ctgcgtgcgtgcgcagttcgatcagttgctccttctcgaggaggaagaaacggacagtggccgtggtcctgggcaggtgcattcatgtgctctgcgattttcgaaggtaggcatgcaagcaatgtgctactggttgttaggaggctgggatggaatggaatggaaggcgtgaatcgaagcattggcaatttggcgtcgggcaaagaaagaaagagcatgagctgcaaagagcaagggaggttttgggctttttggcggtgttcatggaaagcggagctggtagattagctgtacgtagtaacgtaaaaggccgtaacgtaaggggctagaatagataggtggctggagagcggagcacggagccgcgcgcgcacgcgcgggggcacgtttgggttgcccggcgacgaggctggtactcgcgcgcggggaaggttgtgggcttctgtgcgtgtgcgcagatggtttattacgaaaccacttggttttcgcggaaacttaaataggtttttttgttgggttgagatcacaaaaccgctcagtaaattggtcgagctaggaaaaaagagtttaactagattttaaagttttggtaaaagttaattgaatttcacggctagtcaatggtttttaagatggttttcgtgaaaagcagagggaacggacttcatagcggttttggaaggtgatttggtttcgtgaatccatgcagactctatgtcagaatgtatatatgtgaatgaattgtgcggacaaatatcgcacatcggttgtcaccatctaggtaatcttgtgtatggccacacaggtctcaaagagtggtttcgataaaaaaaataagaagagtatcggtatcctagcaagatgatattcagctggttacaaggtcttaacagacaatggaaaaataaaaactctcattttctgtgatacaatttcaaaattgaaggcgagtttttttccccttctgaagtgaaatgataaatagtaatattgtaagaaaataagacgtaactgataaaaaaatatccctttggactagtaacgagcaaccgaccattagattaggagctatagttatcaccaggatttcgatcgtagtctttaactagtgttggtatagaaaaactattagtggtacggttgacaaaacccacacagtggatatgccactgctcaaaatgtgagatttgttcttttctcacttgaaactttgggtattgcatacatttatgccactacgatgatagaatctgacaaggaccatcatcactccaactcactcaacacttatacttgtctttccttcgaatgcttatagaggatggattgattttatgagtgatggattgttatgttaaattcaagtgttattgatataatgtgatgaacacatgatggacctatttgtatgaatacacgaatgagtagcacacaactctatgtaaaattattatgggaccataagatcgaaaaggcgatgatgcaataacttagaacttatttcatcctcatgccaccaaagattcgcctttggcacaattttttctcgttgtcatgatccaacgcaactacacgctataaggtgacgtatacatcaacctttaacttcaaaggtaattaactattatgctgtttttttatgctatatgtgttgtcatgtattgttaccggctcatcgtcactaaggatgcctttagttccgagttagccgtttcaccaaactcatcctaattttatacccatactgttgttaacagtgaaattcgataagcccggaatagtcatcggcttagagtcagcgttggcttcgacgtcctgagattagccgatgagagttttcaagtcgtcagttgtcagattcttgctatattcagttaaggaaattgatctactaaaggaagcttatccagaagagactgagttcaaagagaatgcagtatggcaagttatctattaattaggaatagtttgttagtttccttttatctttaggaaagtgtgtttagtgtcctataagactttatcttttccttttatttttaggaaggtttctttcttatccgacaaggatttttatacccatgggtatatgtacacccggggtctatgtaatctatcgctacgatcaatacaatttggcgcatcgcgaccctttttacttctacttttgtttttacgttccggcggaatttggaacccgacgcggggctgcatcgtcttcgatctccggcgaagggataagtccaatgttccaccggtccaggcaattgtatcatctacgtcggcgtcgttcaaggctgcatcagtacattcgacctctcggattactctggtttggataatatatttgcctggctatttatcatatgtctatgttaatctagtcctagcatctcaatttagctctatcggctgtctctcgctttagggtttctaccggtatcggctaaatcaccttgctagattagattagcttaggcatctaccaccctgaaaatcagtcaacagcttggttgtctagatattgtgtttcttttcatacttagtgctgcatcagttaagtttgatctactaattcgtgcttagaaccataatctctagcctgttttttgactgccaataagggtttcatcggggtttcagccgatgagttatctaggcgttgcatcggcttacaaggattgtatacatattggatttagccgatcgcaataaagatttaattgtttaatataatcttgtggattttataacatcggatctccagctgatgtatgctttaaccttcgaatcgatgcttatttatcatatcattttttgccgattggtttatattggatcatattgttatatacatcatcatcaaccgattgtctttatatcattatctacattggacatatagccgattgcttaaaccctatcgctatcggctggtatcggcatcggctatttatcggctatcggctggaactactccgtcggcttgtcagctgatcgactgtttgatctactatttgcatatcttgtcagttgcaggatcaaactgactggcacgcccgcatctcaccaacctttggacctgcacaggagttaagcagatctcccaggccagtgtgtttgattttttcgtcaacaactgtgacggttggttatatatgagttaaaaaaaactcgacttgagaggggtaagcccgggcactttgcaaagaaaaagaccttctcaagctgttagataaaagctccgaacctttggcccactcttacacaaacgacaccgtagcatatgtgagaacgacaagcgatttaggccgggccctagacctatgcttaggtgtgtgaccaacgagggaattttttaaaccctagcttgaaattcgctcccacgtttttttccttggatatacacttgtatcgaataagttttgtcccgagacaacatacactgcctaccttttttggcttacatcatgtaggctggtgaaacatatttgaatttcatttccgcaaggcaaaaaccttcattttgtatgtttaaagacatgtctcgcaaaaaaaaagggaactaaacaagatgttgccatatgttgtaggatagggtaaagcttgttgtacgaaaccaaacatacttatatgcgctccttcacattcttccatgctccatatagcctatggctaccttttcccattatttttttcacatagtgtttgttctcctacagtctcatcaccgattgctactcctattatggagatcgcacgctttttcagtgtataatataattaggtgttatttttaattatgattgatgttttagattctactagttcaaacttttgtaatttttgaaaacaccaatggatctcgtagcatcagaattcagaaaccctctaaaaagaaaataaagaacttaaaggaaaaaaactcataaaacatcacgacaacaaattttggacggagccgtcagagcgacagatttatggtcacattataagggagcttttaattatttgccactgttagtaatttggtcgcgcggaacaactcacgatggcctcaactcaaagctccccaaaaacccggaagccgcgccgcgagctcgcctagggttttaaaacccatctcccctccctcccccgttccgccgaccacctgctccgccacctctcctcctagggttccggcgagcgacctccaccccggccatgccgccgccgcccccgccgcgcgagctcctggccgtcgtcgaggcggcgctgctcgggccatccccgccgtcgccggcgcagcgcgtggagctcctccacgccgtccgcgatgccgcccccgcattccgcgcgctcctctcctacccggtgagcccctcgccgcccctagcggtaggaatcgttcggtgttcgtccgggagctcggttttgatttcggggtgttttgggtttttgggcgtctctgtggtttgtgttggtaggggccgaaggcgtcggatcggactcaggtggaggccaaggaagtgcggctcccggacatgcctcccataacgctcgatgacaccgacgtgcagacggtaagctccctcgccaaccatttggtgtgatgcgctatgcatttacctggttatgcttggaacatgtgagaaatgcgtaattcttctgcttaaggtgagcatcacgtgatttatgtacccctgatgttgggcgaaacttgaaacttttgattagtctctggtagagatcctatgtggggtcatagttgcaaaatagtatcaagtctgttgagatgagctgtaattttgcccgcgagatagtgcgattttatctcttcctgagtattcagttgatttagtgcttttgtttctttgtagttttacaatgaaatgctttctataaaatctggtggctttgtggtcaaatatgtttctggaggtgattttttgggtgggaggtagcttgttatgcaatgtatcaatgacagacatgtatctttggtaggacaattgttcaaatttgtgaactcttgagctgtgaccttatcttaaggcgactaactgagatcgcatatgacactacttgctttaggtgcctatttccctcaaaacaaatgctaattaacacagtgaagtaaaattaagactagagcttgttgatttttttaattgatactggccaaccaaagaaccgttagaaattactgttgtgcttcaaatacagtaagcatcaacatggcttatgacaccactctttttatgcttaagatatatgctagagaaaacaagccttagtgcccaactgcccatccagtgcaatgtttgaattcttgaacctattctgacaagtctttacatgtgcactacgtctgctatgctagtgtggaaacattaccatttggttgcatcacccattatttgcttctttatattgaaggatcagatctgggatggctgttgtttgcacactttcacctataatgtagatccccgtgatttatcatttatttgttgatcatcatttgtccccagataaatgacattattttgagggctcttccttttgttttcttcactcaagtcaaagctcatatacattttttcaggccctgaaattgagtgatgaactcaatcttaatgagattgagtgtgttcgattgctagttgacgccaacagggaggtacacttttcagtataatagttatctctaattctatactatctatgtttacttcacctgaccatttgtgcggtggtggttttatagtgggttctatatggccgagagccactggaaatatataggctcgcagctggcctttggtacatggagagaagggatcttataacctctttgtacattctgttacgggtagtctattgatcgtgctcattccagttattaactagtctgagttttgaatgatgcatttaatagttctctttatcttctgcagtctgttgtacttgaccaagggcttgatgctgatctgatgtatgaaatacaaaaccaaatggaggctctatttattgagggtctcgggcagcgtataattacactagtaaaggttagatttgatggagcttgtgtactctctttcatgttttatttaatgagcaatgttgaacacgaatgctgtagtaacaatgagaaggctaatgcagatttggagtcttctcttgacagatgcaatgtacgggcttaacctatttttgtgataaatgtggaaaactggagagtgcatttgaactctagcttgtaggcttaaaaatagttgaagcaattgatgtgggtagggaactagcaaatattggtgctgttctgacattttctattcatatcatgtttgcagttcaatctgaagttatgacgttccatcagcacttctttggaactattaagcactgaaaaatatatagcaattttataagacttctagtaaactttcttagctttgatttatttatatttatttaggttcgtacctagatttttatgaacatttaacataccatagtgtttcttttattattattcttcgacatatttgcactcttgttggaagctgtgtcatgtctgcggcatcacttataacaaagggcgtatcatatttgggaaaatttattgtgctgtgaatatggaaaggtttcatatcatcttttttttttgggtgaaactaagattgacggttttaacttttctccccataaaggaacttaatcgtgaagaatcaactggtgttggccaaccaagctctgagcattatgtgcttgatttcagaggggctcttgtggagaggcgtgccattgtttctcgcgagagattaagtttgagccactgccttgctctttctgcacttattaaattgatgagtaagttaaatgctctgtatagttgctaatatcacctgatttgaccttctgatgtgtccgcttagtgacttgagtgaccatcatttcaatatttttccctgaaattcaaatataggaagcttgatagtttttctgagtgatagagaaccatcactaatgatgaactttatgtaggtcccagggaggttaaggatgtattttcattgttaaaagactgtgcagctgaagttaatgaaaattctagcgtggagcttcaggtttgaagtttgaacaaatgactttgaaattgcatttgtagacatgctattggtataatttgaattgtttattgttgttgtacaactcttactatcatttattgttgcagatcacctatggcgttcttttttctcttgtagtaacttttgtttctgatgccttaagtacttcccatgagaaaccatctttgtcatcttccgattcttcgttcaggcgtgattttcatgagctggtaatctttacagatgcccaacctgactatatttccaatgagttctttcctattatttgtttagttggaacatatggaaaaaaacatgctcattgcatgctttcattgttaacatgtcaggtgatgaggtcagataacaatttgactattgaaggatttgttggtgttgtgcgacttgcatgggcagttcatttgatgttaactcaagatcgaagcagtgcaagagatactctcactagttcttcgagagatgtgacagatatatgggcatgtctggagataatctgtcgccagaatagttttcaatttttgcaggaacgtattatgcaaacagctgcctacaaggtatttattactgtctttatgctagcatcctgggttgtcgggttaaagaaagtatgttgctaccgtgcataaaagtatggatcatgttattccctatcactctaatgtggctttgcctgtttgacctgtaagtatgaagtaagtacgttgctgcttcccaggaatttgagttcatgaaattttgcatcatgattcatgagatcagaaggtgtactgcttttgtttgagcgtaagttgaaatagagcatgcgattttgcatggttgcagatgattacaatggctatattagtactttc

SEQ ID NO: 21288 - DNA, 686 bp, Oryza sativa
tgaaagcagatgttgctaaatcggtaattgaggattatgctgcttgcttggagttccgctttgatgatttccaggccatagagaacacaaaagatgacgttggtgtcctaatactacaggtcgttatttcagctttagtgtttcttttatgtagtgtacttaatatgcctatcttctaactgtaataaccattttgtcatgcagctacttatcgacaatatttgtcgtccagctcccaacattacacatctactcctaagattcgatgtcaatggatccatagaacggacagttttaaaaccaaagtcacactacaggttagctcgaggctctttgttttttgtatagccataaggtttgtttgacgaattatcatattgtgccacagttgtttaaagacaattcttgacaatcttgaaaaggtgacaaagccagatataaatgctttactgcatgaattcggttttcaggtttgttttctcagggatagaacccacctccttattttaatcctttagtgtcaaaatgtacgtttgactcattttaattcagcttctctacgagttatgccttgaccctttaacttgtgggcctgtcatggatctcctgagcacaacaaaataccagttcttttctaaggtacacattcttgttttgttcttttaaattaaaatagctaaatgttg

SEQ ID NO: 21289 - DNA, 685 bp, Oryza sativa
cagcaacttctctatcataaggaaggaagctcaagcagttattgatttggtatgtcattcttctatttatgtaaaaaatagttgaaatgttttgcacaatgcttatgtttatagcagcggtgttgcatgtctatgtgaatatacttgagggtacaacataaattgcaacataagagtaattatcctaaaatttaaaattgagtatatgatcagagacagattatccagctacttatgcacttgtgcaaacatttagtcaaaacaaaatgcaaaaagttttcctcaaatcttaaatttgtatatgaacattagatcaattatccacctacacgtgcaaggctcaaaacacgccattgaaaaatatgaaattgcaatggtgtgatttgatctcatgttaccccataaacctagatctaatatgaattttgaaatggagattattgctttctatgaaattgctacagttataactcaaacatgagatcaattttgtttccatcacaggttgccaaggatgcgatccatggaagtgaagcagggaaagcaatttcattctacgttcttgattcactgattagtattgaccatgacaagtattttttgaaccaaattcagagtcgaggaattctcagatcatgtctaagtgatgttaacaactacttgtctaaggtctagacttcatttc

SEQ ID NO: 21290 - DNA, 2114 bp, Oryza sativa
attcctgcagccctttctgcatcgcacttgcattttgtcatgggaattgggcatttgggccgtgaggccaaggcccatggagccaactctagggcagatgaacagcgcagtgggtactgtggcagcggattaggagataagattagggaattgggaaataagataaggatgggattgtattcatttggagttaagcaatgaaaatcaattagtctaatctcttcccctaatgttcttctccccaacctaagtctacattccttctccaagagccaacaccacttgctatctctctgaggtggttatcctgtcatggccttgggtcgtggcacatctggaaatcaaaatttgtttgctctataatgaaacgatgaaaacatagccattttggataatcgggagtttggagcgccctactgaagaatttcactttttaaaacccatattttactagaggaaacaccatattgcccagcccattgtacggccaactctttggtcctacactacacctacatcattgttaatttgtcattaccccacagcacttttggccaaattggatctgcagggactgaggtagtctcacctcagtccctgcaggaagtgaggatgttgttaaaagctaagttatttgctgggtgtggtgttttcctttttcctgcttttcttgatagtaagttttttaggcaggtgtgaaggaatagcatcattcacaagctgcattggatagatactttcttataatagctttattgaatgctgcggtacatttcaagcattgtttgcttgtgggttataaatgcaacatatggtatggtgagaacccatgaaaaatgtctatagttctccatagttacatcaacccagttgtaaaagagcattatcattagctattagctcagggcgaagtaaatatttgcatatactgctttatcctgaattttatcatttcatgacttgatatttcatataactttgtagttgtgctaggcctggtattatgagattctggcctacggaggtaccacatcagctagaactgattgtccatggcttgggtttgatttgtgcttgatttatgttatggacgctgattcatggatcgggtaatggtctgaagactgggataaagtccatatcattctcattggcattggcttgtccgatgttcaggagactctgatcaatctacctaagtaacctaactttatgattttcctgcttaattaatgatggggtacatgggctccctttatatataagaaggattgatttgacatctgaggaacaaatctataatattatagacactaatctgatctatctctaatttactgacaagctttatctgtcttaactagataatctcctacctttatttgacttattcctaatttgatgattaacctgctaattagctgtaagggctgtcctggccatgccatgacatttatcaacagtttggtgaaaattgacaggtttttagaggatgaaaatttggcctcaggtgataattttgtcaagagaggtaaaatggacttgttccattacttcctggaaacgtatttggaaatgttgggcttccctccggtgcaaattcttcatttggctggccatcaataataggtgttggacagccgatcgtctagctaagcgtgggctgcagcacacagtgatctgtcccctttgtgatcaaagtgaagaatccatccaacacattttgatctcctgtgttttttctcgccaagtttggacggcaatctttttgagactagggttagctgaggctgcgcctcagccctctaccgaccgctttctgaggtggtggagccaagcaacgaagaaccagccgaaggaggtgcggaaagggattaactccttggtaacattagtagcttgggagatttggaagcaccgcaacgactgcgttttcaataacgccaatcctagagtagcgacgtcttgcaagtgatagaaaatgagggccatctttggggtgttgctggagcttctcgccttcaaaagctccttagtgggacggctaacctaggcaactaagctccccgggttgtctagtgtgtgtgggtcttggtaggagggctcgggcgggc

SEQ ID NO: 21291 - DNA, 15797 bp, Oryza sativa
ttatatatactattctcgatttagtcatagttgtcaatactcaatacaatgcaaggtaaattaaccaggagaagcttggataagctaaggcatcagttttttcaatgacaagtacttggaccatgtatccaggtgaatatttttattagcttatttctgcaatatgtgatgttcacactgtacacacgatgctattttcactactgcaagaactcaaacaaccacttttgttcagcatgtctagaagattagatcaacaatattgataatgtcaaagggaaatcatattgaatgatgtttctacagcatttcactaatctatctctacagctgttgggctacaaatagctaactatatatttgattctcgtttgacattcatttgacaaataatggggtgagtattttctttctatcttgatagttgcattttacatgtgaatcatccatgtcctctcagcttcctgttctcttgtggcccatctatacttttacctctcagcttcctgttctcttgtggcccatttgatcctgcccacagcatatatgttggcgtttctccattttattctctgtggctgagaagagattgcacattggcacatctggtttttttttttttttttttactgggacatctggttgtttttcactgcaaaagaatgcaaatgcactgttagccaggtttttgaatcactcatcgattattgaacagggaatacagtttatctctgcatgattgatcttcttggactgctatgctaaatatgtcaggcacagtacaagcttgccagtccaggaaactaactaggagtataaaacatgataatcatagctggatcagataaatctcattgtgtcagcaccaaactgtaactgattaaccgtcttaagctgcagacttgcagtattgcatgagcaaaagactgctgggtacggtcagttatcctactgtaatgactaatgacagcaacttactggtaagtgatttggtctgaaacaacatccttagctttaagttgctggatcggccttcaacgattccaggtggtttggttgtaccaaggaaattggattacaatagaaggattccaagttcttttttttcccccgaaacacattataggtactcgtgtacatgtgcgtacactcatgaaatatagtacaacgcgtacacacttagagcaagtttaatagtatagctcactactagctccaaatcatctatagctaatataatagccaattcatacaatagttgtttactatactattaatatctggtcccacctgttatacacacaatacgtcttggagtccgtgctgcagctggctacagatctgtagcccgctgctcttctctctcttctttatctctttaaaatatgtttatagttagcttaaagcaagtttaatagtatagccaactactagctccaattcatctatagccaatctaatagctcattcatacaataatacatactacactattaatacccggtcccacctgtcatacaaatctgtagcccgctgctcttctcttcttatttatctacttaaaatatgtttgcagctggcttatagcctgttattgtacctgctcttagagcaagtttaatagtatagcccactactagctccaattcatctatagccagtgtaatagctaattcatacaatagttgcttactaaattattaatatatggtcccacttgtcatacacacatcgcatcttagagtccgtactgcagctggctacagatctgtagctcgctgctctttctctctcatcttttatatcattaaaatatgtttatagctggctaatagtctgctattgtaaatgctcttatagcctgctattgtacctgctcttacctctaggaagttgcatgtgcaataagtgcctttgaaaaatgggcctgttgtatacacactggcacactcatccctatgaaactaggtgtatccctgcgctttgctgcgggaattattaaccaattttcaatatatttttttcgataatcgagctagaagtaaaaagaaaaaaaataaaacgtgagggtttatcaatacttctataaaacaaacaaatgatacttgcaattttgacaagtgtatgttaaatattataaaaatgatagatagatttgttaaaatattgtggaaatgaagtgagggtgatgatcagatatacttacatgttgatttgtagaattaaataaattatactccctccgtttcacaatgtaagtcattttagcatttcccacattcatattgatgttaatgaatttagatagatatatgtctaaattcattaacatcaatatgaatatgggaaatattagaatgacttacattgtgaaacggaggaagtacatgatgttgtatgcttgcataaggttaaatatgtaactattgctagtgggtgatgatgtgacatagttgcattcagggtttacaattccaacgaaatccggtcggattttgcgaaatttcgacattccgacgaggcttgaaagtataaactgtttgagatttcgaggagtttcatccaaattcaaatttgaattgataaaaaaggaaagaaacaaataaaatcttataatatgatattaatagaatctattgggatataaatatttgaaaaaaatgatatattgtgtgtatttactgaaacttacatcagtaaagaaaagaataaataattaaaaaaaggaaaacacttacatggcccggattgcatgtactaggcccagtaagtagttggtccaaattacatatttttggtccaaattacatattactgatcgaaatttcgatgatttcgatcggaatttcgccaaaaccgaccggttttcaagaacttgtcagcaaaatcagggaatttgtattcaaattttggtttatgaaatttgttcggaattttccggttttccaccggatttcgcgaaattccgaattccgctagtgcccgaaacggaagggcctgtcgaaatcgtaaaccctggttgcatcttaagctttaggagttagtgagcatcaactttataataagataggatatgaatgtagtgagcaccttgaaagaagcataacttaagattaacaaagctaccatcagctttatggtcgcatgttgagttttaggagttagtgggcatcaactttatactaaggcaggatatgaatgcactaagcaccttgaaagaggcataacttaagattaacgaagtcaccgtaaacatcttgttatagactgaaaacttattgttaacagataccatgtaaataccaacacacttgtgttcaggttatgacatgaaactaggtgagtaggctccatcaactacgcttagggctagggatgaaaacggtatgtaaacttttcgaaaaatttttcccggggacctatttttcgaaaacaaatctgtcggttggaattttttcagaaacgaaaatgaattcggaaataatttctcgaaaacataattgaatatgataaaggaagccctcgtcggaactcggaatcggtcggaaactttccgaaaaatttatcggaatttccgaaattataaaggcctataccatagtctataattcctccccagtccaacccaaatcaacatcctaattcctaagtcactcaattcagcccaatccaatacacccaattcaaacttgagaattggacttatatgattgtgttttatgatgtaatgttgatatttgagacttgataattggatttgacatagtttaaagattagtttgaggggttttttattccgataagttttcattaccgtatcagcgttggaccgttttcggttttgacaatatttgattccattttcgtatccggggtttccgattccgaaaaaaaatatgaaaacaaaaccgataaaggtggtttccgtccattttcgtaccgttttcatccctacttagggcctctttgagttataagaataaaaaaacaaaggaataggaaaaacacataattccgataggaatacaagtgtaaaacggaggattgcaaaacacatgaatgattgtttgattcgataggaatgcatgtgtaaaacggaagattgcaaaacacagaagtgattgtttgattggaccgcagaaaaacacatgaatcggatgaaagagatagactaaagtattttttccaagatgctgaacctcttgctaggttttctccaaaaccgttttataggatttggaaaaccccaatcctctaaatcaaaccctttgattgaaaggggcacttagtttgtgaattccaagttacttctaccacgtaacaatattaaatttgacatgtttgcgaaacaagaactaatagagagtgtacgtttgtaattaagcataatttcacgggtacgactcaaacatatttgaaaacatgaccaattatgccacgaacagccaaagcaacacccaccttaacatcagcagcatcgacagcgacccaaacaagcacgaggattatgatctgatatttttcgtcgcgtatcagccaaagacgggggccaacgtcaatcacccgacggacggtccagatcacgacgtgacacgcccggtttctcctcgcccaaaacacgtgtactaccccgactatacgagccatccatgaggggaccacaacgagaccccacctgtcagtgacacacttgccctggcacggcacggcgacgcgcgacgcggccccgcgcagccgccgacacgtgggccccatgggaggacgaggccccgggcagccgccgacacgtgggccccacgggaggacgaggccccctttgacccgcctcgacgtcggtgccgccgcgtgaacctcctcgtgggccgaggcgagacgaacacgagagaaagacgaagaaaaataaaaacctccaaaaaaaagaaaaaaaagggagaaaaaacgccgcgggttggattaaagaggtaggttttgatgctggcttaaatctcaccccgtttcgtgcgatttatttatttattatctcgtcgtctcgtcttcctccctcctccgcctgatcgagatcgcttctgctccagccgccgccgccgccgccgccgaagtccgcaggtgcgaggacgccgacgagtctccagagagcaggtgcgtgcgcgttctccctccccttcttcttctcccgctcggtttgtttcgttcgtttcgggtgatgcgctttaatttgcatgtttgatcgattcctgttcgtggagacgggttggattgggtgatcggtgcgggaggaggggggcggattcacggaatcgagggtagatttgtgcaatttttgcgggcgatgatggcgtgtctccctcccctggctatctcctccgtgtgtcgaattttttttcttgcgagcattagcaacgtctcgttcgcgcgcggtagggtttgtggggggagaggtccccggcgtcgagattcgtgccgccgttgatcgttcgacagctgttgcatccgattcgatgtgggtgcgcgccgcaggggaggggtggggcagagctggtggtggttttttgctcttggagccttggatgagtgggggcatgatccttgttgtagagtatagggacttacagctatgggtttgtggattttttactggtacatatcttctttagttgcaagagaaaagtgatagctatgttggctgtgggtttgttgtgtgctctgaatttttttttaggcttttgtagtttgtcttatgtgattacctttgactgtcactcattttaaacttttcttgtttgtcatactaagtaaggtataagtcatgcttagatgaaagtatgaaaccatgtctagtcatcgatgttatgtgctattaagaaataaataggatttagcacggtgagcgcgtctggatatgtgtgcggggctgtggctgccaacgcgcaacgctcggttatgatgtgctatcatgctgtgcactgttcatgatacggtccatctgctgactggggctttgatgccctgaaggactaaacctaaagaggatttagatctttttgttcatctccatgatgcattgcagtgcaccacatcgaatgtatacaagaaagctggtcagccaaactgggtggtggctaactttcaccttgtcaaggccagattacgtcatcctgaaactatagtagtgcatgcaagtgtggtgaatcaatacagcacacatgccatggaatctattgtacccatggtgtgcgcaactgcgcatccaacttataacaatatataattaaaggtttgtgtactgtagtgttgctctgttttgggtagatgccttcatcctagcccatacgtgtgccttcccattgctatgtgggtaatggcgcaagacacttagttaaaccagatctatgctcgtgcaattgttctcagtgaggaattagtgcatgaacgactaggaaacagatgtgctctgcagtctgtctttggaatctacaggccaagatactccatgcaagatttcaagtgcaactaatcattcaatttctaggaataagagcatactttaagtcttaaaccaatgtttgcaaaagtgaggacagcgtatgattgtttatgactgtttgactattctgtgagctccaatgaggtccgggtaggtgccgcatggcatgaatttttgttgtttatatcaagttcaactggtgttcatatatatcgttcatatatccatgacacgctttcctcacccacataggggactagtgctttacattgtggaatctgtatccctgtgatcacaagcaatttaattttttagtgaaatcagaagcagtttaatacctcaagtttatataaatggtgatttgatcccacaattgactatctaccaagatttaaaatcatattctgctacatatagtcgaacgctaacatggatttttagtttgcactttgtagtttattaatgtatacctagtaatttcccatgtagaactcaggtacttagaagcttagtcatgttttagccgcaccagtcaaacagatacttttgacagtgggactattgctgaagatttttggtgttctatcagtagtactcatactggttttagtacgcttattaacacaaaagctaaaaggcttgagctgttcttcttggttgtgcaaaagcagagaatcaaagcatgttaggttatcaagtgatcgcttcctttggagtttggtcatggtcatgcatggaagcacttccctaggagagaatccaagctagcttttggcccctcagtttttttcccaaggactccatgatttgtatttgcttctgctttcacttcacccaagagaatggaatggaagagaaggcatatcatcctatggttttgaaacctacatatcccctcctggcatctactatcagtctaccaccagtgctagtgctagcaaatatagtacagtgacataatagaaaaaatagatagatgaaaagcaaaagtaaatccactgatgtaaagcctcaacctcaaggatgagcacaagtaaaggggcaaggaaacaacagaagagatgcaaaacacaaccggaaataaaaggaggtgaaaaagaattctaaagaggatggtcactggcacccttgaagactactgcctcttgatttctctatctttattgaaattcatgcattattatcagttatgcatcaggccatctctatttgctttctgccatcatgttcatcttgggttgtgaaatgaaggttaatttaagatgatgggatctttctctgttttcggaaattccttctcaatgtttcctcttataaaaaaggataaagccaattgctcaccacttacagctcagcaatccattatgtctgtcttgatttcaagtggttccttttctttcacttacccctgtcagcagtattaactccctgtcagtatgctttgggtttgcattagacaaaattgcacaactctattatggatatgactagagggctagaggctactatttttagttaatatgaacaaagttgtgtttccgtagcaccttattgttgataagagagggaacacaaggggcccaaagaggtgcttgaatttctgaaaggttccgaggatgtccttccaaacaaataagctcaggcaatgactgagcaaaagtgcatcaagtaactgatagttatcaaacttttatttgttactcttgtcaacataagaactatattaattaatcccaatctcagaataaatcttattcactgtgagatattctctctgaagaaaaaagagtttcgttcggtagatttaactttagttgagatgatacttctttcatggttttaaactagtgtaagttttgctttgtaacttgcacatcatgtcatttccatgtagatgttcaccttgtaggtatgttgacaaaagttttatgcccctttctatccttgcatctcgaatattcacatggtctacaagatcatggatcaattcatgcttgttccttcctatccaaaattttagccagtctatttgtaatctataaaaaagtcacacttcatttgagctctgcttgatatctattttttttggtctatactgatttatttctgccatcttaattagtgacaaaaaatgctttagccggttaattatgcttacaccagagtcatgggatttttcctagtttagataaactgttctatgttacactaacggatggttgatttgctattttggcggataattcaccggacatagttttaggcttgagccgatgtgaccgtttgttggaatggatgccatggaatttcctcaattattgctagtgaaagaaggcaaagttagcatcgaatataagggatgagaatagctttttatagttgcaagaatggatagttatatagcaatagatatagcataagttcagaatgataaccaccattcttgtcacctcatagacttgctcttttgagacctcacagattaactcatttaggtctatatccattttctcgtagaatcaataataagtgctgcttttacactctgcttctcttcttttcataagtttggtgtaatgcttgaaatagttgtgcaaatgcagtattctggttccatcacacgtgtgtggatagctctggagcaccggtagcacaattgcacaattcagtgtgatacgctgcattattaggcataactaattagattttgcactcttttagaatagatatggtttgccttgccattttggaatctgctaaagaagagggtgatgtgttggcccttggaaaattggaatgtcaggaattctgtctcacaacagttaacacagcaggcctcaactgcatgtctaaccaaatatgtacctattcttgatgtgaaactatacattcgctgtccataaagttcctgatatgtcagtctcgggtgaacacagattaaatatcatgtggtcctgactcgtctcagttatcctcatttgattggaacatttgaactagatacaatcaaatcaaaaccctcaggatcacccttttattctctgagacttaatctgaaactatttgtatctctcttatcaaaagcagaaaaaggtcagtcaatactcaaattagaatctttgccatttttagacatgaaacacttcttgattcagccatgcttgtccaaaattaaatatcgacctaagcacaataattcaggacctaatttcgagtcttttctttttcctcttgaaaccatgatgtgtcagtttcaagaatattggttatcactagctccaacactgtgaatcagtcttttacttgacctgaagatgtacaatccttttcatgtggaaatttgggaaatgtcaaacgcaccagtcttgcaaaactgttttctcatgagaccaataacttttgactcaagctgtacttaaagaacaaaaggagatatctaattgagtgtagatttatttctaaaaatttccagtctgatctaaagtcccctcttattgttggtccataatgctccctgaaaacagaaatagtggataatacttgtactaaccattagctccatttttctgaaatgattttctgttcttcctctgacattccatattagctttggtggctttggttctatatgtattttgctaaaaatattctggtcgaataaccactgttacataactaattgcatcttaatttcctaagcacaagaatattgcgcactagtgccatccctccaccccatgtctcaaaagatgttgccaaggcaggcagagatgcagggtaaaggaagcattcaaactccccatatttcttttgccctttaatggctttctcttcttttctttaactcccctcttctttctagttttacgtgattctcttgttcttcgcgggccaaagtgcaccaaagaaccaaaggcacaaagataacccgcccctcggtttcagcaacccctgccaccgcactataaatacccctgcacattagcacctcgctgcatcaccctttcacctcacagcattttccaccttagagctcaccaacacagcagctgatacttgtttaggtaactgagcttcctgttagtgtttgttcatttgttttgtatgcatgtaagcatgttggttgtggttttcctatttcttgaatgcaaaaggttttgcaaagagagaacagctgggttatcttataagtcaagtgtgcttctgggcttcagtttgatcattttttcttcgcccttgctctgatccaataatctttaatgagtggtacattgttgatgtgcagggtaagacaagatgaacaggaagccaggagactgggactgcagggcgtgccagcacctcaacttcagccgccgggacctatgccagcgctgcggcgagccgcgtggcgccgctgatcgcggcagcggtggtggcggtgactacgccaacttcggcggccgtggtggttcctccttcggtggaggctttggcactggctctgatgtccgcccaggtgactggtactgcaactgcggcgcgcacaacttcgccagccgctccagctgcttcaagtgcgctgctttcaaggacgatgctgccgtcaacagtggcggcgctggtgcctttgatggtggggacatgtcgcgctcgcggggctacggcttcggcagcggcgccgtccgcgccagccgccctggctggaagtctggcgactggatttgcaccaggtgcgtgtcatcactagttaggctatccttttcttttggttttaatatctgtttgctttagcaaatcaactattcatagccaatatatgatttttcccagcccttattatggtataagacagtacatggcatggataatttacatggttaatttagtggtagttacggacttttgaaagcttgtaatatttctccgtaccatttttgcatattagggggggggggtcctgtttcttcagaagagacaggaggatcaactaattatgctgcctgtcttcattcaatcattcatgagaaagctagtggttctgttatgctgcacgagaatattagtagcttatgtatagtaccgtagttgtaactagaggtattcatccatggttttctcaatctgtggaaaaccggaagtagttgagatgacactatatttatcgtagcatgcggcaaattgatcagtatggcctatttttgaacagtttcattcaaaatctgaatgaacggccctaggcctcgagtatcactgatgatgtggtcgctttaaatattatactgataagcgaagtgtctatgtcacatttttagctccctggcaactgtagcagcatagcatgttccatacatctccaatgctggatttgcataacttcgcaatatatgtgtctaataatgaactctgctttctgttaactcttgtattttctatgtttgatcacaggtctggatgcaatgagcacaacttcgccagcaggatggagtgcttcaggtgcaacgcaccgcgggactccggtagcgctatgacatacgaaaattacttgtaaattatcgtgaatctccccttgtctcctgcctcatgtcatgatctgatctcgtgcgtgttatgcatttgcaggcactgaggtgtaatttgccgtacgtgtccgatcgatctggatccgatgaggcttgcagcagtgacgacgagcagcagaagcagcgttaagagttgtgatgtctacataagaagaagaagaaagtagaatgcaaaagaaatctccccatggttttactagttttgtttcttcccgttttagatttggttctgattcccatttgggaggacccgtcgacccctgattatctatgttttacccgttttatttcctgtttctttcggcatgtttgctcttcgatcgagtcgtgtaacccgaaacgcttgcgcttgagaagtattattattattaactagtatgttgcttcttaattaattgccctgctcgatcgtgttcacttcattatccaattgtttgtttgatgtatttgttatatgcattttagtatctaaaaaatgttatcttatcggacagtaatgggataaccagaagtgtactgcgaatgcgaaatgtcaaagcgggatattgcagtaccatagtttggttgggggacaatgccatttgcagaaatcaactcttgtggatttagagatgtgcctaactgttaggagcaatcaaataaatgcattttttgtccttcaaaattgattatggtctactttggaatataattttttttagagagattgtttttctccagggcggcgtaaaccggccgaagttttttagggagattactacgaattgaccaacgaaatcccatgtattcctaagaatcctttatatttgagccagttgatgccaagtatagcagaaaacacagataaaatttacaatgtttgcacgtgagatcagcattatatagagataaaattcagtaagcgtgcgtgtgaaatctatgacattcggaactagtaaggtatggcaaacttggacatagctacgtccggtgcgccgtcacatgtagccgcactagtatacaagtatattgtaatagtaagtactcttttttctactactactagcagtagttgtacaactctttacaaaaccttgcgccagcacgtgcgcggaacaccactaccgttacggtgaaactagacccgaagtccaatgtggagggggacacatgcatgatcaagggtgcatgggtggtgaaacttcactgtcaaaaagtttcaaagttgcattggatgcccttgagatgcactcactgatattgcctcgctcttgtctttactcccgactactcctcctcctcctcctcctcctcctacctcttttcttttgcaagtaaaaaaaagaaaagaaaaagaagcagcagcagcagcagtgccatgcatatgcagcgtttgctgatatgcatgaggagacgaggatccctgtccctgcatgctgctgctgcagtcaaaagatggcttcgctcgccgtcggcaaagccatctgagctgagctttatacgtggccgcgcgcacgcagcagctttggctcgctgcgctgcgccggccgcgtcgccgcgcgcttgcgttgcgtctccggccacttgctttagcttcgccagcttttatcgtgtcaaaggcggcgcggcgcggttgcgagagcgatcgatcgatcagctcgttgctgcggccggccatttgcctttggagtttggagatcaaccaccgtctcatgtgtatgtgctttattatcgggaaatgctaaacgacggtatgtatatatcccgtttaaatgggatgatatatttgaggtagtatcgtccgatacctcataaatatcggtttatatctcgttcgaacagaatgttatcttctagatattgtctgatatctggtatatacatcggttgatactcacattttagacgataccgtccgaatgagataccgtcatgtagcatttgtgctaggttagcaagacggtggttgcatatcagcatgtgtgtatgtatgtatgtatgtgggtggtcccgtgggccgtggcggcccaacagttaacgggcctcgcacgtgagccgggaagtcggtctcggctcgcacgcacgccgcggatcggagagcatctgctgctcgcctcgctgcactccgcgaattttttttatttataattttttttattaaaagttttacaaaaataattttccattttgaaaattgacggaattagtcgcctaccgccctctgggagggcgatttttaaaaatcgccctcccagagggcggcgaaaatgacgtggcagccggccgttcgctctcgggcaacggccgtcaacgaaatttgcaggcggcccccttgccgccctccgctagggcgattttctactgtgggggggccgcctgcaaatgggccgcgagggggcatggaattttgcaggcggcccccttgccgccctgggggagggcgattttgtactgtgctctatattttttttaataaatatcaatagttatcaaatctttttatattgaaaactatacaagattaaaatctccaagactggtaaaatacaattttattattttttagggcatatttggattgttaccgtacaaatattttgttagtgccaaaatataagcaagttttggcactaccaaatatttggtaaggtaaaattgcatttgatcatatttggtttgctgccaaaatgtaaaattgtagtgaaaaatgttctacataatctcaaatctagattacgtattaccaatgaataggcttccattttcgtgtgtggtgtgctagtgggaaagaatatatgaagaggttgccttcagattgtcaattatatagcgtcgttttcactgcaatatatgtgaactcaatgagatacattattcattagatgtgacaagacgatcacgcgtgggcgtgattcactttatgtcaacaggcagcgccgaaagttgatagtgataactcgaggtgccgcttttcatgtgtgctgttgtggactgtgcgcgctactagatctgacactaccgtgaagcgccgaaagtgtgttgtcgtgagtataagttgttctagcaccatatgaatgaaaagaactatgtagacgagacaaacacaagtagtactgcagtagtaatagcaaaaatagtactgctttataagtttgtaagccaaaagaaacggtcacataaggactgaagaggtagaacactactgacgaggcctcttacccctatccctcctaccctgcgccctaatgtgcccctgggagtacgtgagtcggtccgggggtacggcacggccaacccgtcctgcctgtacaggtgtgatctctggctgctcctgagtgtgcgcctctggagctcctccaagctgagaggagcctaggacgtcgtggtggtgtgcaccatgcaagtcgtcgtcgtagaactggctagtaggaccagtcctaccggcgtgagacgaagaggccccagtaccgaagatcccggctgcaaatcctgctggacaaggaccatcagtttcgtacaagtatttaacagtagtaataaaaagtaaagtaccgtgtgggcgagggatcgacgctccgtgagaggaagagctggcgaacgcgctcgaagaggtggcgaacgcccctgcggagctcgtggaagcgccggtcgtgcctgcgaacgcgctcgaaggcagacgaggtcctgcgatgaggaaacgtgcagttaaaacatggtgacatattcgtgcaaaagctgaaacaaaaatgaactaatatctgggctgaactgta

SEQ ID NO: 21292 - DNA, 5661 bp, Oryza sativa
aacaggaacaagaacttaagaaacctctgggctgagcagtaccgtgcgaaacaggtgccgtaggtcgaggtcctgctccgacggtaggcgcgcgaggccgtggttgtaccggaccagctggaggtacgacgtccacggcgttgcgacaggagaagacgagcatgaccgcacgcatcttctgctgcatccggtcgaaggtcaccctctgctcaaagtcagtcaagtgcaaacctctgttcaacctcacttggactgcggtgatatcggcactgatatcccgtgcggcatcagcctatgcaagatggaaataaaaaattcagtagttgtcctatattatgcaagataaatgaaataattgtaagaagtaatacaaattggacgtaccgccacgaagtagtctcggtcacggtgcgtgggatacgcgtccgtgacagcggcaacgtgcggctctggggcgtctggagtgaaggtcacacgcgcacgagtgcgaggaaggtaccagccaaggtagtcacggtagttctcctccgtgtgtgggaagagctcgttgatcacctcctctgtagctaacacccagtcgtcaacgtactgctgtacacgtggagcccaaagtgcgcctgccagctgtccccgtcgagtcaacctgtgaagagagttaaattatatggctcgatgatgtatttatcataaaaatttagaaatgaacaatccgaactcacgagtggtcggcagggaggacggtcggctgcacgttgcccggaaacacctgcctaagtccgaactgtctcatcacacgctgcgggcagtgaggctcaacgaaaatgtcgaacaccatcggcaggatggtgagccagtaagcctggtcgcgtgtgcacaaggacgaaagtcctagcggtgctctcgcagcgacggcctcttctgtgtacggctcccagatgacgtcgctcggctggagacggtcaaactcgaacacgaagtccgggtaaccacgtctcacctggacgtgagcgtaacgacgctgcaataaacatgatcggaattagacatgttatgtgaagaaaaaaaaagaagacgactgataaacttataacgcagcgaagttgcactaaccccacgtcgacaccagtaagtccccatcgtgggaccgtcctctggccactgcgcgctgcgaccaaccccgtagggtgcgctgtccaccactggtcgacctatggcaaacctctcggctgcccaaagctgaagcaacatagggcagccagcgatgatcgctcccgcatcagtcttcgtgcacgcctcacagagggcacggtacgtggctgctagcacggcagaaccccagctccactgcggcacgtcctgtggctgagcatccgcgatggaccgtgcgtagtggaccagccggaagtccacagcgtgcccgtgggtgctagtgaacatcacccacccgaacaaccacaacaggtacgcctcaagggagcgtcggaccgagtaatcatcagcgtcagggtgcagaaggtccgcctacaattaagaatgaaatgttagtacaaaacaatcatccggtcgcaaataagcatgtatgataataaacaacttatttacttacagtgaactggagcaaccaagccttgctaggcccgactgtagagtacggaggaagggtgttggccggtcctaggtgtggaaggcgcatcacctgctcgaagcgcgcagtgatatcctccttccacccaaaaacaccgtccacgggaccaactggtgctcccgccagcggtagcccgagcaggtacgacacgtcctgcagtgtcggagccatctccccacagggaaggtggaacgtgtgcgtctcaggtctccagcggtctacaagagcggcaaggagtgaccggtctgcatcccaccgcttcgctgggtcacggtcgtccgccgccgcctcaacaagcctacaaagtggtagaaggcctgccgcacgcaacctgtatagagcaaacttcaaacataagtacaacacaaagcaaagttgagttgaaatgtaaacatacgcgtaccaaggaacgtgacgggggtcgacacgcaaccactcgcgcgacgtgcgtggacggaaggtgccgagctgtgcaccctcaactgctgacaggaacgagcggtggttcctgtcaatcccacggttcaacagcgccggtgtgtcgtacgccatacctgcatcaaataggttgatcagaaacatataaataattagttcaacataagtaataaatgttcataagcgaatgactcacacatattaaacaagagtacaaacaaacaaaagtgtttagtccgaacactcatcacgataacattatgatacaacaccgaatagttcgcaatactacttgtacaacaatagtcggaggtactcattacaacaacattgaattgaaattacacgatagaagtatttagtccgaacactcattacatcacaacagtattttatttcctaaatcgaaagcattgttataccatggaatcgcctgctgcacgacgacgccttggccttgcgcgcctgcttgttgttccttcaccaggtggtcgcctaccatcacttgcctgtccagatggactagcatctgcgccgcttggaacttctgcattcttcgggcatttcttgtaagtatggccgcgcagatcacacttgctgcagcgtaaagtcctcccacctgcttctgactcatccatatcatttctgatgcgtctagtttggcgtcgaccctttttcacccttaacttagatggatctggaatataaaaaacttgggcactcagcgttgtgtaagatcctgagatcccgaacccatatatctcctcactccatgtatgaaagattgcttctttcctgaaataatttgagacgtacacattgggagatatgccacaatcaccggcagcagtaagaacgtgtgagcaaggaaggtgatgaagcttcggcttcatacaactgtaggtacatccaccatccgccttcaagacacattcctgcacgacttgcttgcgatagataccacgcctgctcctatcaacacacattatttcataccgatgcacttgtgtgccttgagcaacaactctatgtctctgtgcctttttgattttatcttccatgtactttgtcactacgttgccaaacactatgttgttatcggccatggacggaccaattttcttgtatcgatccctaaagtacgcttgcgtgccgtgaaggatgaattcaacaatagcaaccaatggaagtacccgaactcctcgcattacccagttgtacacctctgccaaattggttgtcattatgccataccgagatccatcggtgtcgaacaatagagaccacttctccttaggctcattctcaatccactgagtgaaatttctgatggacgaccctgacctccttctcattgttggtgggtcatcatgtaatgcaccaagaggtatgggaggctcgtcaccttcaacttgtggtctgcgagattgctcatctgtttgcttcgttgtcaactcatccaacttgtcccacaactcattaaatttcttctcttggttctgtgcacagagcctcttaaagagctccataagatgcttgttcttgaattgcttgtagaaatttgcacccatgtgacgcatgcaccaccgactccgaacatcaggccacttagctggaagtcccttctcatcccaaccgttccgcaagtagtcaatagcccgcaacatacccgcatgacgatcatgtataaggcaaacgttgggcctcatacgcaccactgcaatgtgcactctctctaggaaccagtaccagctttcagtgttctcactctctacaaatgcaaaagccataggtagaacctggttgttcccatcacacccaattgctgtcaatatctgacctcggtatttacctgtcataaaagttccatctatgcatagaacaggtcgacaatgcataaaagcattgatgcaagcacccaatgagaaaaaggctctttgcagcacactctttgttcgatcatcaaccgatgtaaatgtatgtaggtcatagtaagtattattattcctctgggcaatggtggctaacaaacgaggcaaattatcataagaagctttaaatgtgccatacctcatctcaatgatcttttgtttggctctccaggcctttgcatagcttatggtgtacttgaatttgttctcgatgtgcctaataattgattttggttcaaagccaatgttaccaacaacactgctgtacatctcacttgccacaaaagctgaagtgatgtttcggtgatacttctccaccccttgtaagtagcacttgtgctcggtcacaatgctaactttccaataatcattccatttacccttatatgcatggacacgccacggacaatcttccttcatgcacctcacttcatacacataatttgttgacttgaccaccctaaactctctctgcaaggaaactgcccaatgcttcaccgcctccttcatctcatccttatgagcataccttgcaccctcaattacctcgttctccttatactcccagggtacatgatcaccctctgatataacaagtccagagaagtcctcatttgcccaatcagtggccattacatcaccttcctcatcggatgatgcgtcgtcgtccgcttcctcattatccgaatcttccctctccatttcatcaacaattatacggactctctccccctcatccgccatacccatggcctgctcctcccttggttgattttcctcattttgcatcgatggtccaacaacatcccctgcattgataggaccctctacatcttcggtttgcattgaaacatttatatctttctcttgtaccgacacaaatataacgaggggccatgaccgttcaaaagccatttgcacataccgtctccaagcagcagtgctgtccatcggcattagttcccaaaaataaccttctgttgcacgactcactacaactgatactgacattgtgtagacttcttggtctattctaaatcctctcaacaaccaactataaattgactgaaatgttctctccgcagggctatcgatgcccttagatgtcattacaaaatctgacagatcaacaccatctggaccaaatctaatatttccttcaccgtgaactatctgaaatgtgaccttacttgacattgtgcctgatgaaaacaataactgcgttaacctcgcatttctgtactacgccctaagttacattctctacaatattgttctctaaatttctaaaagtacattacattctccagatcaaattaaactacatcttacaattaacactactgtctatgtctcaattcatactattatattctatgctctggatctacacatatgtgctgtgtgctacagatgtgctaaaatatatggaactaaaactaaaacgcaacatatatactcaaacataacatattagtacaaatgcaaaagatgtatgggagcatacctgtgatgaagtgagcgaaccagcagggcttcgccgctccccttctgctgccctcccctctctctttcgtttttttttggatttttagtgaatataatgaaatttcacagaggaggggctgggctttatagggggggggg

SEQ ID NO: 21293 - DNA, 1356 bp, Oryza sativa
atttcgttgacggccgtcgcccgagagcgaacggccgtctgccacgtcattttcgccgccctctgagagggcggcggtaggcgactacttccgtcaattttcaaaatggaaaactatttttgtaaaacttttaataaaaaaaattataaataaaaaaaattcgcactccaccgtccggagacggcgagcggctgacgtgatgtgggtaggaagaacgcgtactacttttcaaataatccccaaattccacctgctctcctggtcttcctctcaatccgcttgccatcgatcggctacccaccaaactccctcactccgctgagtgtttgacctgcttcggcagcggccgcgagagcttccttgggtataatcaattccccttttccactcgtaattgctggcttcttgctcgctatgaattgcatgttcttgattggtctgtggttgtgatccgtccgtgttggtggtggattgggagtttgggggaaaggggaatggttggtgatgtcgaggttgatgaaggaacgggaccggaggattcggtgttggagttggtggcggccaggagaacgcacgccatgtgttcgtcggattgtcgcagccagctctgagtattgaattcttgctaggggagagattggagcttcgttgctgttgctctagtggtttgtttgaccggaagcgaggccatatggatgctgtgaatgttcttgcctcggcgacccagctggtgtccgcgatgctcaccgcggtcggcgcgctggagcaggcggctgccgacttcgccgaggctcccaggaggctccaggttcttgaggattttgtgtccgaccttgggctgttgatgcagcaatccaagcagaagcacgcgcacaagatgcacgcgccgcagctcgagcgtcagctccagagcctaggcaagctgatggaccagctccatgccaacatcacaaaggcgaggcgggtgttgaagaaaggcaaagggaagaagggcttggccagagttgtgtggagctcggtgacaggggaccctctgatgaagtatgttcagctgatcagggatgatctcaactggtggcttgagttacagaagctaacagagagtgtgggcaatgtcatagcgtctacagctaagagtacgccatccttggtgagagtcaagtcggagcatggctatccagtgtcaaagaagtgcagctatgtcagggagctgcttatcaatgatggtagtcatcgagttgtcctgattgtcgggtatctggtattgggaagtcgtgtcttgctcgacaaatagcttctgacccgcctggtaattttgtggatggtgcaattgagcttagttttgggcggtggtgc

SEQ ID NO: 21294 - DNA, 34836 bp, Oryza sativa
cagtaggcggaggagtgatcttggatatgattatggatactcccaaatggatgaatttctatttcagccttcaattgttatctagcatttgaatctctgaagtaattatttcctgttctaactgcaggtattggctgtacgctgctgttatataccggtcattgcttgttacaaatgatgagatgcgggaccacttgtttcaactacttggcactagtttttttccaagatggaaggagaaccatcaggtttgtctctcattgcagaagtgaaccacacaaatctgtgttcttttgtagaatgctgcacagtacaacccattgagtaagagatatttcaagttcttttgcacggcagcgtatcctgtgcacccgctcaccttggtgcactcatgcactcacgcgacatgggaccttcgatctccatcggacggatataagatgagagagtcttctttttacaaaataacccttcgattcatcttcttgtctcccgttcaaccactttccccaaatctatcccctctgtgaggcgtccatggcagctttgaatctcgaaaaataaaacaatgctcgacggagatggccgctagaaattaagattaatcaagattccagcatgcagccgtcaaatccttgctcaacgatatgtatgatctcaacctcaggatctttgggttgattgcatgatatatatggcatgccaaaatttcgaatcaaacaagaaattccgatcggatatgcctttgatgcacacatctgcaacccccgggcaaagactcatccattccatcccatgggcaagaactcttctctctacagagtcaggtacactgcgccgcagctgctccatcggccgaacaccatggccgtcgccctggacacgctcgcccgcgcatcgtccctctccaacaagctggacaaccacacgcaccttgaggcgtgacatgccactggccgcgccgccgcgctctggatgtgctatctctgtcgccaaacatggcttaatttgagccgccattgacgtcggatagagattttgaggaatacatcttggaaaggacccaacacaggaagacaaaaggaatcaagggtctatttacaaatttacctgtgtatgtgcgggtggttttatgaaaaaacgtccctttgcattacatccgtccgatggagattgaaggttccatgtcgcgtgagtgcacgaatgcaccaaggtgagcgggtgcacaggatacgttgcccttttgcactccattttaacgaggtgttgccttggtgaagcttgcttgaggccctaagttctgagtagctcttacatattttttttctggagcgtaaaaataatattttgagtgaattttgctcttttttatgtaaaaaaaatggacacaataatcctgggaaactatgtgcaggtcaggttaacattctcgggccgtggttggaattttcacctgccgcctccttattcaattgtcattcaggtgattactctaaactgtagtaaagttgtggagtgccaggaatgcatgaactatacagaatggcctgaggaacgtggtttgatgcaggaatctgaagatggaagctggcatgtaccaacaacaaatggtgatgatattgagaaaccacggcagtggatttgtgctactaggaaaatttcagggaaatcgtctcaagcacttgcaagggcagttgggtaagtgcgatgggttgcatctccattgacgggattggtgcatgggaatggcagccaaatttcgggccaggtatctgcgctgctcctttgttgaattggaggcggcttgaagagaatcacaccattatgtaaggcggccggcagatgttgatggaattgagggctagctgctgagctgacccaaacgatggctgtcaagttgtaggaagcaaagtaaaagatttctgtagcacatgaaaaagtttgccactctcttaaaatgtggatgtcatggttgttttagctggccattggttgtacatgtacatgtattttcctcaaggttaaaatctgaaacagcgaggactagtcaaacaagaggtcgtgtaactgaaattattattactagtaggagtaaagttgaaattgatggagagaatataatactctagtgtacatatggttggtccgtccgttatccttgtgggtggagagtagcgaatgggagcaggccgcgtggaggcatggagcccccaggcaaggcgcgtcgcccttccagccacaacatccactgtctctctctctctctctctctcgctgctcttcatccgattcaactcggaccaccagatttcttccttccttccttgcagaatctttcattgttcttgttgggaggaaggagacgaggcgcgcgaggcggcgagagggaggaggcattctagcatatacagatacagagccaggggaggtatggaggagggccttgcacgagcacgacgatgccaatagaagctgtggcggtcgcttctttaccgatggcgtcgcgcagcgccgccctgtgcttctcctccgccgccgctgcccggagccggagcaggagccggcacggcaggatggccgtcagctgcgacgccggggcctcagatctgctctattcctctctggtactacgttgtactccatccgtttcaaaatgtttgacacatttaactttttagcacgtgtttgaccattcgttttatttaaaaaaaattaattaattatttattcttttcatatcatttgattcattgttaagtacacgtatagttttacatatttcacaattttttttaataagacgaacggtgttaaaaagtcaacggtgtcaaacattttaaaacggatggagtcctagtatattatctctgtctcaataattaggatactaattaattcatgtgtcgctgataaccttctgaatgaatgttattgttatgaggcaaggctgccaagctgcttggccctcccaccagcttcgatgccggcaagctgacggtagagttcgcccacagccacgggaacagcagctccgggttccccagagcttacaccctcacccactgcgacttcaccgctaacctcaccctcgccgtctccgacaccatcgccgccgaccgccgcctcagggcggacgacgtcttcgccgagtggaagcagcagcaacagcaggagggcatggccctgcacgtgcactgcttcgtcagcggcgccaacctcctgcatggcctcgccgccggcttcaggtactacgtcttctccaaggagctgccgctggtaagcaattatatatcgatattttgtactactattacagtagtagtagtagtagtagcaattaggaaggtgaaatcaactatgataagctgaatgcaggttctcaaggcagttgttcatggcgacgcattgctgttcgcggagcagccggagctgctggaggcgaaggtgtgggtgcacttccactccagctccaacgctaagtacaacaggctcgagtgctggggtcctctcagggaggctgcaaacgccgaggcatgccttccttctctcttcccgaattgcaaattgcaaatgcaaatacctgctagctgaactcaatgcaaattccaaatgctttgcgtttgcagacgacgcacaagaggcatgcgctggagcaactgcacaacgcaatcaccaaaggcacaagaaggcgtaggaggaagtggtctagcccggacgccatcttcagcgccctgctcgcccttctcctttgatgcatatcgggaaccccacacattgtcttttttttgctctgccttgtgcgcatcaattccaattctttcatccaccggacacttgacatgtatgtatagtatgtacccactccacgatcaacaaaatgagaaacgattgcctttccaagcattcctccttaaattaactctgcttctgcttgctcactcaaatcatgtttggataacatatgccacatcatgtataaatagttcctctacgttcttcattcagaactggggacaacatatagctccaagtgccatgtgctctacatactacatactactacctcctctgattgaataactaaaggggattcatacatactgaggtagtaactacctttgatcgattccaaggtagtaactaaaagggattcattcatactactagctcaagtgccatacgctctacatactactagctcctctgattgaataactggaagggattcatacatacaaaggtactcgtaactacctttgttacgctacgctacaagggtagaagacagaagcggcaggctcaatctatccatgtcgcatctctgcctcatcctctccaccatttcaccaaacttggctatcaactcaccctcatcagccagctccatcctcttgatcctttccagcatttcatcaaactttgccatgtgttcctcatgcagatcgtcgatctgcatccttatcttctccagatggcttctctcccacctgttttcatggagcattccaatgagctcggctgcatactcctcctccaaagcaacaatccgtcccattgtatctcccaaaccatccatcttcttgctcatctccttcacttgatcgatcaagctctttttctcgacatctctacaaatgtgctcccaaggagcatagcagcgcctcaccataatgtctctcaccttcctgcgcataaataacatgttcaaaaacatgccagaacccagaaggaagtccagggacagtcgtacctcgtgaaagcaaaacgaaaaaaaattgtagggcataaaacaatgcaggaagaagaaactatacaatcgattctacacacagcaagctataacaggatctctgaaaaacaaaactataagtgggatcactgaaaaatgagtaagaaatgacagacctgtttattgcaccgtcgtcacccaaagttgcagtggtctcagttttacagaacaggacgccatgacggttcacgccagctataccttgttgttccaagaactggatgtgcttcttcaaggactcatccctgagatatatgtgcaaagcatggaatataaaaaagttgtacccatacacaaacagacaattatcaaaagttacttaaatttatttttaaactagcacttcggtttggaggaaggccagggcaacaaaacgagggttctgacatcggtatccccagaataaatccattgaaaaatctatacactttgccactttggtgtgcagtttttgactgatcgataccagagtatgaatatgtttcttctgaaacttgaaccttttggcattcaacctatcaaatgatggaaactatgttcacgtgtatcccaaaaaaattacaaattggcaggtgtgaaaaaaaataatactaagaaatacctccagctcttgaggaccataaagaaactgtaatttagtacggatgagaaactaccagtaataaaagactgagtacaatttcgatggtattgaatataacaaagaaccggagcagacttcttacatgacaagctgctgaccattctccacttgcattttgtgttgggtgagagaggcgtcaaacccatgtggcggcaaactagagtactcttgttcattctgaaggtaaagctgtatggaaaggaaagaaccaatgaaccataacttccaatacgatattgtgatatagtgtagagtacgtcacagtctgaattgcagttgtgattgacaagaaaaggtatggcatacatcctggttataaaattgcggttgttctttgcattctgtagctgtcctaaaaagacctcccttgaagatctgaaacagcaaaaaaagggaaattgcacctgtaaattaacatggaaattgcacctgtaaattaacatttgttatccatacaataacttgctgcattcttgtaccgatcaacatacaaaagaaaaaggtcaggttttccaagagatggaagatgaagatgattgagctcagactgttctagttgtttctgtttcatataagcccttatataagtatgatttacatttaacagtttaaatacctgttgcttgtaaatcttctcctcaatggtcccacaagttaccaaacgatatacaatcacatctttagtctgcccaattcgataagcacggtcgacactttggttatctatgctataaagtaaaaaacatatatgattaattgaagaaagttgatgtaaagcattcacaatttagaattgctgggtaccttggattccaagcaggatcaactactataacccgatctgccttggtgagtgtattgccaagtccaccaacatgtgaggtcaacaacaatattggactgtcaagcccctcttgaaagtcctagagggtgcaatgcaatgttatggaatccatggcttaacataacagacagaaaaatgtgaaaaaaataaggaggtaccttcagaatcttcttcctctcagatatcttggtggtaccatcaatacgcaggaacttatggccctcgatagatacagcatcctgctttgttggaatgattatgacaactatccgaagattaaacagacatttcaacaatgcaatgcttgctattaaactttatatagattagtaaacaactaaaggcattttaattctatactgaaagcatatatgatacaagacacaggtaatcatggacacacgtatggcatgattactgacagcaattaactaccgatatgattcttccagtaacaaagcatagttttcaaatgggaaacttttacaaattgaatcaaataaagtgttagcaatatcacaagcacatcacatgcatgataaagcaaataaaggttaatataagaataggctatacctgaataaggttaagcattacacgtgtctgtgaaaatatcaaaacatagtggccctcttcaacaaggttcctctgcaacataaaaaaatgtagcatgatttttcataggaagtggcacattaatccctttatatcagaaacatattgtatttttcttctgcagaacatccaacgtagccttttgacttgctaacttttaccaaaatacaggaataatctatacaagtgttacgttatgatatatccaaataaagtacacatctatataatttttcttttagccagtctagatataagtaaatattgcagggagaagaatttaataagtttaattgctccatatactaagcacattttgtccatggactggagggactataaaatggacatttcataaaagaagcactgaccagtaagggaaggataaaagctatcttgcaggaggcgccttggacaatctgtagtcttttgtcagcataaaggttatcttcaagaatcctttccaccatgcacatatctcggttattcagcatggcacccatttcttccaggaaatcatcagtatctcttttagtcaaaagtagagggtgatcgcatattttcctcaaaatctgtttgtgttgaattaaaacaagtgagcacacacatgcatgcacgatgcaccattacatattttcttcaaaaatctaccaacagtaaatggaacatggcatactagaaatttcaattcactccaaggagtgacatcttaatgtcaacggaagcagacggtaggtaaaatgatgaaagtaaaaacagtcagtacataaataccgtgctagcttccaaggatgaacccttcaatgctccagtttgtgaacgaactggatctttattcaggaaggcttcatacaatcgcctctgcacccgaaacaaaatcatcaataatctataaagcatagacacataacccttttatactcccaacaccttcattatacaaaacctagagcaatcgtatactggtggaataccagagtcaaatgcccaaggagttctataaatggaatagaggtttgcagcagaacagcaaggcacttgcctggcaagatgtcaattttaaccagataaccaattcattcttctgaggtggccttttgtcatctttcgcgccagtatctacaaatatttcacttttcatacgacggagaaagtgtggtttaatccgctctcttaattcctgtgattaatagcgttcagaacagaccaaaacaaatgatgcaacaagattagtacatcaggcacaaacttattatgtcgaaagagaacatacttttgctgcatttgaagccatttgcttctcttgatcagtagcattcttgtcatttccacaaagaattggcttctcgtacctaagttcgaacctgcagtaaccaagagaatctcacaacacttgactttacaaaataaatattcataagtatagattgattttgcataagtattgtataagaaacaagggggagttaagtgatttacgcatcctcatcaccaggacatctgggcaacagaaataaaacaaagcccacatttcctgccagaatagtgatgctcagtggaagtaaaagaagataaatagaaaggttagaggaaaagtcatttgagatgagggtacctttaatttattttgaataggtgttccagtgagtacaatgcgatgagcagaaggtatttgaaacaagctctgtgccctttgcgtctttgtattcttgacaatgtggccctcgtcaagaataacatagtcccacagtggttcttcttcgttgttgtcaacattgttaccgttgccattgcctcttagtaacatgtaattattccggacgatgtggtaggatgttagtagaatgccaccctcctggtgaaagattcaacttgcaagtagtgtacaagtatggaatgggttgatggaaagatgaattgaggatgaagtgtaaagttaagatgagaccttgaaggtgcagttaagttgatagcagcgatcgtttaggctagggccagagtagctggcggaatgcagattaattagagaagaagtaaagcagtgattgatgtgtggatgtaagtaaagatgtggcttcttacagtctgatgtggtgttgaaggccgaggagtgagaggtgatttacccagtgagtcaagtcagtcttaggggcgacaattaaggctctcttgatcaaattggaatggaataagccggccagcaaagcagaaacctggatttggacccggccttgcccttgtgagaccatacattgattgatgtactccagtggattagggatgggaggaggtggaggagaggagaaaagaagagaagagtacctggatggtcttgccgagtcccatgtcatcggcgaggatccctccggtggcggtgcagtgcagcgcccagagccaggcgaggccgtcgcgctggtgcgggtagagcgaccccaatacgcggcgggggatcttcatcttcatcttgatggcgccgacgccggcttccaccaccatgttgactagctcctcatcctcatctacctccacctccacctcctgttgaggttgaggttgggaagtcggggccattggaacgaatcggccgttggcggcggcggcggcgagggctccgcggccggtggtgaaagtggaaggaactttaaagacaacaagggtactactagttgagtttaaacggaacggagttgagtttaattcagatcccttcctgccttcaccccgcgcccgcccgcccgcctcttcttccttcgctttcaaactttcccaatcctttaaagttcgggcctgttcactttaacaaatatactaaaattttagcagcaaactaaatgtagctaattttttaacaactttactaaaatttggtaaagttttaaatagcattaaagtgaacaggcccttccttccaactaccattggattttaggaggggttgtttggttgaagtttgaactactgttgcttttcattcctcaactattatactataataacaaatcaaattatcatcattttcttaaaaccacgcatacagtagttttcatttaccggctacgatattataggtgtttttaagaattatcatgcctttgtaaatataaggggcaaaaaccaaaccaaagcaacaatacaaggataaaacccctctctttctttccccccttttgccaatgaccaaaagcaggctgacttcagctaataccagcgtaatttactggtactactagcactgtttaatttacaaagccagagccttcacaaccaaaacaataggacactccaaaccatataatagtatgtactatgactactgtttttttttttgcaaaaacttcctatagaaaagttactttaaaaaatcatattaatccattttttgagttcaaattagttaatactccaattaattatatactacttccgcccctaaatataagggattttgatatgatgcaacacatctttatacaatgaatttggacagcactagaatatatcacatctcaccaaaatcctttatatttaaggacggagggagtaataactaacatccttttggtcaatattctctttttctcctctcagacacaagcctaagaggcacccgagatcagcatgtgttccgttccgtggtcgtcacaattagtacaagtagcatgcaaaatgtcacgccttagtgactactagcatgcaagcatggaatttaagcaaaagaaacagacatgccctacactagacagacagatcatccaagcagattacttccgttggacccttcctctccaatggctccggagaagactcgatcacggtcagcttttcgtccagctcatttatctgcctccttatcttgtctccacgatctggtagcttcgccacaagcacctacaacagcggcaaatggtgtaagacagacagacaacacaccacaagatgcatgcaacaggttcgggtgtctttcttgctcccaccgtgtttgcaagggtttgcgaaagccggttgattttggccttgatttcctcaggactttctgtgcttgtgctgttcggggagtatgttcgagcaatgaactcttttggcttcatcgcataggcagcactacacaaaacaagcagcacggtacacaacttaattatgcagcccaaaagccattgattaagtcccatgaactcctcttacccattggcaacatagtcagatgaggctcccttgtagtagtgcttggccattggcatagctcgacgactgctgcacacagaaacagcatacatcacctgttagacaccaaaggtaacagcaacaaatggatacgtgttgcaacgtgccagatcaatatttctctgaaagcaaaacaaacatatgctgcactttgaagacagtaaaattaacctgtccaaaccatcattatcattcagtgtaggtaagattgctgtcttagaaaacagaaggctgtgatggctcacgcccgctatgccttgttgctccaggaattgtatatgcttcctcaaggagtcgtccctggtacatgccgcagatcaacaaacttatcatcagtgaacatggaaatcattaccaacaagccagcaagtattgctcagggattgagcagctcttactccagcaaatgcatttgagaaatactacttcctccgtttcacaatgcaagtcattctagcatttcctatatgaatgtgggaaatgctagaatgacttatattgtgaaacggagggagtactacttttttatgcagcagttcatcatcatatgctttctacatatggcagtaaccatgaaatattgcagagcaacctaaacattttgccgcacattttctgctgatatcacaaccatttccccttgtttttttgtgaaaatgtagtagcataagcagcagtcacctcatggaaaacataatagtggtgctagaattaaccgactaaaagtagatgtcctacatcacaagttgttgtccatgctcttcttgcaattgcttttgtgtcagcgaaacatcaaaaccttgctcaggcagactgaaaagctcttgaatatcctgaatgtacacacaaaatagccatattataaattatccaatatgacagagaaaacaataacaagaaccgtatcacactaagtaccctcttgctgaaataacgagtttgttctttgtgctctgtagctgtcctaaacagagcccccttgaagacctggaaaaggggcatgtattatctcattagttagaatctagcttttattttactgaagtaaatatgcaatatgcaaataaaggaataggggtataacactgacggagacattgcaggaaaaacatgtaatggcacaacccagtaaaaagtgtcaccagtcccaccttttcttttcttacatgaacccagccccacattaaactctcaaatttcaaattaggaagagaagttaacttcaatgaaaaaccgtactttatttcaccccctagaaagtacaagttaatagtttggtgctacatagagaatctcaaggaggcatacaactaaatatgaccatggactcatcttttcaatattttttttttgagatatcatattttgaatcagttgcttcagtgaataacaagcgcgataaaaggcataaacagcaagtaaattcttgaccatatttaaacctgcaatttgtatatcttttcttcgatggttccagatgtcataaggcggtatacgatgacatctttcatctgcccaattcgataagcacgatcaacactttgattgtccgtactgaagatgggaaacaggagcattagtaaacatacagagacaaacattcagtaaaataaaaaggcaataaactcagtaaggaaacggcgttgttcaggtaccttggattccaagcaggatcaactactatgacacgagctgccttggtgagtgtaagtccaagcccaccaacttgtgtggtcagcaaaaatattggagctccaggaccctcttggaagtcctgatcacaaatgcattccatgtaagcaatatagcagtaacaattttgcccatggcataaaagaaggaaagggaaagacagagaagaaccttcacaatcctttccctctcagaaatcttggtggtaccatcaatgcgcaaaaacttatagccttctaatattatagcctcctgttgcagtaataagctacattagctactaggttgaagtagtaacccagaatgcatatcttactactccttactactttttaaaagcaggaatttgggggggagggcaggtaacggtaggttttacacccatctctacaccagaacttttgtggctgtaaatatataggcacgtgtgcattatttgtaagatttttacataaaaatattatatatttgcatgagtatatgtaggtggtaattggtctcatataatcgtgtttataagttctaaatttgagtacaatcaatgttaattattagatttacattatatttagttaggatcctttccacgcacgggcatgatgatagtaatcgtaaacattacaagaatgataaaaatggtcaaaggagtaggaaatgaacattgaaaaacacactatggtcagataggctacatcagggattcaggggtgtactaattaaaagcctgctcgaggtcaagttcattctgttaggtaatttgttttcaacttctcacaaatgagtgtacggcaaccactaaaggaaaagaactccagtctgatacaatgttttttctatcattcaacgagcaaatatgttctggaatagttttagggagaagtgtagagcaaacaaaaaaatattcaatttaaaaaaaaacacacattgatgataattgaaaataagattgctagattctgaatttcaagatgtaaaaatcttaacagaagttaacaaaaaaaaagtcccatagaaatcatattttcatgaaactatatgtaatcactcaattcaaaaaatatatcactactagtactgcatgaggataaaccaaaaaagttgattctactttctaccgaggcactgaggggactgtcaatagtatatgtgattggatgactatacattgacaggaagaaatcaggccttatcaagggctcagaacaattactttgctaggataacaaataacaatataccaaaatcacaagaaaatcacagaactgtatgactataaagcaaacaaagattaacataacaagaatagactttatcacctgaataatgtttagcattttacgagtttgcgagaagattaagacgttgtgtccctcgctaacaagattttgctgcaacattaagatttaccatttgttagataaacaaatacataggtgacaactaaaatgtggatcatcaaagaacacttacgagcaaggacatcataaaagataacttgcacgagacatcctgaccaacttgcaattcaacgtcatcatcatcatgagccatatctgcaaggttcatggccattttctcaaccattcccatttcttgattatttaacatcgcatccatgccttccaaaacaccctcagcagctttcttagtcaacaacagcggatgatcacatattttcttcaatatctgtttaagaatacaagaaacagaaacaaacataagtgcaccaatgagtgtacataaatcctttttctgataaattgaggatatcaaacaacatgacaatgtgcatcacaagaacaacaagagaaagcaatgcactctcgcatgaaatatgacatatgataaggaaatggaaagaacataaaggtctaaacaatgctgacaacatataaaagcaaacaaaatcagcacagataaaaactttgaaggtgatgcttaccgtgattgcggccaagggtgacccttgcattgatgaatgaactagttcactgttaagaaaagcttcatataattgcctctgcatccaaaaaataaaaaaggactaatattaagatggcagttaaccaataacaaaaccagagttttgcatcagtggaaaatgatctgtacctggcaagatgttaatttcagccagataattagctcattcttcttagcaagctttttatcttctcccgtgccgctatcaagaaacacttcattcttcatgcgtcgcaaaaagtatggctttatccgttctcttaattcctgtaataaatgatcatgtacaaaaccaaaaaccacatattatataaaaagtagaacagcagacctgaagaaataatctggaagaatgggtggcagttaaagaaatgcaacaaaggaggaggctcaatgtaaatagctttccctctcatggaaccaactaaaagcccatttttattagttggtatggaaacataattccattgctttacaagtcaaattggagtacacgactgtactactttgatgatacatgattgcagtacctataataagaagtatgtctgtgtccaaattgctgtcttctcaatgaaataataataacaaaaaataataattccgcaaaaattggaatagagtaaacaccataatcattaatagtcaaaatgctaatgtggtggaaaatctggctctcctaataattaaatatccagttcagacacaaaagtaacatgaaacaggatcatctatcacaacatgaaaaaggattagtacctttgctacatttgagcctatgtgcttttgtcgattggtagcattcttgtcatttccttgaatgatagcgtgctcataccttgctttgaacctgccaaaaacaagagaaataaacaacactagattgtgtaatatgaagcaacaatggcaatgcagaaaaacaacgggcataagtgtattactgctccttatcacccaagacttctgggcaacagaaataaaacagagcccacatttcctgcaagaataatcaggattacttgcattggttcgtgcgccaattataaggcattaaaaattaagagagtaggataccttcaagttattttgtatgggtgttccactgatgacaatacgatgtgcacagggtatttcaaatagactttgagccctctgagtctttggattcttgataatatgcccctcatcaagaataacatagttccataatgtttcttcctcgtcatcaaaatcattggtgaagttgccttttatcatcttgaaattgtttcgaacaatgtcatatgttgttaaaaggattccaccctcctgtagaaagacaataatatgctaaaacagctggtatttattgtgatatcatggaagaaccgaatattcttctaaatgatgctacgaacaaatacaactcaaattttaacttttaggacttccaagtattacaaaacccaaacttgcaacaagccaggtcaagaatgtggctagtcaaagacacttatgttaggagaccagaccttgaaggcatatttaagctcatagttgcgagcatttgcattgggaccagagtagctgtcagaaaagaaaaagggaacaattagcacgagataacatgacctctatcaatttgagggaagatatatgtcaacacaaaatatcctactctctgatcttatctttgaggctcacaactgaaagttccttggtccaatgagtcagaagcgtctttggagctacaactaacactctcttgattaaacgggaatggaacaatccagccaggaatgcagaaacctgcatgataaaaaaaggatgagaatacacatcagtcgattgcacatttagagcgagacagaactcggctcttcatatgcataatactccatggacactaccatgtaattcgtgcaatgaaggtaataataaaactgacagtagttagacaactggtagtgacaaaacagttctgttcttctatcggacggagactgctttcgatttcatcataaatgcatgatgtggacagcacaaaagattcagatgattaaaagtcctgccctgatcctaccataaaaaacacacaaactacgcagaggcctcccctgatcgtatcattaatttggaaaaggaagagcagtaatccttaatcctaatacatggaaggtgatcactaactagtatcagtggcaccacaagtattctgtaagcattaaaagtagacgaaattagaaggatgagagggtcccagtcccacctgcatggtcttgccaaggcccatgtcatctccaaggatccctccagttcccctacaatgcagaacccaaagccacctgagaccctcacgctggtgggggtaaagcatgttgaatatccttcctgggagattgtagggcttgcgcgttacacctgtcccagtgggctccatcttgaagtcctctgtcttctcccaaccaacatcatcagcatggttttccttcccattctctgcatcttggtcgatgtcgtcttcatcgtcatagtccccaaaaaattttgaggccttggattcggttgtggttttccttgacaccgtatcaaaggcataagctcctttggctttcatcttatcatcgttgccgcggcccccaaaagaagaagaggccttgaacaccttcctggtgacctcctctttaacaccaaaaccaccgtaggcacctcccgcatcatcgtcgtcgtcatcacagtccacaaaggatgaagagggtttggtcccatcattaagctgagactgagaggggtcggggtcggcatggagggcgcagggaagtggggacacgtggggtctgggccttgcggtgggcctgtcgactgacagggagtcgaggcgggtggtgagatcgtccagtatgtcgcggatgctgtcgtcgtctccggcggactcatcgccggcggtagagagcttgcagaggcggcggcggccggccagcttgaccttggcgggttcgggctctgcgaggaattgaagtggatggagttactagaaaacggaaccgagagagagagagagaagggtaccttgaggaggcggcggcggagggggtttagggttagggttagggttagggtttgggttttgggaggggccccgttggtgcgtgcgggtgaggcggaggaggcgatcgttgaggccgttgggtgtcggagcggcgagcggcgtcggcgcaggaggggtggggtcgtcgtccaggtcgccgcagatgtcgaagggcggaggggacgccatcgatctgcttccttccgagttctgacgacgacgacgacgacgacgatggaggaatggattggagatttctctcttatcttctctcgcttgggttgggttgggtgttgggttggttcgggggaagaggggactgaggaagaagaacttctccgcggcctatgtaccagaaaggaggcggcgccgcggggtggttcaaatttcgaatttcatccgaaattcactcctcgccttctatgcttcttcaacacacagcaacggatacattctagcatcgttcgttcaggccttcagggaagataggggagtctgaaactcgttttctccgcacacgcttttcaaactattaaattgtgtgtttttttcaaaaaaataagaaagttgctttaaaaaatcatattaatccatttttaaaatttaaaatatttaatactcaattaatcatgcgctaatagctcacctcatttttttttattttctcaatcttctcttttcatctcctctcaaacactttatagcaggtacaataacaagttataagccagctataaacatattttaaagagataaaagatgaaagataaaagcatatttatagccagctaaagtacggactctacgatataatgtgtgtatgacatataggatcatgtattaataatgacataatggagtagtaagttactattatatgaattgggtattaaattgactatagattatttggagctaatagttggctatactattaaacttgctcttaagctgacaatgctgtgttcgatacagttcccaacttcccctctagtattccacgcacaagcttttcaaactaaaagtttatatacgaaagttgcttaaaaagatcatatcgatcctttttttaaaaaatagctaatacttaattaatcacgtgcttaaaaatcatattatccattttttttaaaaaaaatagctaatacttagttaatcatattatctatttttttaaaaaaaaatagctaatacttagctaatactccgtttttcgtgggcactgttcgtgttgggaactggctggtatcgaacacagccttattgacggccactccgttccgttccatcaaaatttcacaatcatgaagatgaagtaagattaagtgtttcacgcaaaacgagtaataatgtgtgatgaattgaattttaattattataaacttgaaaaatggattaatctgatattttagagcaactttcatatagaaagctttcgcacgaaacgtaccatttagcagtttgaatacgttgccatgttggagaaactaaagcaacctcagttcgatagggactgtatgtattgtttaaagcctgtttgtaaaacacataaatttataggagttatataaattgttcgtttcattccatttgaatttattaaaaaagaaccagtctttaacgggtttttccaaatcttgtccggataattgaattgatggtttaacttttgaaccttcctgattattttaaatttcctttattttacttttttccctttattcgtcgtttgaaacctagtcttctaatactaatttacaatgatctttcggtggtagatgatgtatttgttaaaacatagtagacgacgtatctgttaaaacatagtaactttactaatctcacgatatgatgacataaattttcggagttgcttataagtatactagttataaagcgtactcacgaagagtaaggaagtagccctccagaattgagcctaagggcctatttattttcagcgacttggatgagattttccacgatataaaacatctaattttccacgatactggttataaagcatttttaactaatatttttagcaactttaatgttacaataatgaaagtctatatatgtggagtcccatctatatggactgcttttgctatatacattgttgctgcccatggagtagttaggtaaagtctttagtgggtactgtacatcactgctcgtctgcccagggtttaccaaaccgtttggggtggggttacagccccttccgatttgatggttagggtatcctcaatgttgagccacacaacaaccattagatgggacccacgtacatatatctttttactttacaaccaatgctacaatgtttaagatcttctattgaccttaagctgggacccactaaaaataatctatataaattcttttactaattcttttactatgaagaattaatagacaaagtaattttatatttcttatggctaactttaagctttaagattagtcatatcaatatcctcttacaaacacacatctctatgcataaagttgtattaagaatattattttattgcgaagtgagcatagctcaactagttaggttccttatggtggaactagcccactcgggttcaaatcctagatttgacacgggtgctcgcggcgcctatggtgacttcatcaatctcaagatatgccggcccagtcgggtagggtgtgcgtgtgtgcgttcataggggtgtgtgtgggtgtgcgtgtgtgcgttcataggggtgtgtgtgcgcacgttgtgagcgcctgtgtttgtactatatttctcaaaaaaaattattttattgcttatggtcacatttacatgcacattagagatgcccttattatggtaaccgtgtggtcatcacgaaaactggacgattattgcgagatattgaaaagttatcgcgagataaatataataaccttgtgataaccatgcggtttggtaaactctgcgagtgcccccgcgaggaagaaaaccacgggaaagagatgcgccgttggattatcaatcgcttcacgagttcactgcgcacactctccaagttgcaagtagtgtgtgttgacttcgacacaatctatcgatgtcgatgccgatgccaatactcctcctcctcctgctcctcccccagggccagggccacggcggcgccggcgacatctgcatcgtgggcagcggcatctccggatcatccaccgccttcttcttcaccaactacaccaccgccctctccggtgcccagctccgcgtcttcgagcgccgcgctaaggtcggcggccgcctcgccaccgtcaccgtctccggcgatcacttcgaggctggcggctccatcatccacccacgaaatctccatgtgcgccgcttcgccgacctgctaggcctcgaagccaagaccgatggcgacgatgactggctcgggatttgggacggccaccgcttcgtcttccagacgctccgcccgctaccgcccgggacgtcctggctccgccgcaagctgcacacccttgttaactcgctgcgcctctttaagcgctatggtctctcgctgctcaagatggacagatttgtccaggttcctcctccataatcttctactaccagtattcttttctcactactactagtagtttttttttttgagtaaatttcactttggtcaacctttatttaccaaattttcacattggactagagttagacttatattttcacttaacaccatatatatagttaccatcattttcactttggactgggtttcacaaattacacataatacaatgattgtagatctgatctcgtttccttctttttgtgttagaaaacttagaattcaacaatttgtactagcactacagttgggtattgtaaaacatgtaatatcttttctagaaaaatagttcttaaacttaatatttctccaatactgtctttagtacaagggttgtgaatgttcatatgtagtagttacaatcattgttcttgcactaagcatagttgcatggcgaatttccatatcatcgtttcttgtaaaatgcttagcacctagacaacaactggtgtgatggtaactataatacccggtccaaagtgcaagtaacggtaattatacgtggcgttaagtgaaaatatgagcctagccctagcccaatatgaaactttggtcaataaagatggtccaaagtgaaatttactctttttgaacttttttttatttatttatctgcttcgctattattaatataatactcctagataataacttgccatgatctctttatttgctttgccatctaaactaggtgatatccccgaacgatgctttgtgtacttgtgtgaagcaaaataaacattctaagcattatgccttaatgtagaattgtatagtaagaggatatactgtgtatgttggtcgattgattgagccccgagggtcggtctataaacagagatacacatggttagagacaacaatgggattagcgacaaggaaggtgtccgtataaatcaaacacatatcctaatatatctctaactaccatgtactcttaacacttactaggtaagagtgaacagggaaccacgcagattaaataattgaaatgctcaacttttcttgatgatgtgtcctgtcgctcctctgaaggagcaattgcagttagtgggtgataatcatatacaagtatgcgattagctagttttgcttcctttgtcattttcttgactgagttgaatattctattggctttactgattagtgattaacaacaaacacgctgaaatgtgttattgctgtatatgcatgcaggaaatgttgcaaagatttatgctctactacaatggctttgaatcccgacctgtttttgacacggttgaggagatgctcaaatggtcgggcctctatggcctcactcgcaggacactagaggcagagctgcttgatgctggcctcaattctcaaactatttcagagcttgtcactgtatgatatgattgctctctatgttttctcctatcttgtttcaattgataacccactaatttctgcagacttggttttttcttagcttcccaagaattagtacatttactggtggtcttaacactttttttttcctgtatacatatttcggtctaaagataaaatctcttcaaaattttgtaatctagtatctccaatatgccttgaccagtgcctttccacctttacgtttctcatgaccaattataaattaaccaagcagtggaactcatatcagtagtcattacctgaatatcagtcaagcatatagtcagtgtatagcgcactcatcaggtcaaattttcttgtttactttttcaactgagaaattattttttttctcgtttaattaattttcccagaaacctttatgttaattgtgctatcctgccccatatctttggcaggtgataacaagaatcaactatgggcaaagtgtgagtataagtggccttgctggtgcggtttctttagctggttctgaatcaggactgtgggctgtcaaagggggcaactggcagctagctgctggattgctcgaggctgctaacgccaccttgcatctgcaagaaggcatagactcaattgaatatgcaggggatcactatattctgaaatcgaataaaggtcttgaatataattgtgtagcaacggtggttgcaacaccacttgacgaggtgaacattacattcagccccccaatctccattccagcgaggaagacgcagcatacccatgcaaccttcgtgaggggcatcttgaatcctgtaagtgtgtatggtgctccctgtaacaaactagtttcccacagcaatgcaccaaggcagcaacttaaatgaagaacatgcagcaagtaacagatagcatggtctgaaactttggttgatgaaagggcagccttgtttggttgtaaagtatgagggagtctgaaactttgtttgttatggtgcagaaatttttcggtctaagctcggtatcagatattccaaagctgataggaaccatggaggtccctgagatcccgttttcaagcatttcgattctgaagaagtacagcgagcaggacatgacttacaaggtgttctcgcgtgtgaagctgaatgagagcttgctggaccagatcttcaggtaagcagtaagcgggctgtcgtacatatcttaatcttgctggaattgattgtgtggtaattaatgaatgctgtaacacaacaacaacaacaacaacaacaacagtgggaggaaggagacgatccggataaactggcctgcgtatccacactatgaagctccagaagtatttgctccgataatactggacggtaaacagctgtactacgtgaatacattcgagagcgcagcgagcgccatggagacgggggccgttgcagcggaaaacgtggccaggctcctcattgcaaggctcaggctgcctctcccttcccgacctgctgcgcctgcgcccgatcaccacgaccagcgagcagatctgtaactgtgactctgtgactgtgatgtgaggaggtcatcgcatcgatcggctgtattgtttgtgtctaacatgtctggaacccacatgttcgtaggagttttttttaaataataaatcagccagcaggtatattactaatcaatactaagttctagagttaaaatgacatggaacccacatgtatgaatatgatgatgacctccttagtaagtaggagtatgttttcacagaaatgataagttatactaggctgaggctaagttagttgagactagttgggaacaaatcttttgcgcacagaaaatggagcggtcaattagcgtatgattagttaagtaatactttttttttaaaaaaatggatcaatataattttttaagcaactttcatataaaaactttttgaaaaaaacgtacgcatgattagttgattactattaactattttaaattttaaaaatagattaatatgattttttaaaataacttttctatataatatttttgcaaaaaacaatcgtttaggccttgtttagttactcaaaaacttttcaaaaaacatcatattgaatctttggacacatgtataaagcattaaatatagataaaaagaaaaactaattgcacgctttgcatgtaaatcacgagacaaatcttttgagcctaattagtccatgattaatcataagtgctacagtaatacacttgtactaatgacggcttaattaggctcaaaagattcgtctcgcggtttccaagcgagttatgaaattagttttttcatttgtgtccgaaaacccctttcgatatccggtcaaacgtccgatgtgacatctaaaaattttcattccatcatctaaacaggcccttagcagtagtttgcaaaatactactatttactgtttgttgaatttgaaaggacgaaacaagaacaaagcttggcttactggagtagaaatgtcggatgtaccctcagacattcacaaggaacttaagtgaagaatggtgaaatacctgatatgccctcaacaaattcaggagggaggacccttgatgtggaagcaactactctttgccttccttggtctctttggtctttgctagtgagtgtgattcatttattcattcgttcctcttctctctctgtcgtcgtcgtcttctctcctcgaacccccaaggccccaactcagtccccaattaaaaagaagagaaagcacaagaggaggaggaggaggagacgagcatggcgatggggcctccgcgcctcctgcggggcctgattccgcagctcctgtcagtggacgcctggcttccctgcacctgcagcagccggctgcagctgctgctctcccacttccactgccgcctccaccttcgctggccctcctgcgccgacgccttcaagctccttctcgcccttctcctcgtctccgccgccctcgccgaggtccgctacatcgcctcctcctccatggcccccacgctccgccccgccgaccgcgccgtcgccgaaagggtctgtctactagccctcaccctaccctagatcggctattacacccaaatctgtattttccttttttttttcttcccagataaagggaagggagatagtatttcattactagattattattattactactgatttttgaccgaacgatgcactctctagtagtacttcaccccggacatactccctccgtcccaaattataaggcctatattcgatgacatactttgaccgttaatttatttaatattatgttcctaacaaatataaaattaatatcatatgaaagttcattaaaatatgaatataatgatataatatgcatagtacttaatatatatgtatatatatatatatatatatatatatgtgtatatatatatgtgtgtgtgtatatatgtgtgtgtgtacacactactagtcaaaatttacgaagtttgattttccttaaaaagagagcgtcctgtaattttgggacggagggagtatataactaacaaaatataaatgcaatttctgctaaaaaaatgaacgcaatatcctttattgacatttctctctctctctctctctctctctctatatatatatatatatatatatatatatatatatatatatatatatatatatatatatatatatacacgctctttcagatcacctacttttttcggaggccatctattggtgatatagtgtttttcaaagtgcccacgaccttacaggtttcattctccttcctttccttccaccgtccatctccttgtttgctgttttaagatatggcacctacactacactactttgcatatcagaattatggcgtaaataaggatgttgtgttcatcaagaggatattggcaactcctggagatttcattgaggtacatacactacatccatgtcttttatcctacttaccatatgctgcagcaaaggacatttcaagatgcatacataaatcaattgctgtgctgcattggaatgccccacccaacataatacatgcatttttatttgtaggttcggcaaggacagcttattataaatggtgttgcacgaaaagaacattacacagcaagccatgcatcatacactatggaagcaatggtttgtgcaccacctatctatatgcgagcattgtctccttgaacaacattgaggagttgctattgccaggtccagagatattaaagtgctgttaacacaagggttaacagcaatgacaagagaatcttcatttacttacaagaagatgatcaaaagtggcctggctgctccgtgttgttgacttcttgagtgcctccttcaggcctcagatggtggatgatctcttccatccatttctgttctctcttctcgaccaggatcctgtactaaagccatgtatgatcctgcagcgccttcctgaaggccacgtatttgtcatgggtgataaccgtaataacagctgcgattctcgtgcctggtaagaaacacgttgcgcccacattcatatagatgcaatttgatcattaccaccacttaatattgatgaattcattcatttagctgtggtgtgtgctcttgacgttttgagtgtgccatgaacctggtccaattgtgattatgattaaacatgagcatcctaaatgtagagctagagtggaatgagaacatatgcttattgctagcatatttcggttgtgagaatgcacctcaatttgctgattcattgctggttgtgaaatgaaatgtgcctttatagctgatctccagtctatctttgcaacctttgtctgcgaagtaggggactactgataaacaatcttcttattacttgtggtgcttgtgttagcaggggaccgcttcctatcagcaatataattggaagatacatgatgtcctttacaaggtcctccatccaataaccaaggtaccaagacgaagaagattgatgaccccaaggactgcaaactacctgatgctgtttgatattatggtgataagttgataacgatcgagttgtatggaaactagcaggctgccagatgggtggagcctgcaaattgtatcagtagccctgtagtaggttgggagaaggaacttttcgactggcatggttggttttaggcgtcggtacacgttagtatttgtcgcatgccttaacggcagtatgcatttcgcttgaaactatctattttagtgaatcagttcaggagaacatccagtgctccaacctttttcaatactgccctctatctgcagttctgcacggcaacaggtacacaaacctgagaatttttagtaccttttaacttgaagcatatgcatataccgtgacaacacaacacacgagtcaggagacgtgacgtgagggcctaaatactctgagttttttttttgaagccaaatactctatgagttgtacccaaaagagactcgtcttttgagtactagctcctacagtatgcatgtatatacataccctcctaacatgtagcttagttatcaacaagcggacatcaaggtggtgaccggaatgattctgatgatctaagaggaatgccttcacattcttcgtctgtttgtttggagaaacgaaatgatgaagaggtcggaagacggaacgacgatgaagttgaaagccctacagaaacaacaacaaagtggtttcagaatttaggaagaaacaaatgcacgaccgtacgctgacaaactcataataccatcggccatgtccttcgttttatgaagcaaaaatgttccagaaaggattgttacgaagccacacgcctctgtcacaatttgtgttggattttgcctgtcccagtcctgcatgtcaacaaattcatttgcagatcgacaactataatgttctggctgaaggatgtttaaatacatgctatcttatagcctatgaaattgaccgcttgaaaatttatattgaagcaaacaagaaagagaagatcagagattcagagggatcaattttttttttttaaaaacatcataccttgaacatgatgacactagccagtatggttaaggatgtgaacatggtataataaattggtgatacaactgctgtattaaaggtgtcaagtgcctgaaatcaaggggagaatcattatcacagaactcttagtaatgcacaaagtttcccaaatctcaaggcacaaaaatctagtgaaaactctgaacttttgagtccctactaacttagataatcctgaaggactagagcacagaacgaaattgtatgccacttttctaatattctcgattttggtacagtagagcttagaatttcagttggcctcatcgtatgctagtgcatagtcaaagaagggaaaaaaaaaatcttcactttgattcagagcgaggaaaccagggtaccttgttcaagtaattcatttgggtgacaatgcatgagaggacaaccagggtaaaagcccatgtctgtggatatataagttgattcgttccacaaaaggtcaacttcaaagctataccaagtgctttcacactcataacctgcacaattcaaccaacacctttgaaaaagaacacagctaaattaggcaaaattactgggatctaaattagagagtacataccgagatagagcctacaagagagcaaacaccaatatacaccatgacatgagtttgcccgtaaagtgggacaaatcggcaaacaagtatggcgaccatagcaagtactactgaaacatagaacatgaaggctgaaaacaataacatcgcatagttagggcttggtattaagccacaacgaaattcataaagtacagtaagtgtatctttgggtaatattaggaacatgtttagagagaaagcaatataacagaaaataaattcataaagtacagtaagtgtatctttggggtaatattaggaacatgttcagagagaagcaatgtaacagaaaatgcctggttcagtagccaaatcccacacttccgttactgactcaatctcacgctccgcgggggcatgaaggacaattgtggtggatcccacaacacataagatgcatccgagaatgccaaatatgtgtagcttcttacgcagcataaaatgcgcaagtatagcactgcagaacaaaagatagctctcaagcaaacagtagatccaaaacagcaaatacataataccgtaagtgaaagacatgcctgatgataatgctgagagcaccaagaggagtgaccaaaatagctggagcaaatgcataagctgcaaagtttgcaacttccccaacaaccactgaagaagaattagagatatggacaatatgacaatgaactatatagagaaacactaaacagacagaagggtaaaagcgagagaagagaagaggggtcacttgtaatcatgccaacccaccaaagaggctcatacaaataagaatagccgccaacccctgtcataaacatggcacaaataagggtagcgtaccaacacactggcattcaattggttaggaaaacatacaaatatgcagagcaacagcctgggataacattatagcagaagctgagaattgtgggtgggactggcatgcatcatctagatatatagtctagtctactctgttgttgagacagcttcaaccttcaattaccaggttgtaagtaaacaagaaacgtatagtgcagcagtggacatactaggtcttactaatgcagtaggatggatttctatttcacttttgacaaattgttaagataggatgatttggcatgtgggctagaggaaagtgatcaaattaatgatccacttacttatgcgaaaaagaaaaagaagtcatgatgagcagatagatagataggcgatggtaggcgaggacgagtagtgtaccggctcgaagagcggaggaggaggaggcggccttcttgaggcccttcttcttgatgatgaagctggcgccgatgaaaaggctggaggagagggcgagcaggaggcccttgatgttgtcggcggtggacatgccccccgcgtaccacctcccgccgccacctcgcgcctccatctccatgcctctctctgcccttacccgcctagggcttctttcctttttcccgttttccttttttgcgtttatatttactccgtagtaatccaatccagttaattaattttactctacaaaatactgcatcagcttgctttgacgggagggaagcgaggggtctacaattctgaaagaattctacctacatcccatctcgtggaaaaaaaaatcaaatcaatcagcagtcggatatattacgcttttaactgattgcgattctctcttatatggagtatatatagtagtgtaatacacacactgttacacagagatagatagaaacactacacggcagtatcaggatgcttttaacataaataaataaataggaataggagtagagttatctatcctgatcctagatggatggatggatgatgaactcactcttggtttggcgaattggtttcctatactcctattacagatgattactagagtttgctagatggtgcaaggtagttggagtagcgggcttgagcaatgagtttgcccgatttcttcttgaggtccacgagcgccaccccaactgccttgccggcacgaagaacctttgcttcgatctcaatctcttcctgcgagtgcgaaacaaaaatcatcaaggaaaagtgaagcagtcccgtccctagtgttggagagggaaaacaaaattagagacagatacatacatcggggaaagctgcatccaagtaggagatgttcatctccaggggcgaggtagagctagagctagagctgctgttgccggtggtgtggaagacggcggaggcgacgaggtgaatgagcgaggccgtggcgccgccgtgcaggaagccgcccgaattcttgaggacacaagcaagtgacgagtcagatggatcagatcaggtggaagaaaagaaaagaaaagattactaccaggagtcgggaggggacggtgaagcggcagaggaggcggccgggctccgcggcctccacgcggatgcccctcagcacgaaggcgtcgtaaaacccggagggcagcgccgccgccgacgacgcgtccgtcggagtcggatgctccagcacacgccgggccggctccatccccgatcccattcccctctctattctcaacttctctcttcttctgtctattctagtctaacaacaagagatactagtagagagacaaatttgggtgtgtttggcatcgccttttctcaacccctctccctcgtataaaccgttaatcagtattttttaaaaaaagtttctatgcgaatgttacttaaaaaaatcaaattaatcaaaatatctttttttaaaaaaattaactaaaacttaattaatcatgcactaataaatcaccaaggactctctctctctctcctgacttgggtggcccactccagagtcgagtcaggctagccatggccatggatgccttcggctccatgttcggtgaggccaagccgccggtggcgatgcggatgcgccccatcctcttccacgcccacgcccatactaatgatgtctcccaactccgcctcctcgccaccgacctccactccctcgcctgggaccgctccctctccctctccgacatcgacgatctcgtaatcctcttctcctcccaagccctaatcagtatcagtatcagtcttcacatcgtgctttttccagagagacgacgtcgggatcggcggctcctgctccgacttcctggattacctcaaatcttgcctctcctctggggaagtcaacctcctcttccctcacaatggtcggtacccgatctacctacactacgcttttttacactacatcttccctatgctcatatggataatactataggtcttgatcgcgttcatcttgttgctacaaaggcaaagggcctacctcgcatcaccatttccctcaacacccttactcactccgcgttgaatgatgccattgccaatttctcactatcactctatgccgcttttaggactacgcaggaccatgcatccagaggtcctacccgcttcattattattcactctctagtactattacccctatgcttttgtttctcttaaacattgatatcccttctttttcagaacaagagcgagcgtcaaagctgatggagactctatcatctgaaaaggttgtttccctaatccccttattactttacttattattaactgatgtttctgctgcctgatgaaggagtacatcgttagcataaatggaaccatacatacatttcttctcgtaacaatgttaaaccgtttattagcattctaggttgccaacttgacatactgctagtcatgcagccctaaagttcaaaaggacagtttttgacatactacaactttattgctggatgtttaccatatataaatgcttgattattattttttcagtaatcacttcttttccccacaaaatttcaagcatgaatgctcctgcatccttgttctctgtgttggcctattgtaccaggagatccagttatcattgaggttcaatgtcagatgctgcttgcttgctctgtttaattaaatttctcagcatatttttgtaatggcaaagcaattcttaatctctgccatagtttttttcttcttgttgcaatagttggttatataaattgtattgtgtgatgttagtaacactctttgatttcacaggaaaagaatgaaataatgcaaaagcaactccaagctctttcttttctagacaaaagaaaggcaacaaagccaaagctggtggccaatcaggttccaagtgtgtctgatgtgactcagggctctgatcaggttattgttccagcacagcagcaaacaccaggtaaccatgcttctccatgcagcactgaaacaaacaattctgtgttttctcagctaatgaaattgcaaacctgcagtagtttcacctatcaaagttcctccagctaaagccacgaagaggatagcccctgtatctcggaggttgtacggttttcttgaatcgctacatttacatgaaaagaaattttattgtatctgattgtagaccagctctgactcttgctatttttcttcagggcaagagtgcgaggagctttgttgcaagatactgaggaagatgtcgaagaatagtcagatattgccttttctctgtattgattagttacaaacttctaaagcgtgagtgtgtggtttgttagttttggggccatttttacttgtatcaaatctatgaaatcaagctaatgcatttattgacacaaatctgctcactttttattgtgcacttcatttttctcttgtttacctgtttggcataagctaagtgtgcttattagttgtcttttagctgatgtggtactaagatttttttaccagttattgtattgcgcatggatttttttttaaaaaaaagacactatgaatcagagaaccgtattttaacttccgctggctggctttggtgtatacaatttagtggtttaatttcttgcagtgtctatattcatagaatgtaccagaatgtgtctatattacggttatcatttaaaaaaccatccgcaccttggcatatctacaatagaatgtagtgtcaggtaaccatatagaaagatcatatacagacatctttcatgtttctctgcagcttgcatttctttgcctgctgttattcatggaacgttttatggaacatctaaatcagggggttatggtttgtttgttcagacgaatgaactccatgatgaatgtttctatcatatggaattgcttggctctgagtgttttgcttcaaactacaggtacatggtgtagctactgtgcttgttttttgtcgtatggcatgctattgctccttagtactacctccgtttcaggttataagactttctagcattgcccatattcatatagatg

SEQ ID NO: 21295 - DNA, 12775 bp, Oryza sativa
attttccatttcagcagctgtattttcatggaaccattttatctgtgttgacagacaatggcatgttcttcccttgaaccgcagcagagtcgacagttgaacctgaaaagatcttctttctcccagcaccagcactagcatcatcaccacagggcgaaggcatgaacaacgtacgtccttccatggtctcgttccaggacagcctcttcctctgtgacatgttgtactgctaaatgtccacggcgccgcacagaggcaggtcgtttcgcctggtttcaggattgagcaggagctgcatgcgcttgtattgcttgatccatgattgatagtccattacagtgcatcctcgttggtgtcgtttctagaacaggacatgcgaatgtgagttcgctatgctgtgtggttgcatgtctggaactgaggcggtgaggccccctttaattccaaggaaaatcatagtaattttggtggatttcatttctatcggattttggagttttgagtggagagcctgacactcatccttatgtttatttatacattgttatactcttgttttatattattagatgttttaacttttttctattcaaaatttctttaagcttaactaaattatagaaaaattaacatcatctattacaccaaattagtttcaagtatctattgctatgtagtttttcttgatcaaacttaaaagaagacgccgacccaccgtcctccatccctgtggctccgactacgccgtcaccactagggatggcaattttacccatgggccgatgggcacgggcgtggatgtgactttttacccatgggcacgcccgcccgaaacccaaagatgttatgggcaatatacgggtttcattttttacccgtgggtaacccatgcccgacccgatacatatgtattagctaattttgactcatttcttaattcttatatcatttctctcggttcatttgtgatgctaactgatactaagttatgatgtaattcaaattattgttgataaccgataatttggtaaataaattattgattttacttctctttgttaaattacatatctttcaagttattattcatgtgagatccactaggtacccgccggacatacccgcgcccgctgggcatgggtacaggcatgaagttttgcccgctaactctagtgggtagggtttgggcggacaatgtcgagcatcgggtcgggcatggttttgctctacccgtgcccgacccgacccattgccatcctagtcaccacctcgttgccctctcgagtccaccgcccacgaccatccctataaaaccgacaaactcctccctaaactcccccctttttcccttctccccatcctatgtcacccccaaggccccaaccctaactgggactctaaatggttgggattgttgtttgctggagttgaacaaagtcaaaggagttggaggagaagttcattggagaacgaatcacgaagcagatccgaaggttagacatttgtaaatttttgctcccatttttatgtcaaatgtggtttatcaattccgcaattattattttggacttttatgatgtagtgcttgtgcttcacggaaaaagaaaaaaaaaatgaaaggtggtcctactgaactagtagcagtacagtagttatagagctgcatcctgcacgcatctatggtgaggccatatggagatggaggcagcaatgaaacgaggaaacatgatcgatcgcgttaagggaaacagtagtactaggtgctagtacagtagtagatggtcaggagggggaggtagacgacggcgaggatccggtgctcatgaggccccgggtgggcctgctgggcctgggcctgagcgcaagggtgcaccttgccctgagcacggcgtagccgagcaggcggtacgcggcgacgaatcccagcatgacgcccacgttgcgccaccggcactcgtcgccgagcccctcccggcgcagcacctcgtctccggtggccacgcaggcgcccatcacccgcgccacgcacctccccccgcccgcgaactcgttcaccagcagcgcctcgaacggccacttgaacagcgacaggtagtgcatgaacacccagcacgacggcatcgccgaccgcgcgatgaagtagccggagaagaggaagaaggaccccatcaccccctgtatcgccgcattccccaccacgaagtccggcgccgccgccgcgaagcacaccaccaccgagttcgccgtgtacaggatcagccacaccagcaccacgaagtagccgaacgccgccgccgtcctccggagccccgccatccagtacaccggcgccgcgaacaccacggccagcgccagctggaacggcaggaacaccaccgcgttcgccaccgcgtaagacgacacgcggtacgcgcccgacgacgtctccttggccaggatctcccgctcctgcaggaagatgggcagcgcctccgtggtggacgacagcaggaaggtgaggaggaaggcgaagaggccgacgcgctccgccaccttctcctccccgaggtcgtagaagatggaccccagcgccaggccggccaccagcatgcacaccgtgcggcacgcgaacagctgccgcgtccgcgccacgttcttgaagaagcgctgcgccagcacgcccacctcgcgcgcccaactgttggcgtaccggctcttcttctcaatctccatctccatctccatctccacgtcctccttgtgcagctggaacagctgctgcagcgtgcaccggtcgcgtgcctcggcggcgctccggcggcggagcgcgtcgacggagtcgatggagaactcgacggtgtcgacgtgcgggggcagcgcgaggcccgcggaggcgagcagggagcggagggcgtcgacggtgccgtggtggagggcgcagccaccggcgagcaggaggacggagtcgaacatcttgacgatgcgcgcgccgggctggtggatgctgagcagcaccgtgcggcggcgagtgtcggccatggcgcggagggcgccgacgatgtgcagggcggaggcgctgtcgaggccagaggtgggctcgtcgaggatgagaaccgcggggtcgtggactgcctcgacgccgatggagacgcggcgtcgctcgccgccggagaggtccttgaccctggtgtcggcgacgcgggcgagggtgaggtcgtggatgagggcgtcgacacgggcgtcgatgtcgttgcgggcgccgaggcggaggcgggcgctgaagcggagcgtctcgcggacggtgaggagcgggaagaggacgtcgcgctgggtgacgtaggcggagacgcggcgtaggtcggcggtggtggcgggggcgccgttgaggaggagctggtcgggaagcggggaggggtggaggcggccggcgaggatctcgaggagggtggacttgccggcgccgctggggcccacgatggcgaggagctcgccggggcgggcgcggcaggagacgttgcggagaacgtggcgggtggtggtggtggtgggcggctgctgctcgtcttcgtcttcctccctgctccatatcttcatcatcatgagagggtgagcgcgcttgggaatggggatggggatgcggatgtggtggttgatgccccgagcctccacctcgcaaccacctttctccatgccccccattctttgttgctcctcgatcctgcaggcagctgcagctaaacaacacagtggaggaggagagtattgttgttgtgcatcgttgttccgtgtgatggatgatgagtgtgagctgctagtgatgagcgagcgactactgtgtgtgcccgtgtgagctacgtgcgtgcgtgcgtgccaaatattggttggtcggttaaaaccttttctctttcacaaggacggggggggtgcctgcttggtttatggttggctggtactactccgtactcctatcatgctatggctttccctgttttgcaccctaaactacagtattagtgttgtctgattgaggggcagaagtgtcctgtgattacaactgatctgaggaagctatcgaatcgagcagtttgtggttgggtataagcgagcgcgcagctgagccaagggatcacatgacgttgtcggctagcgagcgagccagcctcagccagccagcttcacatgcatctgctgctttacctccccggccgggcggccagcctcagctaagctagccgtatcgtcgtctcgtcgttggccatcgatcttctaccgcctaccgcccacctgcaccaaaacgcatccatcctcgcacccgtatccgcttcattactgcactagacaattattaacaatgttcaagttgatcaaaacaaaaacaaaaactctaacccggctggcctgtctgcatttcttatatacgttgattttgcaagcaaccattcacgcaattattacccatcttttattatacagaaactattactccagtctattacatgatgtccccatactacttgttatttggggttctaaagtagcaaattttacgaaaaagtatgttgggaaccgtgctctttctgtcttttactattaaaaatggtaacccatgcatctaaatacaatctagcaaaacttcaataactaatcttttgctaccaaaacttttatcaaacaaatttgccacaccaattaggattcgtagtaaatgaaagaaactggcacgtataaccagtcgccttcttctagaaacttctcgttggcacatgaaaggatggagatgacggcctaagccaaacctgctctgctgcatgcaggaataggaggaggtgaggtacgggaggatcggatcaaattcgtggccaggaagactcgagtcgtcatgggttttgtaggttcccaggaagagaaaaatatctggctgagcttggccctcggggccatgtcattgatatgacatcattgttaattaagctctaagagcaagtttaatagttttaaattatctatagccaatgtaatagtcaattcatacaatagttacttactatactattaatacctggtcccacctgtcatacacacgttacgtcttgaagtccgtactgcagctggctacagatctgtagtccgctgctcttccctcccttcctttatatctttaaaatatacttatagttggcttatagtatgttattgtacctgctctaactgttgatgtgttcttttttgatgatatgcggggatgggtgaaaaataattttattttaaaacttactacatccgtactgaaatataagcttatattttatcttatattttaagaaggaaggagtaaaaaatatataataattaattaacacagctagtggagacgggttgattaacacaactagtgctagctagcactgatgcaggtgaggccatatggtgtttgtcctccagcgacccgtgaccggtcgtcccgtgacccgtgccaacatatacgccaccccacgcaccacaccaccaccacctggagggatcatcatacgtaggagtaggagcagatccgcagcaggttacgctacaccaaaataccatcgctgcgtttgttcaattgtaaccaaccatataccccagccactaatagctcatagaatcctccttttttttgtttttgaattgtttttggtttcttggatttctgtctttccgcttttgtttatgtttataaaactttacgaaaaagttccgattgacactttctgtttccaagaatgcaactaaaaagggaaaacttttcgaactgtttttatcctagtttacaaagacaccaacaaatgatttctcactttcacagcaaagacgaatgatttacggtctaaattgacaaaaaggcatgagcaaatgtaaaggtaaaagaacaatttgattgatcgttaaggattcagtgattcaatcaaatcggtcataccacttattccacatatacttctccaagctattctattagaaccaaactcggatctatgcaaggaaacacaacaaattgcctaaattggactgccaaatttgggagtcattaggctagctatcaatcgcagcaaatgactcacggacggtgacgtacgttcagcaaatagccgattcatccaccaatcactacaaaatcagccgccagtgactaattcattcctactagcatagaatagcacattcgcaatgtcaacaagcccactatttcattccattatttttctttttttaaaaaaaaaagagtgcatgatgctaccgagcatgatataacgaggacctgcttaaggcggacgtgtcgagtccatcaggcgttcaggcattcgagctcgagaccagtagagagactacatgaggatgaaagtgaaacatattttcattgaacaacactaacaataaaagaggaaacatcctttcgtagatattcagtaaattgaacttaatacattatatagctgctgacgtaatggagattatatgttttttttgtatgcatcattggggtgggcggttcaacatggaaatatacagaaagcaaaaacaaatcgacacaaaccaagcttatcactttcagcaaccaatatttcatcaacaaagagcccagattagcatcaccagcatgttaacagcagctgctagcggcagcatcggcttctggcggcttctgcttgaagatgttcttcttcgcacctgaggaagcatcagccaagaggcttggtgtgtccaatatctgcatcatgaacgcatatgcatatcattaacagagctccacatcccacatataaattgtatctatcaagagcagctctgtaacaaactaacaaacttgacataattacttttaataatgtataatttttgtgacaagtgttctactaaatatgttttacaaatctgaatatgaaaattgctgtcatattgcaatgtgtattttatctgtaagatggttccgcttatgaaaagtatgatgcgaactactactggttctctcaaaaaataaacagatgagacaaacactaaaacaccgccagtccactatcaagcatgagcaagcaaaccctgaacatccaatcaatcatttgctatggcaccgcaaatatataaagtcaactttctctcagcagtaatttcacagtccaacatgtagcaaaagaagaaagcaatgccatgtatgaatcaaaatgaagcaaatctgtttatattgcataccttcaggacgagttcctcaaagcattgttcaacattcactttggttttagcactgcattctagaaataaacacccgtattccctggcaaattcaatgccctctttttttgtcacagctctctcactttcctgccaaaaccaagcagctatatttagatgtgtagtaaaaacatgaaaacaatacatagaaaaagaaacctatgcagaagaacatcataattagaatgggattgaacttcagtgaagcataaagagcagaagaaagtgtagaactgaagcatataataattaccttgtcaactttgtttccgacaagcatcttaatacaatcctggtttgtagaatagaggtcaatttccttagcccatatgtcagaaagattggtgaatgtttcccgtcgagtgacatcgtacactgagaaatcaatttccactgatcaagatatatcttgatattcgataagattaaaacacaatcctccatttccttctataaggcttattttgagtggggcacaaaaaatatgagtaaggaataaagagaagatggttaaaatgaccatgctacacagaattaaatatcttgggaatgggagaggtgatggctagtgatttttttgtctgattattagtcaattgtttgttattaatgtaagagagtctgttataaatgagagtaaacaaggagtagaagtaaaaacatttacacagagacctatattttggattttttttttgaagaaactacaagacttatagaaagaaatgggagtagtgaagattccttcaatgctgcaaacagaagcaagcatccgcagagatggggctgaagacaattacccataataataccctgtgcacctctgtagtatgagctggtcaaggttctaaatcgctcctgtccagctgcagaaaaggtacacaatgccaaataagaaactaacagaataatgtagctatgggtgttaaaagacacttatgttttctagagacaagctgtatagaaaaaatcagaggttcagaaaacagactgaaatacaaacacgtcatggcttaattattcaaaacagtgaggcaaacaagaagataaacaagatcgaatgtctattctataccattatatataaaatgagaatttgaggatttgccactgcattagcagttgcaatgtagaacttgccactcacacacttggggtggaaaatcgtagatcaccatatactaggccttgtttggcacacagctccagattccaatcaaagctggatttgaagtttgtatgttaaattatagtggtttaaaattttgtatttcatctcaaatgggaacagaatgattcatccaaatgttatcatcgtaatctcatatctagatccatggatttgtggagagctaggaaaacccagctccaaaaaatcttggatccagagttgtgccaaacagggcccaagagatcgcaaattctcaaatttcctaaaatcaattacccaagaataattccttacgcttttatcaacagcaaaaaacataactaaagaataatcgggttctacttttgagaaataacttgcttgtgcttttctgttttccatagccatcccaaaagaaaccttttatattgtttacacctgaacatgcaggaaaaataaaaacaaacggagccataccatttaggagtatgcaagaactagagagagtgcttacatcatgtgcattgagcctgtttgagtctgatgtaataaaacaagtaaaaaaaagagtagctacattaggcttgatttttagttgcaaataagaagaggttacaggttgtctgggatccattgagctcagatgtgctttactttctaccgagtaatgagaataattaacaaaaaaaaaggtaagcctttggggacagcacttgtcttgtgtaaataagcatttagacgacgagtaaagagatttcaagtggataatccacttacttatagtaatatgggatgaaaactaagtgcagcttcaatatcaacagttagcccaggtgctgtatattcccgcagctatggggggctggctattttaagctggcgcttgacttgagacccgtgcttaggaggatcaataaatgatctgaacagggtcatattggatccgcgtgatcagtgcagtgtgataatggtgatgcgtgatacaagaaaagaagaatgatttggaactgaaactgagacttaattaggacctgtgtcccagatggcaagcttgagttttttgccaccggtgttaaccatcttgaccttgaagtcgacacctgaatatacaatccgaacgcgattagcaagaaaaaaaaatttttgtgggggggggggcgcataaattttgagcgggcgagagatgaaagtaagcaggtgccgggggatgatccctgttacctatggtgggcgagagatcctcgaaagagtcggaggtgaagcggaggaggagactgctcttgccgacgcccgagtcgccgatgaggagcagcttaaagaggtaatcaaaatccggctggctctgcgcctgggtggacgacgatgaagacgaagaatccataataacctcctcgtatgggatgacgaaggtggggggatgagatctgatctagggtttgatctggttgcggaggaggaggagaagaaaagctggaaaagggaaagaggaagacgaagacgaagacgaagagaaagaagatgtgcgtttgcggtttgcctctgcatccgcactcgactaccggacctagggtttgcctacaggggcccaattacgcacacccacttctatcataggaataagttcactttaggtacctcaaaatttatcgccaagtctgaaactaatcctgcctgcgttcctcaactcgcaaaaacagtgcagataaggccccataatggtttggacgtgatttcggctgacatggcgcctatgtaatatcaacgtggcacttaaagttagaaaaaaccatgggacccaacccctctctttcccctcttgtctcccttcctcctctctctcccttatatcacctatgactgtgccggggtgctagcccggcgcatccctccccccgccccacacaaacaccaacatcaccaggatgagcaccgctttcagattcatgttcgttggcagcaacaggaacaaaatgatgggagaggaggagggagggatcaacaacagatgcaagcggtggtagtggctacggcaagagaggtggttgtagaggttagggtcgaaacgaagctcgaataaggatcgccacaccaaggtggacggcaagggtcgctagatccgaatatcgacgtggattttccagcggacgagtaagctgggccacaagtctgacagcaagtccacccagtagctgctccagcaggtagagattgccattgttgtcatgaccaggatgtggaccatatcagcattgacgctggtctccgtcgtaccctccctcccttccctgaactttgccctctccaggtcacaccaccaccatatgtgggcagcgcccgcggcttccatcgggttcctcaactccaccaacgcgaatgaggtgcagcccttacacgagaagagaggggtgaagggaagagagaggatgaaaaaagcgctagtcattgacatgtgaggtccacgtggatcccgcacgctaacttagcttgccacgtcagccaaaaccatactatctacaatctcgagtgatatgattttataaaatgaacgacccgttatatttggtttttttggtttaaagacgaattttagactcaacgacaaattaagcgacctaaagtgtgcttattcctcttatatagttatatacttatatgccacaccacattcatcgcttcataaaaaaggggtccagtgaaaaatcagatgtaaggtttcattaattaattgcatctgcaacgtatgggtatggtcaaagatttgcgcatattacatttagtcgttggttttaagaatatttagctgtgccaacatttagtttgcaacatgttcaatctaggttcgttgcgaaaagtcaccatcgccgtctctctctaatctagcctaatagttgagctttgtactacgctgctgcgtaactcgctattgacgttagcatacatcagatgatcagacagaccgctcgtacaggtaaaacaggaaaaaagaagaggaaattcctactagctgcctaggagtactaatttggacggcagtaagcaccacacaagctcaggggatcaccaggaatgtaaggctgtccgctccagaatcaggcttccaacatctttttaaggacaagtgatccaacgtcgccaacgagttattcgtaccgatcccttattggtgacaaaatcttcttcgcaaactagggtaagcgaaatgtccatgaaccacgaattctcctgaattggcccaaactgaatcttcgcaaactagctgcaactcccaatctcataatctgagcgccttcctgtttgagctgtaaaatgcacttcaataaacaggaaacagaagaaccatgacatgcctcaagtaacagcgagcgaacgaacccccgtctggttcaggctataggtataggagccatacctatatataatagaggggattaaacatgcaaaacaacaatgagcgaacaacagagaaaaggacaatcatgagcttaaattaagaaacaacgaacaaacctgtgattcaggtcacatgatcaccaactgttgacgctgaacaggcagcattggatatggtagcattagtggtattgcagatgtcaacaagagacccctgctcaaacctggtctctaattctggatggttctgatcagatagattagttgtcagcagcaggttacatggatcaggatcatcggcaagagaaaaggacaagtcattcagctccaagtactgttcagttttaagtacttccagcgtaggaggaatcaagtcttcaccacatgagttacaatggttggaaatgctctcatctgattgggaatcaagttcatcaagttcattaaatattgcttcaccatcatcggacgatacttcattgtcattatcatagtcagcagttgagtcaggctgcattaaaccaccccccaaaaaatataattacacatcaatggcgtcaatgcatgttgaacagcagatacgacaaaagagagtgttgtaaaacaaattaccaatgaaccatctcgactaacggagttcaaaagatctgtcgagaaacaactgataatctcatctagctgctgggtatgtatggtatcaaaaggaacgctaggactagtcgtcccacagccaccaacagcgatcttgtcattagtttctgaacaatggtccaaagaagatccaatattatcactaacagccagctgctgaccagctgtgtttaacctgccattacttgattccagcgcacaagggggcacagaaaaggcaaaagaggatagctccccgttcgcttcattccaatcatcttcattgaatggagcaccatactgttccccaatcttgggacctggaccacttttttgaaagattttgcagagaacacaagcatcctg

SEQ ID NO: 21296 - DNA, 9684 bp, Oryza sativa
gtcaaataaccactttaagtgataatcttttctcagaaggaagaataaatatccttgctttctatattcttataattcagtttaaggatcaactatagcgatgctctggttgtgacattgtcttggtgtttctttcaatatttgctattcacgatgcagctcataaatataatctcgatataatataaatagagttacacatatgttgaagattaaaatggcaaaagaagttgatggatctcatcataagttgaagacagttgaactggtactgggaaaagagaggttacaggcattcagcaataggttgtttagaagccatacctatttatgtattcagttaactgtaaggcacagcaaagtaatctaacaaacattggaaggaccagaaaagaggacattagatcaaatggatatacataatatatgcttttttaaaaaaaaaagaaaaggaaagaatgcaaaacaaggcagcaaaaatggtgcacatatattcatgtatgtcttgtgttatccacgtaattttcacacgtgcattttatagtttttcacatgagtaaggaacaattgccatgtactaagtacgaaaatttgccaaaagaaatgcacaaggactacagcagcactttaagaaacttagttaaataccgaaaactagatttttgacatgtaacccacttcataagccagatactgaaactactacaaagtacaaccacatcaaggacatcataccagtttaacaccagaagcagacagttccttgtcctccagcctgtattcatacattacccaatcagttctatcaccccgaggtggcttgccaagatgaaacaccaaagttcgcttcatcccaacagtctgagaattatatattactggtctgtcttttccagtagctttccaatacccagcttcagttgatcggttcgttcttgacccactagaatatttcctatcacgtgggcaaaagaaataccattctcgatccttactctgcaacgaagatttctctgcaccaagttaaacaagacagaataaatcacaagagcagttcaaaggccagcgacctgcaaagcacaatgtttttacattcaaatgaaaacatgtggttgcccaaaactgagctaagcaaacagcaatgcatgcgtagaaagtcaaatggaagccattgctttgaggaaagacatgattctcagcagaatactaatgcaacagaaacaagtggatcaaaaaaggtcttgacttggaagggagtgaaatggtaaagcttggaaaacatttttcaagggagagtaaatttacctggaagatcccaaggggcaaatttgtatagatcaagctctgaaacagcattgcaccgtaagtgtttgcccaataattttctcttcaggtaatagacagtcaactcaacatctgttggatgaaaccggaatccaggaggaagagatgtcttggccatactaaggagaatggaacgttgtctatactagcataacgagatccaaatagaccttggcctaagaactaaagaaataaaaaaaaacggttgcagttagatagatagaatagtagtacatttggttgggggcaacaaagagagaagagcgagatgagttcaaatatggtaaagaccaactttggcatattattgagcatccacagcaaggaaaacagagataatccttcctgatgtcaagagtcatttgaagagcaagcggagccctgcatgaaatgatttagatattatccctcagctgggcgtagatctaaaagaaaagacccaacatataggaaaagaaaaccgagacacatgtgacatccggtcggcagtttgacacagagaagcatggcataaaaatgcgatagtgtaaaatgtaagcccccttgaagtgaagtagataaatgaagggatgatgtgcaacaacactagaacagtctatttattatcaggcgaagagcaaaggtaggaaaaatgatgtggtcgaaattaatcacgcggcgtgcgggcatatattgatacatgcatatctaggggagaagaatgaaccctaagtagcgaagtagtgcgggagagatccaaccaagaatcatcataagaagcaatgtagatgggcgacgagcgagcgagggaggaggagagacgagacatacgctggtggtggcggtcggcgagggaaggaaatgcggcgccgccgcggagaggagatggtggtgctgatgcggatgcggtacgacaagggagggatgagagattgagaggagaggagaggggaatgggacgcaggacgctggtgtgttggcgaggagaagcggcgaggtggaattggaaagaggcggcgcgcagcggagagaggcaggcggctcccgtcgccgtcgcccttcctcctcctcccccccaaatctctctcccccaaggccccttctacattcttcttcagcttggggccttgttgggcttttatgggccgcacctacggcctacttctttgttatatgggctggaagcaattcctttcatcatcaatgccttttcatttcacaagggagggcgggccggccggtacatcgcatcgatcattacttaacagtactacaagtttaacatctcaaaaattgcaattcaacatcctctatctcaaaaattgcattcaacatcctctatctaaaaaaattacttactactactactacaatccagtggaaagaaagaggacaagtcaagacgtacagagcagtaagggtggtggtggtcatggcagtgggacaggcgtcctccactcgtggaactcaaccaggtctctgttcacgattgacctgttatgaagccagaaggtttctgcggattgatggaatcgcctcaccttcctctgcagttcccacatgatagcgctcatagccgagcaccgctctgtatccgccgcatacacccataggcatcttatctcccgcccgcgaccaatcatttcctcaactcttccatctgcatgcatccgcttaccccgctcatgctaactgcttacatggcttgactcttctacagattacaaaatggaaaggagcctacctggtattgactcgagatattcaaggagccccgggccaatcttggacgcaggccattttatcgatacttcagtgtagtcaatcacattctggaaaggaagctcaacttcatctgataaaattaccggcacgcattcctgtagtcaacaatgtaaggagcactgtaggtatgcactgaaactaactatcatccttttgaggaagagctcaccacaaagaaggattcatagaagcgaagtgtccatgaagactcgccacgaggagctaggcaaaattttgcattcctcaagtgcttgaagtaatctatccttcccaatttgtctggtccagagagcttcagctccggagactccagctgttcataagaacaacccaaatacacatcagaaatgaacttttttttatcatcacttgattcacttaaagttaattacaccattaaaaagtttctgccataactacttctgatcatattcagaggaaggcttacaccatcataaaatgttaagttgcatttggagattagaaggaagccgaaccttgtcaggatactgctttgcaagcttcaccagttggagacggcctacttttccctgagcacgcccaaggaagtttgctaaatacttcctttttgttaatgggatcggtttgacagcaagcctgtcagacttcaccatagaatcatccacattcccaggtataataatatctttccatgtgttaaaagcgcttatacctcgtttatcagtgcggtcaccctaacaaaaaaaaattgaacatagaaccattcgttaagaagatgtcagaagttgcttgcatgtcgagttaacagaagactagaagaccactcatgaacccacttattactcgcaaacaaattgaggacatctgaagatacagaatttaattagaccaaggcatgcaactgctatcatctacgctaggatttgtgaaaaacactgccgtgttatattatagcaagctgactcatatacgctgcacatttggatgggatggactaaggatgcattacgggccttgatcctcccgcagttaaggatttgaagcgcggtaatatttaatggggatttaacaaaattgcagcaatcgttgtaacagttctgaataagggcatgtttttcgtagatataacaattaacaattatacagaaggcaaacccaataaaacttgtgtaagttatgcttggggatatatggagcattactttactctgtcttaagaaatgcgaagcaaataagaagatgaatgcaaaaatggctgtgtacctcaggagtaaggatgatagacctattcaggaaggttgcccatgagcgaaacaggtgagctccagcaccactacacaagcaagaaaacaagggcggtgccggttttaggtaattggaaggatttcagtggctattgtttgggtaaacatactaacaggaagtcaaataagaagaagaagaagaagaggtggaaccttgggaagacaaaaatgtggtcgcgtcctccggatctgcggaaataaggcatctgactgagaacctgcaagcagagaggggagatgggtaagaaatgaaggcgcgtgaggtgaaggtaaggttttaccaccttgacgtatgtctggttgatctccttgtcgttaagttttcccgtcatccgaacgcatttgacataggtgggaacgaagaagagatccgcttcgtccttgtcaaatgttcgaaatctcgagctgaggaggagctggtggatcttcacctgcacgacatcgaaacgcggtttgtacagtagctcgagcaattggttagggctagaactactagtagctgctacacctacctgagttccccactggcccttgatgcaggttgcagcggtgacgtcgtcgttgcggccgcggagcagcgcgcgcaggccgtcgacctcgtcctcggcgtagacgtagatgcggaggtcgcggtgcggccagggactgtatggtgcggcgcaggggggcggcggagcggagagtggggaccggtcgagcaggcgggtgaggaagaaggtggcggcgacgaggaggagggcggccgcttggtgggccctcgtgcagagaggctggtgcgagctccgcatggtcgctcgccggagacgacgtgcaggcagcggaggggatcaccggagccggcggcgaccggaccgaaccgaaccgacagagaggaatcgatgcagcgcgtgggcctttttacctgagagagctggattcgaccggaggcccattattagtagatgcctagatgggctaaaagccttcgtcacacgccctagcagcccatgcattcggtagaagaattttttttatttatacattttttattaaaatatttacaaaaataattttttgttttaaaaatttacaaatctaatcgcctgccgccctttgggagggtgatttttaaaaatcgcccttccagagagcggcaaggaacctaaatgcaaattttccatcacaattagggatggcaatttcccccgcggggacgggtcccctgcggggacccgcccctacgggggcggaggcgggtacaatttctcacccgcgggggaggcagggccggggccccgcatttttgcgggtaggggccgggggggggggaagttcacccgcggggccccgggggtgtatattaaacattcaaatgtagcccatacaaggcccaacccaataaaatagtgagggataaaaacaaaccctagcctccccagtccccaactccccatctcaacatctcccctccagtccgcatcggcatcacgcacccaggcagaggcggaggcgcagcggcacgccagggtgcacggcgaacttttggatctcgccgttgtcggttgccctctgcccctctcccctccaatcctgtcccctcctgctctccctccggctctcctctccggctgcgcggtcgagcggcgagggcggcggcggccggcgagggtgcggtcgtgcggcgcagaggcgcggcgtccggctgcccgtggcgagccgcgagcgcgaggggacaggtgcggggccggcaaggggacagccggacaagcgcggcagccagctctgggatttgattttgtgttgatttgattgagttgttactcattgcggggccccggtcgggttgcggggccccgcaggggccggggccggggccggggactgatttgcacccgcatgtccactcgaggccggggccgggtggagagttcgggggtcggggtcggggccgttccagcccaacccacacccgccccgccccgttgccatccctaagcacaacttgttagctctataaattacaatttaaaattatactataaagtcagatgaaataaaactttatatcaaaattgtagagctcaaggagatctacaactttgtagttaacaactttttcatttaagatgttttagatattcaaatattcgttacaaaatataaaacacattttaaaaaatctcagatctacatctcaaacgacattggatggagataaacattatataaaagttgtagatcttgatgagatctataactttgtagtttatcacttttccatttatgttaacgaccaaatttggtaatatcaacatcggaaaaggagattagatcaaggtggagtcgaaggcggagattgatccgagaacagagcaagaatcggctgaagtccagatcagctacgattaggatcggctgggtctgagtcggactaggtgagccgatgcagcagattctgtcagtataatttggtgtatgacattgggttgaattgaggtgcttcaagatgattgccgcacatggatagagtcctgagaaggcaattgtatctattaattaggatgttttatgtaacttccttagagatatgtttgggcaaaagtctgccgcaaagacttatggtatcttagagtttgttagagatagtggtcgtgtccggtatggacatatcttgtaattctcgggtataaatagaccccgagccctatgtaatttttaacacacacgttcaatacaatttcggcgcatcgccacctttttgctttagttttgtttcgacgagttcttgctttcgggttgagctgcatcggtttcgatcttcaacaagaggtaaaacttgttatgacgacttgtgttctcgagattagtgtttccatctttatgacactctaatcttgtctatataatccgtcaagttatcatatatcttacataatctttggcaatatcgttatctaacctacaatcggctaacatctgttaatagaaggcaaccgattaggttaaatagcgacgttgtcctaaattatataagatatctaccactttatgaaacacccagcggcttgattgtctagatattgttcttcttttcatacttaatgctacatcagttgagtttgatctattaagtcgtgcttagaatatcaatctctagcatgtcctctggttgccgattagggtagtatgggagtttcagccgatcttatctgatttaaccatattcgatctatatgcttcaatgtcatgttaaatttgccctttatgtcaagatcttattgcatttaagtatattaagcttttgtttggtatattatatttgttttgttatctttatataaagtagtatcggagtattagccgatacatgctagatctatctgatcggctatgctataaacatatataatcctgttattaatatatatttcgatctaagtgatttatactgtttcggcatggtgaccgatctatcccaatcacttgatttaagtatatattaatataagaactatatatcgttaatatctacagccgatcgaatagatttagttccttaccatctatttataaccgctgatcgattcatatatgacatcggctcaaagataaatgatatgttatcggcacctagccaatcggctatcatttatagatttaaccacgaattctttgtatctatttcttgttgattacaggatcaaatcaactggtacgctcatacattcgaaggcgagctttggacctacacaggagttaagcagatctcccaggcctcgtgttttctatcaacaatttaaaatcatttggagtatcgaataagcattattagtttttaagcaattaaaaccggtggaaagggtttgaacacaaataaaaattttgcatttaggtcccttgccgccctttgggagggcgatttttaaaaatcgcccttctagagggcgacaggcgattagatttgtaaattttcgaaacaaaaaattatttttgtaaatattttaataaaaaatgtataaataaaaaagtggaatggaataggaaagggcatagttttttcgcttatgcttatcaaccaagatttaaatttttcgactttaaatttagagttgatttgagaaagaatttgcaaactaataaaaccgggtggacaaattttccatctccaggggaaaagactatcatctcctaccagataaatttctaatacctttggggtaaaactcttgtctagtagggaattgcaaccagagagagttctagtgagtccatactctttctttcgttcatcaaagcgaagcatgggttttttaattgaagtttatttttcagcctttacttttagatcgctaagaatacgtatataaaagttttattcacaaattattttttgtttgcaaatatgtcatttcgcttattctccgaataagcgaaacgatgggtcgcccagtctgaaattcatccctgaaccgaaataacaggtactacgtatccctcaactctcaaaaccactacaaataaggtcccaaggtggttttagatgatggttttggctgacgtggcgcctacgtggatgatttgacttagtcatcatcccatgtggcgttgacgtgacattagaatcgagattaaaaaattaaaataatatagtgggatggtaggtcacacttcctccacctcaccccctccttttctctatctacttctcccaagttccaaacgagtgtgcagcgacggtggccggcatggaaggcagtggtgacgggaggtgctcggcgaggagggagccatgtgttccgcggcggatgaggagaggctgctgtggcagttggaggttggtgaggaggaggtcgcggacccgttcgtggcaagcggcagccgatgaggagaggacggaggcgtaggagaggggaggagagctggcgagctcgccatcttgcctccaaccaccacccgcggccacttgctccgccccgcctccgctgccaccccgacgctaagccatggcaccaccaagacaggcacaggccttgccgtgaggtacgacgatgaagactgcgtggccgccttgaccaccaccgcctctagcgtcttgcagtccctgaccacgccgccacctcctccctcaatggcagcctacagctgaagctgatgcggcgggtcgaatcccttaacttgtatcatcgaaggtcccttgtcttatcgtcgaatgacaaaatcgtcccttaaccgcaaaatcagatatatgtcatcccctatcttacaaaaccggatcactttgggtccttaggcagttttgactccagttttg

SEQ ID NO: 21297 - DNA, 6514 bp, Oryza sativa
tgcactccccgtgcactgtcgccatgctcctcgccatggccgtcattaccttcttcaccgacctcaacatcctctcataccttccccgccactgtccaattcttcccccgtcagttgcacccgacgcaccgtgcctagctgctctctgtcactgccgcccgtggaaatgggagaagagaggtggagagggaagggaataagaggctgacatgtggggcccacgctgactcaactgccacgtcggacaaaaccggagtcaaaatcgtctaaggacccaaagtgatcgattttataagataatggatgatatatatctgattttgtggttgtgggacgattttgtaatcttataataagatgagggatcttctatgtaccttttccgaattgatatgggtagaaagagagccagcgccagccctactcgtacggcggcagagatatgggacacacgacgcttcacctagtgctgcgataggcttagatgggccaaacaaatattcatccaacatcggggaaaaacttaacgaacatggaattaattagatctaacagcttagaagtgccgatggcatttccggctttccgccaccgtaatatactacgatgtaaccttgtagaatgtgtgcaatgatttcatctggtttagtgagcggaatgtaattacgtatagtaagtgtgttaactgaagactaattggccggtgggattcgcttccaaacagtagaagacgatgggacgagagcgcgcgtccaagatccaaccaacacacttgagtccgtgactgcccttttttctccatcatcataaaaccgatccgtcgtaagtcgaagcattttctgtcggtatgcatatgcacacatgcgcgtacacagcagctatatgcatcatcatcgatcacatgcatagatagtaggattattttatactcctatcgataatcagcgtgcatgcatatcaaccgaactgcaattatttaggattaatatatatataattcatgctattgattatatatacatttgctcttttttttaaaaaatattataattcatgtatttacgaacatactattacaattgaagtgatatccaattgtgcaactaattaccccctcaatgtattttttagattttcttttaccaaaatgccattctgtcgtccatcctctcttcttttgtccctacctctttttccacgacgggtagacccaacgagttcgtgacgctggcagcagcattggatatattacctccatattttaatatatgacaccgttgactttttaaccaaacgtttgaccatttattttatttaaaatttttgtataaatataaaaatatttatgtcatgcttaaagaatatttgatgatgaatcaagtcacaataaaataaataataattacataaattttttaaataagacgaatggttaaacattgaataaaaagtcaacggcgttatacataaaaaaaatggaggtagtatgacactgcacacacgggcctccgggcctctacccttgcgctggcctcttccctttcctacgacacgatcacgcaaactcctattggatcagggagggagaggccatatgcatggccgcgcgagcgagcacagacgcaacctggcttgtcgatcaacttgcgttggcctggtcctggacgtacaggaaggtggatcgatgcacgcccgtagccatcctggccctaagttcacgtacggtcattcttaatttgttgtgcactctagcaacgatctggaaaatgttgacctccacacccccggcctctcccgcgacgcatgcaggaagatggcggcaacagctccatacggcgatgggacaacgaatcagatctagcgcgttggggatagcagtggcacgcttgcactgctgaggccggcggtggccggcgcggggcagaggtggaggaggtggccaccgtggccatatagttcatcagaaatgggagagagggggaggacgaagggatatgaagaaagaaaatggcaaattggtccaaaaattcatcgaatggataagtggtggaatgtcaatcaaattagaatgacatgttttacatgatttgtaatgacctttttttttgaaaaaaaagatacatatataaaatttcatccccaaattttcatcgaccggcatttagcaaatcggtaaaataattaattgcaacgagcataaagatacatatataatgcctagtgtgatcaagtcggtcgattgatacatagctagtttggagtggatatatatattagctagtgggtggataggctattagctagtatgacagcaagaggagggagatgatgtcgaggacgacggtgcagaggcggcgcagaccctcctctcgcttggccaggtcggacgggtacgcgcgctgctgggacgacgctcgtcggaacagcgcccggcacatggttgggtactgggcggcggcgctgacgtgcacgaaggcatagtcgtaggcctcctccttgatggcctcctgcgcggagatgagagcctgtcgcgcgtcggcgtacctggcggcgcacgcgcggagcagcggcgcctgaggctgagattggtaagcagccgcgctggcgagtaacgaggctccggcggctgaggcgttggtggcggcggcagagacggcgatggcgcataggccgcggacatcggcggcggtggagatggaggggtcggcggcgagagcggcgacgcagacatcgtagtaggttgtggagttacaggtggactgcacaagctgctggggcttattgttagtagtagcaactgctgctgccgagttggcagcggcgcggccgccggcggcgataagtagtactaagaggagacaacaaccggcgggcgccattgatgaactggctggccctagctaatatacactgtatgaaggttatgtagtctttctggatggatatatatatatatatatatatatatatatatatatatatatatatatatatatatatatatatatatatatatatagcaagctcgatcccctgtacgacgtcgtggacctggaggctggaggtttgtcacactcacatgcatatgcactcgacaaatgcacgatggatggatttgtgatcgattctgaaatgttggttcacgtgacatgtggtatggatattcgctcgcatgcatgggcctcccagacctaagaacaatttgggccagctagcttagcgccttggcccatcccttcttgtggagtggaggtgtggtggctgggctgggctgggctatctgtcctgttcatcatcatcgtctcgctcaacaatggaatggaatggactgactgattgactaccacgaccaacagcaagtgtcggatccgctccgatcagcagaggtcgccgccggagccggagagggaggagatcgcgcgcgatctgcttcttcgttacttggcccttgtggatgtcatctatctagtccgtccgtccgtctccgtgcgcaagtaagataagatcccatttaatttccttgtttgctgcagctgcaaccgcaactgcaactgattccggccgggctttgagttcttctccccccctgttggctgttgcccctgatccgattccatctcatcccatgggctgtgtcggctccaagcaattccatggcgccaacctgcacaaatctgcccgccccccgtcctccacctccaatcattccgattcactcaggcacctcgccacctacgattcaaccaagggccaggaggaggaggagccagaggaggccgctgattccacagcggcaacaccattggcattacctgatcaagtactaatagtgactgataaggaggaggcacctggtgttgatgccaatgccgcgcctgagccaaaaccaaaactcagcctcgtggcccatgttcctaatggggtggattgggagcatgttgccgctggctggccccgttggctcacacaggtggccaccgaggctgtccgaggctggctgccacggaaatctgactcttttcacaagctgcacaaggttgtttctttctctacgctttctttgttttttttcctttcttgctctctgttattctttcttccttcctttacacttttggtgctagcttttcttctactagtagtttgatagtttttcaagactctaatctttttagttgataccaacatgtcgtaccggaccaccggcaaaatctttctattctttattataagtgtttactctgtgcaatagagatatcgaattgccatgctaggaggtactcctaattgataattgctgtacaaactacataattgcattgatatgactgttcaattccatattatctatctatgtgcttcctttctaaactatggattatatgctgctacacttcccttttatttattcagataggtgaaggtacctacagtagcgtgtataaagcccacgatctagagaacggcaaagttgttgcgcttaagaaagtgcggtttgccaatatggaccctgagagtgtccggttcatggcacgggaaattcatgtcttgaggagacttgatcatccgcatgttgtgaagcttgaaggattagtgacttcacacatgtctagtagcttgtatcttgtattcgaatacatggagcatgatcttgccggacttgcagctacacctggtataaaattcacagagcctcaggtttttttctctagacttgttcttgtgagcatgctgttccatctccatagtcctcatgttatccacttaagctgtttctttcaggtaaagtgttacatgcaacaattactttctggactggaccactgccatagccatggggtattacatcgggatataaagggtgcaaatcttcttcttgacaacaatggcaccctcaaaatagcagattttggtctggctacgttttttaacccaaatcaaaagcagcatttgacaagtcgtgtggtaacactgtggtaccgtcctcctgagctattgcttggtgctaccaattatggtgctgccgttgatctttggagtgccggttgtatccttgcagagttgttgtctggaaggcctatcatgcctggacgaaccgaggtattgcttggccctgaataaatgcccatatcatatacgcagtctttatattgtctattgataatatttgaccaatttaaacctaaataaaagctgaacaccaactatttaatctgaagaatgcccttttgtgacaactttggttgggtcataaagtttggagatggctgactgcaaatttagctttgttcagatacttgagctaggaaaccttcaatttcgagaaatgtagaacatgacgcatacagtaagcgtttgcagagaattgcatctagttgagtggaggctgttaccgcttttgtcttatgttagtaaattcctatgtctgcatgctatttttatttttgagatacttggataattaactggtgaatgctagatcattctgcttggtctttcactaagaatcatgggtccattttttattcttcaaatcttgtttcatttgaattgatggcaggttttgtgtagttcataacttgcagtatgttattaatcaacatatagatattttgatctttatagcacagtggccacgatcatatgctcaaccttatccctgcatattcttcttttttgttacaggacccttcataatattcttaccactagcagaagctatttttgagtacttttgctttccaacacctttcaggttgaacaattgcacaagatatttaaactttgtggttcaccatcagaggaattttgggctagtttgaaactttcacgagctacggtctttaaaccacaacatctgtatcatagatgtgttaacaatgtatacaagggcttctcgtcttcagctttggagcttttggatcagttgcttgctgtagatcctgcaagtagaggaactgctgcttctgccctcgaaagtgaagtaagttttacattgttattcttcattgctgctatctgccacttattggttaggattgccagctggctgctctcctttcacatagtttggtttgcttcctctctgtgccactggaaatacaaagttgggattcttttttcatatatttccctattttctgtgggtttttcttcttttttcatatatttccctattttctgtgggtttttctctgtatgtctgtgtgcggatgtccatgttgtgtggacttacattgctagctttgtcttagggacaaccttttgttttctctaggtcaaatacaagaaaatgtttattgaaggactagcagtacctgttttgctaccttatatagcttgcaatagaagctgaggctatccctttataaaacaaagtaaaaaagaaaaagagaaataaataaagaaaaggatctaacagtacctttcaggaacaacttgtgaggacgtcccaaagcctaggtggtgcaacgctccaaggcatgtcagcgcgaaatatctggatggatggggt

SEQ ID NO: 21298 - DNA, 23512 bp, Oryza sativa
gactagttgcccaggaatgcaacatagtcttacataaatcatctcaagcatgatatccaaataataagtggttctaagcaataagcataaataatcttaataaggttctaagtagtacttggcgacaagccataaatattggttcatgcggtaagcgtgctacccaaaagcccataggcaaaccgactagggtaaatccctagttagaaccatcctggaaatctgcaacatcacaagctgcatcaaactcctcatccaaacagtcattacctgcagcggggtctaagcataaacaagtaaaagaaagcaagaaatcagtacattaatcaaattaatgtactggcaagtcggaaacaatcctagcatactacatgttggccatattcaaggataagctgtgtataggttaatttgcataaaagccaattttagttcataacatgtttcgcaacggaattttataacaatagtatagagtaagtaaaacttgtaatgtgaatgaataaataacacacatctacccctcaaggtagatcatcaccactctccatcatctcatcaccattcaccgaactttacccaagttcacaaacaaaacattccaaccattttccaggttcacaagagtttatcaaaatcacaaattatactcatgacacttcaccatgccgctcatgaccgtgagcacggctaatcgattagttttagactctgcagagtttgtacaacttttaagcccacatgatatggatcgctctagtttttttcgatacccgtcggtatcaccacactctacacattgagtgtgatctagaggtcataacggaaccgttacattgtttattgtctagccttgcaccagcacgatgtgtgttttacccacgctactagcaaggtagcgccactaggtagcgggcccacgctttaacctagcgccgtaaggaacccagcccggaatccctcacgaggcacgacaccgttgtattggatagactacccgctaaaatcatcacataccacatatcattaatcaatttcatcatatcacaaaccataggaagttccgataaattaccaaaacccggtaacccatacccttcggcctaccaagatgcaaggctaaactctaaacaacttaataggttgaggccaacccatacttagcacatgtggtttgtactgttttcattagttggtgacatagagtggggtccttaatcgacccgggcgaacgctccccctatcggtgtacaactacaccatatgtacaccactcgccgcccaagtctaaaaacaagttatctccattttcagttcacgatactcacacatttaaatttctatccagcaacatcaaaataaccattttcacatataacatttagcaaaacgagtaatttgcaaggcggtaaccgaatataagcatatagcggcaatataagcatagtataatcccaaagaacacaataattgtattcaaaagcactctatggttacaaccagcaaggattcaatatttcaaggtggattatgcagcaattaggtcatatctaccattcccacatttatatatatatatttttaccaaaagtaatactagctaacgtatgcatgtttgcaatagaatcatttaccccaataaaacttaagatcaatgtgatcaaaggaggggcaaacttgccttcatctgcaaactcctgaacctggtcatcaacaaactcaccctcttcttcttcgacgtactcttcctctatacaaaatacgcatatacgataaatacaaaaatgcataaaaaccaaaatgcatgaaaatgcatgaaacttatgcagtgagtgtgtgctggtcttaggtggtctctggtgaaggaatttttattttgtcactttttatttacagagatatgcattttacaattaaaaaggtttaaaaagggctaagttttattaagcaacatttttgtacagaagtgaaggaattacttttacaaagttacagagcatgatttataaagttaacagaagtggtttcacaatttttatagctatattcaatttgttatggatttaacaagttctaggcaacattatggcaaaacaaaaataaaggaaaagtttgtacagaaagtacccagttttatatttttttaaaatagctcacagctttatggatctaataaaactggtttcacaatttttgaagttaaaatgaattttctacaaattttagaagttctgctcattctctgttttaaaccaaaatagaaatcaattttcgaaattgaattccagccgggtccacaggtcagtgaaaggagatttgcagagaggccctcggaagttgggggaatcaacccgcacttcttctgccacttggacagcaaactttattaagagtccctattcttttgtttatttccatcaaggttctgctatagtaatatgagtcatggcagttttcagattggaccctagtgtcgatcaaattcaagaaatgaagtccccagctagctcacatcgggagcagccatggctgagctcggtctacggctcaccggcggcgatcggtggatcgaatcggttcgagcacaaaagagaaaatgtagaggacgttcttgcgcatccgtgagtggtggtggtgagggaaatggtggtctgtagcccatggaacatgagctacaatggcggtgtgtctcggtatgcccatgcatgtgcatgcagaggcttggttagtgcaaagggttagtgcatgtgctctcatatggtaccagggtgctcaccaagcagagaaacggaggcagcgaggtccagggagcggcggaggtggtggttgttggccaacgacggcaaaactccggcgtcaacgtcgccgggtcgactcaaggcgcgaactgcaacttcgagagtacgggagtgttagagatgagccacagagggtgcatgcacgaggaatccggcggaaactcaccggagcttggtgttgcttcggtggtgaggaacggcggccggagcggcgtcggcagttcgggtggccggcggcgaggacggtgacgcccaccacgtgctcgacagattggtcctagggcaaaaggggtacgggtgagctcggtgtaatgcgtaggtcacgttccataggagggaagagagagggactcaccggggatgcacggcgacaacggctaagtcgccggagccgggtaagacggccgagctctgggcattctgtgcgtggggtgtgttttcttgtacttggaacgcgatgtggggagtgtgttgttgcttctggtgctttggcttgggatataaggaagagtggagtgggggagtgagagagagaggtggctggtgctttcattgtgttccttgggcatccattgggcatgggggacggtggatgctgtgaggggagagtgggaggctgtcatgtgggtcccagagggtgtggggcccactgtcagtgaaagaaattcgaaaatagccttggaggctaagtcaaagagggttgcctgccaaggatctttggaggggattcaaggtggattttgtgcagcaagaaatctgggctagatatcctcttggtcaggggtgatgtggagagtaaatgtgctgaagtggattgggttagaagtctctggtttaggtttgatggagtgatgaacatgtattgacagtgttggttagcagcagttgacagtgcagttagcagctgattggatttttggagggagagaagaaagggttagagagtgatccagggtgtgccactcctcagggtgttagaagaaagttagtagaagactttggctgaaaccaaacttcaaaaagaggttttgaaataaattttacagagagagcaagtttgaatctgctaagcagttcttttcaggattttggagagattaaaggagatcaacaagttagcaaaccttactgaaaaactctgaaaatttgtgggttgatttctgacatatcaaggttttttttttgagaatttttgtggaagttttggatgcatataattaccagattaattgtttttgtgactctaggcctatcaagatgcatatgatgagatgattaagatccaaaaacaattaaaatcactccacaaccacatgatgcatttaaattaaatttagttctcaggtttacaggcttgggtatgttacacaactactaaaggtatattttgtctaaactagcaaaatggccatatgttacggaattaaaaataccacgttggaacattgcaaagaagacacatctattttgaatttcagagcttaattttagaattatttagagatttatcatatttttgtattttagctgtaaaaagtttcaagcggactcgattgacttgtacttctggccctatacaactatttggaggggatagatagtggtcccacatatcaaaatttggggagtttggtggtggcagtagattcaccactcaccaccaccattactctcttttaaaggagtatagattttgaagtcagcgcttgataggcctcttgtgttttagtttgtccagtaagctgaagccctactgccttgtggaagccctacaaagctaaattaccagcttggaggctgggagcaatgccaaacagatgttggtgatttgtatggtcactggccgttgcggccaacatttcctgcctggaaccacacatcagttcttgctctgatgcattcttttaaaaaaaatatatactaatcaaattatatggttcagctcacttatttgtcttcatgtcatcagtgcttcactacaaagccaagataccatatgcttgtaatccatcaattcaacgaacatatacataaattttcttccaaatcatgtcttctgatttgacagatcatttatttttactcatatcatcagttcttcactacaaagccacatgcctgtgatccatcaagtctaccaaaatatcccccgagcaaggaatatgatgctaagctgcgagatgaggaaatcaggaggtaatctgcgctgcaagattttcattaacagggatttgtttttctagcatctgtaaagatgattgtacgatgctcattttcctgcatcaactttcatgattaaatctaagacttgctgacaggaaaaggatgattgcattgaaaggacaaaataatgaaactagacgaaggaaacaacctcagtctggaaatggagatttacaggtaccatgatatttcattacatgtacatctggatgttttatccaaagctgatgataaacctagcgaagtatatgtaagatctataatcctgactcctaagcataacttttaaagctggaccggcgatcaaactggtgagtctgtctgccggtttgaccactggttcaaaataaataataaattttgtgttttgtatgccttgcttcactcaaaaggcttaactaaatatatcttgctttcaaagtcacccaacaggccttagctgcagtgcctgcatagggggaggtggtgggtttgactccccacctgtccttttcccagcgaaagtccttacctggtccaaccacctatggttttctctggttctttgtgaaaccttcctgtctaaccggacttttgtggttcacatgcatgtccggtctttaagttaaaccagactggctctggtagtccggcttttggtttttctggttggtccggttatgataactaggctcctaaagcactatacttctgatactattgaacccacgacctatgtttgcatttgcaagatactgttttatgtatccttgtgaagaaacacagaaacacagtattctaggatgccatgtacctcatttgcctgggcttgtttgggcaccataaacgtgaggatgattgctttctcattcaagagtgcaacttctgtagaaattgatgtagcaactagcaggtgtatttttcagttttattatgtaacttctcatccacataagttattgcatatgccatatccactatttgaacggctgagtctgagtttgatgatatgtaaacccctcatttatgtgcataactacatctagcccaagttggtgatttagctccatgaacatagaacaaggagctagtgtgccatagtttttttgacatacgtttgccccaaccaaagcaagaatcagcaaagcaaaacaatcttgctaaaatggcatctaaaaaataaaaattatgttagatgtatagtgcctaactggtgttgcaacaatctattttgcacgttctctgttgtaggttgttagtctcaagtttttgcttctgttgtgcagcaacgacgggcacaggcaaatagaaaaggcactcggatggatgacggcattcgtggctttagaattgatcctccagcaagagtcggcgaaaatggcattgctcagcgtgttcctctgttgcatgctggccgttcatcgtctactctgggccgatcgaatgagactgatgaaaagacccaaagattttacacatctcagatgccgaacttgtcttgtgctgctgagccacgaggcggtgctactcggtcatctaaccatggggatggtgccaagaggccacatttgagagagcatccatctaggtcaaggtacaggcaattaactgctgttgattcctccggtagatctgaatggacacaccagtttcaagaaagaccgtcatcttcccatcggaaggaaggtggggcggctaacaaggagcatactgtggtgagtcagctatatactatataaactttctttttcatttgtgcgaaaaaaggacaggagaaaattaagaccgcatttcaccattcattgggtaattacccgcctctatacattaataaaaactagcgtggggcccgcgcagattgtgcggctagcatcattatattttctctcatataatagaatatatgttttctcattatattattcaaatatattaaaatgacaacataattttaaattttgcaataactttacaaaactactaatgtgtaatattcatattgtattttatatacgtgttagttattaattattttcaatatcaaattttagttatttgtaaattatatgtattcctatatggactctagactcgtcttttaatatttttttaaaaaaaattctgaattttctgtaaattgtatttttatatagactctatgctttttttccaatattatttatttttatttctgaatttttattatttctaattgtatttctatgtggactctaaacttatctttcaatattatttaatttttaatttcgaattttagttacttctaaattgtattcctgtattgactttaaattctacttcccatgtttttcttaatttcgaattttagttatttgtaaattgtctttttacttcccatgtttttcttaatttcgaattttagttatttgtaaattgtctttttatacggactctaaactctaattttaattttattatgtttattccaaattttagttagttttaaattcctatatggactctatactctacttataatattccttatttttttaattccgaatttcattttttttcttaaatgtatttctatatggactctatactctacttctaatatttcttatttttaattccgaatttcagttatttcctaattgtatttctatatggactctatactctacttctaatattccttatttttaattccgaatttcagttatttcctaattgtatttctatatggagtctatactctacttttagtcttttaatattccttatttttaattccgaatttcagttatttcctaattgtatttctatatagactctatactctacttttagtcttttaatattccttatttttaattccgaatttcagttatttcgtaattgtatttctatatggactctagtctcctcttctaatatttcttattttttaattccgaatttcaactatttctaaattatattttcatatggactctagtctcatattctaatattccttattttttaattccgaatttcagctatttctaaattgtatttctgtatgaattttgctttttctttttctccgattaatatgagaatttctaggtcatgagagcgaacgtggaggcatgtatggcgtatcatcaggtgaatggcagtaagaagaacaggatccactactctgggccgttgatgcctcacggaggtaacatggaggagattctcaaagaacacgagcgtcaaatccagcaggcggtacgaagggcgcgcatggacaaccaggcaagaggcacgcaggcgttacggacggatcgctgattgatctagttatgcaagggagctgagctgcctctggtccatccctgaattcctgatgatggacagagatttttggttggctactatatatatattgttggcatgcattgaattgttcattttttgtgttgcccgtccgtcttcacttgttacttgggcaacaccaaccaacaaaagagcggaagaagagatcgacagcgttgctggctgtacagatagatgatgtaattgtaaccacacgcacgaaacagatatatatgtagagatataactggaatggaaaggaaaggaatgatatatacactctgtcggatggaagttgttttttttgttctgttttgatacactgcactgtatgtctgtatgtagatgagagacatgaaagagtatatgaaaaattgttacaggcgaggcgatcgttgcaaggtgtacaattaagtcagttccactcaaactgcacgagttactgcaaattaaaaggcaacaagttaaggtcatgtacaattgttctttcttagcgttgctaattatgaatatttgttgacatggaaaagagaaatatgagagataaaatgttattgctacggtaacaatggcctaacaacgactcttaaactctatatggaaacatggttacatgagggtgaaaaatagaaaaaaaagttaataaaataaatattcttttagttaatggttagagcttttatcgtctcaactgttgtgataatgacatagtttttaaataatcttatattggctaagtacaactgttgtaaagatatactacctgtgtccaaattcatagctaaaaatgcttatattttgggacgggggaagtggtttttaaataatcttatactcttttaagtatgtcctttattgtcgatccgtgtctagttttaatcatctatcttatttaaatttttttaaaaaaaattaaataaaacataaatcacacataaagtactattaatgttttatcatcgaataacaataaaaatactaatcataaaaaattttaaataatacgtacgatcaaaattggataaaaaaactcatagctacgtttaaaatggaacgagagaagtatttgtttctatcattgaacctgttctaagggagagaagtattgtttctatcattgaacctgctctaagggtgtgtttggttgccctcacatagggtggctcgcatccagcgagatgtggtgcatgcgtttgccgtttggttgcctgtttgcacgcgcgaaccaggctgtgctgatgcaaaatctgcttcccagccaggctgagggggaacgcccgattccttcgtagctccttgtccaggctcaactcgtgcaacgcgtggggacgagcggatgcaggcgcgcccgagcgggtgcaggcaacgcgtaggggtcggtcgatccgctcaccccccatctctcatttgtttctattgcccatccgattgctcctcgccgctcttcgccctcgtctccatcgtcgtcgccgcccaccatcgaggtcctcaaccctcaccgacttctccacagcctccatctccgtctctacttcacgggctggaaccggcggcctcgagcacgtcgccactcgccattggatccaacggagggaggctcgacggaggacgctgccaccatatccaacaaagagaggcagagagaggcgtgaaggagctcgatggaggtttcgtcgactgcccctctctgcgccaccgcctccaacctcgccagccgccggattcctcctcgctggtcacagattccccatcgtggctgcttctcttcccttcatttactagtaatgtgcccgtgctaacgctacggtgatattagtaatgacgatacaggtataacatgacatatgtgtgggtgcacatgacaatcaaattctcacaaattggcatagaaggttctccactataagttattttatgagacaaccacaaatgataaaaaaatactgaacgtacataaaaatgatatgatgataatgaggtttattttaatcaccgatatcttcttatatagtcttaataatctactgaaatgctcacatttgctgaaaaaagggaattactaatgaaaaataaattaaaaatatattaaagagcttttacaaacacatggtcggtgggttgtaaatattccatccagatcaagcattttaagtgaaatatggtttgtgattttaaaaaaaatgtaacatgcatctatactgcacaacagactaaaatcatagtatacattaagtgttatctccaaacaagatggttagcggtctcagtggcagagtaagatgcagagcaaggttatagctccttcaaaaagactatctatacaaaaaagaatcacaaatttcagatatgcatattcatattgtccactaaattttgcttacaactatgattcttccgtcaccatcgcattggagcagaaaagaaagtgcagcatatgcctaaaaccttgttgtactacttcatcaaaagttattgttggtgacttcgataattcagagttcccatcttctccccttcttgtattgcattgcataatctcgcatagaccatagtagatatgttccgtcttcttccattcttgtgccaaactcctaaattttcaacaaaccttgctgtaacactttgctctagaagtccttctaaagactcatcttttttgtcactgggaacccacaacagctctttgattggcacactttactattatcactttctacctgcatacttacaacacccaactaattaccacttaccagaacagctggtaatagcagtgtactgttagtttattaaccaattatttttctgcaaatggtagcacagtgcttaaaatactgaaaatttagcatattgtgtatataggattaattagaagcacattagatttaatagacaatactggaacctgtagcaaaaaggagttaatttgacaaacccttttctttttatgtgcataaaagatatctgtgaaagacaatttgttctggtttgtcctcttactttatatcagattattactaatttgtctctgcaataatgtagtagccagattttagagatatacaggcagggtgctgaaatggcacaaatctctaaatagagcaatcaaattgtatacacctgataaatttgtcctcaatattatttacgtaaattttattcagtttcagggacatgttcaagttcagagaatcattaagagcttgttttcagccgtaaattcagatttcagacacatccaaaatgatctgattttattcttttacttaaaaattcactttggaagcatattttgtgctataaaaatcaattaaaaggttgaaggacaacgagcgaggacagctagcaaacctcagctcaattgaccctacttcaggcatcaacggccaagcaattactccctccgtcccacaatataagggatttttagtgtttgcttgcaacgtttgaccactcgtcttattcaaattttttttgcaaatataaaaaacgaaaagttgtgcttaaagtactatagataataaagtaagtcacaaataaaataattaataatttcaaaaaaaatttgaataagacaagtggtcaaacgttgcaagcaaaaactcaaaatcccttatattatgggacggagggagtaactctgtacatgaacctgcttgttctgatgaggagtaggctccatgaaagctgaacttgatgcccacctatctgagacctatccagcacatggatggtatcttgatcttcaccagatgacctgaaaatacaataatacaaccaaagcaacaaaagatcaggacaaatatgtattaggtaaagatggttagcaaagaaaccatgaaggatttattaaccagctgttcaagcacaacttcatacaaaattgtaatataaaaagcatgaacttcctaaataatcttctttgtaccaagcagtcctgaaagttccaaattgactggtctctatctaagagatggaagggcagagcttttttatggttttcatcttttcataagatcagctaaaaaagctcagtgttgcatagatatataaagataacctaaagagatacaaataattcttggtcatgagggcacgagtctaccatcataggcagtagtccatagagatgatcatttagataaataattcattggaataaataaaaatacaaaatcataaatcaagcctgctctccagggacaaataatctggtaaatttataagacgtaaagaagcatgtgcattgcacaaacttattgtgccatgcaaaccatatacttcctccgtcccaaaatgtagctacctagtacaggatgtgacattatccagtactacgaatctagacagcctcccaaaaataggaagtgcatttcataccaaccaagaaaatagttcgcctataataatgactcaactcatatattctatttatatacaaatcaaaaaaagaatttaaagaaaaagtatatatacaactcatatactctctaaatttctacatctcttctatgacaggacctgataggttaggggaaaaatgcaacatgctggataaataaatacatgctggattgaaaccatttaaaatcaagcaacttgttgatttttatcttattgcagcagctacattttacaactcgcgaatggaaaacctcaaaatcattagaaaaactatttttattgagaaaatgattacctaaataaccaacagaaatcaggaaatggacctaataaagtggatacccaggcagaatgtttccattcaaataaaaaaagaaatatcttgtacttatagagcataaaaaaacccaactattaccgagcaagcacctgaacagctccccttccatcagtcccagcacctccttttctcccctcctagcttctgtaaaaaacaattttgccaatcagaactgatgttagaacagcaaaagaaaaaaaactgagagaaggtcatggacccatccaaaaataataataatatatgattcgatgcttccaaatggttagccttggatcaatcataaggttgaaaccgtaatggtatggttgaaagcacaacaataggatcaaattattttaccgtaaccaaattgttgtgaggcatatccctacgaaatctggaagggaacgcaaattagctggtggactaacagaggtagatcaggctcgctaacatctaatagtttgctcttgtatcgtagtcaaaatcaaataggcacaagaaaaataatgaactgggatggagaagaatcaaacttgccgtagagctctagacaccggacgtctgggcccgaagaggaccgagcgcgctacagagacttgcgggaatagtggtcaggcggcgcggcggcgatttgatgaagtcccgatggagagcggtcggcgagacggcgctagggcgagttggcgcgatgggcagaggggccagatggggtggcgatgaatgcgcgagggcgagcatcgggtcggcggcggtgccgatctgtgcgacggcgagggcgagcgtggactggcggctgctggggataggcggcgacctggcggaggtgaatcggcgacggcgcgatggcaggggagagatgagggcgtcctgtgtcggggcgatggagagcatggcgaaccggcgcccttgatgatggaggattgaaggcctcggtggcggcggcggcgcacttgacgacggagcgggaggggagagagaggcgcggatgcggtacgggagggaggtgcgggggagtcggagagagatgcgtgcatgcgggagagggcacggatgcggagggatctggagacgtctgctcgatcctgacgcggaggggagggatgcggggagatgcgggagaggatgcgcggtcgagccgatgcggcgtcgattgcggcagagagagacagggggtgcgggagaggaggaggagcgacacgcgcgcatctgggacgtccgatctaactcatcagatgattttacaccgttggatgtgtgatatgatgttcaattatagagtagatcagccaaaataccaatggatccggcggccacgagctggacgtcgccagatccggcagcctcgggctcatggccaccggatcttgttgctctgatagctgcgaacagcagcgcgcacacgacggcgaacggcaggtcaaggcttcggcggagcggcaggcctagcgacatcaacgaagctccgctcctctcctctccgtttttttttctgtttttttttctttttcaccgactggcaaaccgtgaccatgaaatgtgggaataatgatgtttactgtatgcattgctaattatttcacttattttatattgccgtacagatgtgctggtgtatatatcctgctcatttgacgattcttaaaataatcgttgccacgaacttcaatatcaataattaatatagaagataaaatcaaatgtttagtacttagaaatttaggcccccatcgtttggcttttttcctgataagccaaaacggcttattagagaataaaaatgaatttgtaggtaaaacttttatatatgtgtgacttaaaagtcaatactgtaaaagaaactacgttgaaagcttaaaatttggctttttctttggctgtttaggccattcgatgggagccttacactcttcttgagttaaattttagctcaccgcagtccccaagttctatgtgataatctcaccctttaaaaaaagagatacctatccctatcgtccatgcaaccaaccaaacaaattctcttccaaaccgtaaaccaaccaaacaaattatctttcaaaccgtatctcttgtatgagtaattaaaaagagatatatggctagcctaatgcaaacaaccaaacaactgcatgtgtatcctctcaaccaggtcaagctcagcctggatgagagagatgggcaagactaaggggatacgagcaaccaaatgcaccctaggagtaaaaggagcggagttgaataagcggatctcctggactagctaggagtaactgttatcgatcgatttttagctaggaaactaactaaaacatatgcatgggtgatggatatatatggctggtgttggtcgttgcatccgctcttgtcgtacgaccatcgatctaaccggggggggggggggggggctggccatcgatcgctggagagcacagcggagggagatcgaacaagagacgaatagccagcaaaataattaaagaggtagctggagagaaggagagagagagagagagagatcgacgagctagctagatggcttctttcggcgtggcccccgttggaaacgcggcgagcggcaagaagatcttccggaccaagtgcgcgcagtgccacacggtggagcgcgggggcgcgcacaagcagggtcccaaccttcatggcctcttcggccgccagtccggcaccacccccggctacgcctactccaccgccaacaagaacatggccgtcgtctgggaggaaggcaccctctacgactacctgctcaaccctaagaaggtcaattatattaattatttctcttttatttactctagctaatttaattaattgttgttgtatatgtataattcctcaatcatcaacaccaagatcgagtacgtacgcaatttgctaataattaataacggctgaggctggctttgcagtacattccgggcaccaagatggtgttccccggcctgaagaagccgcaggagcgcaccgacctcatcgcctacctcaaggaatctaccgcctaacccatccatccatctatccatcatctgcttgctgcaaaatatatatatatatatcgtatcattatgtttgtgtacccctatgttatactccttccgtattttaatgtatgacaccgttgatttttcgaccaacgtttgaccattcgttttattcaatttttttttgcaaatatgaaaatatttatgtcatgcttaaagaacatttgatgacgaatcaagttataataaaataaatgataattacataaattttttgaataagacgaatggtcaaacgttggataaaaagtcaacggcgtgatatattaaaatatggagggagtagtatatagcatctatctcaataagcatgcatgcatgcatctgtttaattatcgttccaaccatgcgtgcgtgcgtatttgaaattaagaagcatcgtatttatcctcttctactgtaaaagcatgcatggatatcatatcgagatcaagttaattaatagtagcaatgcaaagcatgcaggatcagaaatgtgagaacgaaacatttgatgtttccgagcatatatgtacatttaaatgtgttcttcttcttgttcgtctttggcactatgtgtagtcgttctgtcacctaatgctcttgccatgctgcttcaagcttacgctccacaagtttgggatgagtgttccagagaagatgagattgccaaacgtcgtccttttcatcttctccgaagcccgaaggagatttcacccgatatatctttggaatacaaaagatgtcggtgctatcactgaaaatttgatacccgttctaaattatgctttaataagtaagacattttagtcttaatttaatcactattttttataaactcatagtttaacaacacaaaatttatatttttaaattcacggtgagaaaaactttcataatatacagttcacatgttgttacgtatttttaaagtcctatttgtttagctttacaagccagcttatgagccaaaaagtctaactctgaatgactttcgtacatatatttactaaaactagtgtgtcgacgggggatatccgtagaccggatatagagggtattggggtacgctggtacgagaatctacgtaatacgacatcaagcagacagaaaacagagattatactggtttaggccccttgataggtaatagccataatctagttgatatgggattatatgatggaaaatcacagattacaaagggagtagtggaactcgatggtactggcgagatcgtaatcgagctggtttgactagatctcccggtgacttggctcttgtaggctccgacttcgtagactgcggtggatgtgttggctatcagattcgatcccttaggtcctcccagggggtcccttttatatcgcaggtcaagcggttttcaagtaggactcagaaacatcggaccctgcacgatacattgacgacccaatcatgttcgagtaggactccttccatctgtgaaatccgtgatggattttcttaacgtatgcagagaacgtccatatacgcgtaggcatgccatatcgatatgtgacgcatatcgaagggtagagggtatactttacccgtaaccctgacatagtggaaatggttagtaatagactctatcactaagttttaatacaatattttatattccttatgcaggagttaacggttaaagtttgcacttaacaaccatcaacacacatctaccacttgtcctcgagctcgatccctatggctcgcttagggtagaagcaatgcattgacccaattaagccttacattcaatgcagggtgacatataccagcccagcatgctttcgggactacggacgataagacaacacatgccaacactaggacaggccatcgtcacccctcaaagggcacatgacgtggattgatcaggcgatgcggttgattaccatgctgcgctccgacccatagccatattgcactttcttccgatagctggcacgcggcctgatgactgggcccacttgccaagaagcaacaagactaaacacacctaacccttgtactggagcccatttgtaagagcggtcactgtgatatatcaccttgcaactataaaaggaggaccaaggccgaaaaagagtgggatgggccctcgccctagggggttcaacgagtccaaatagcttagctttcactacaacaagttaacttccagcctcgactccactcatggtaactcatttcgagcatccatagtccacacacaggagtagggtgttacaaactcgtgtggcctaaacttgtataatctcctgtgttcatctctcgcgcgattagcatatggacttgactcaccccctggatgaatctccaacgggagtactagcttcccccgctagaggagtttcacactccgacaccctcattgtcctgttgctcgctcaacggctcactaggggtaggaacggtggcggtggcatctcgctcggtgccacgctaatgcggcaatgcccacgttctgtatcacttgctgtcatgctacatcttgcgagcgatgacggtcctggctccggcaacctacttacaccgtcatcaccagcttcatgccgtactctgtggtgctcactaccgacttgatcatcttctcagtataggtcacgctggataccacgttcttaggtgccacgctttgcaccggaatttgcgccatcgggcatcacatccatgaccgcatcgatatccctccacagctccactcctcgctaccggtggttgcgtcgaagacgctcattgactcgaaggcgtgcatggcggtcgtcgtgctgatgtcccttggtgcatcgccatcctccacctcagcatggtatgtatgttggaattttcgctaagttgtacattgcaacaaaaccagaaaggctcaaatcttcacccttcggagcatacactgaaggcataataaggatgacgatgtggagagatcaatagagaatgagggaagggaagagagaggatagagggggaagagatggagtagatacattttttaaattttttttaatttccatgtgatcttgtgggtctttatttttttaaaagaaaattgttttatttttttcgctgattgtacatcatagttagaagagatgctgaagaatagcgtactgcggggtctggtgtacttgggccgaaaccggcccagaagcgaagaggcagaagaggcgcgtgagaggcggagaaggagaggagactagagagatctgagctctggtcagccgagccaagcctgccggtcgccggaggaggcaacgacgaccatgatggcgccgtccttgtccaccgccgtctcctctcttctcctcctcctcctcctagccgctgctatctccgtctcctcctcaccgccgatgccggaggacagcatccgggtcatctccgccgagaaaagggttcgtcagtccgatctctctcgtgtgatgtctaattttcatccacccgctgcacttgcaccttgattgtttgaggaccacaacttcaaaactatagcggctgaaagctcctctgtgactattaatccaaatcactccccttctttaatttatcgaccggtgtgtatgcatgcgtggatctataatttatttgtaatttgttgcactgtattaggatttggctcttgtttaattttcttttagcatggtctagttagtccttgcctgattcaccttgttcgccaggcactccgcacctttatcaaatgggaatatatacactgttatatacctatgctgctttgtactaccacttcattttttttccttttgattggtgaagcacagcaatacacttactcaaatgcaaactcctgcagatcgacctcaccagccccatagtcaaagttttcctcacactaaaggtaaattctgatatcgattcaaccaattgccatgtcagcaaggtctgcatttctagtcacacttgaacctcttccagctcgagaatgatgccactgcccctgaagcatctcaagttctactcgcattcacacccacagaggttgaacatcttgcgattgtcaaggcgaccagagcggaggggaagcgcaagaagaagatatatgtgcctctctctgtgaaagcctctgatcttgctgccgctccaaatggtgctcgcctgtactccattttgctgagcactccattgaaacctgctgaggtgacgacgctggaagtattttatgctttgacacactctttggagcccttcccagcagagatcacccagtcagatccccagctggtttactaccgtgacagtgctgtgcttctatctccgtaccatgttctggagcaggttacctacatcaaaatgccgagcaatagggtggagtcctttacaagggtggaccccaccagtcgagctggtaatgaagtgaaatacggcgcatacaacaaccagcttccaaactcgtatgtgcccatacttgtgcattatgaaaataatcgtccgtttgctgttgttgaggaatttgtgcgcaaggtggagatttctcattgggggaatgtccaaatcactgagcagtataagctgaaacatggtggtgctcagcacaaaggagtcttttcaaggttagctgtgagcctgcaagaatcttacaccttgattttcatcatatctagtattctgctcttggaatccagctgcttgaactatcttattctagcactatcaatgtctggtgcaaatcaaatttcaaaaaatgcgccagcaaacccatgattcatgacttaaaccctgaatcctttattgacatcgactatctgtcaaccttcttccaacaatataggtcctctagcatcggattcaaaattttttaaaaaatatagctgaatatttctttacttctgttctggttatgtcacacatgccatgacgaattcaaacaggtgcatgcatctatttatatgctaacaacatgccttacagatatcagatatgcaattgagtaaccttttgtttgaagatgtatgatatattaacaaatcagtccttccgtgtattgttttggctaatttagttcattgctttatggttactcatttgaaacctttcttgctaggcttgagtatcaatccaggccttctataagtggagtgtcatcatttaagaatcttcttgcaaggttgcctcctcgagttcattcagtatactatcgtgatgagatcggcaacatatcttcatcccatttgcgtagtgattcgcacaaggtacaagatacttcttcatgtggtgtaatgaatcatatgctaatgagtggaatataagatatcattttatcttaatgtaaaaaaaactgagactaatattttgatgtgattgtttttctttaatgcagtcagaacttgaaattgagcccagatatccattatttggtggttggcactgcacgttcaccattggctatggtttgccattgcaagattttctctttgaatcagatgatggtcgacgctacataaatcttacttttggatgccctctgttggatacggtggtagatgatcttaccatcaaagtaagaatacaatgttttaaattttctgatgagacatatttctcatttgattctaattgtagcttcattaaagaaaagcaatattaagtcatgtagcagatggtcatgtccacgaatgttgctagattcatacagaatatgctcatgagtgatcttcaacctaaattcaaccaatcattttatttttggccatacttgattagttatgttcatttgtatgtctcctatttcatctcttgtacaacaaagcaaaaatagattcttgaggaacagactggattgatgtttgtttggaaggaaagattataggatttctcggcatgtttacagtcctacagcatcatacctaaaccttttaatgttacaggtcgtgcttcctgagggatcgacaagtccacaagctgtagttcctttcctgatggaacaatatcttgaggtaatcccatatttttctgtattggcattcttttgttcatatatctgtgttctatgttttaatgctaagcggcaagtgtacaactacaaatttcataatggttattatcaatagatgattcagtctaagaacattggcaagattgcattgttaattcagtggaatcatctatcatctgctaaggcctatgcatgttagactacataatgccagcattatcaccagtggcgaagccaccgtgggggctggggagggcctggtgatcagcccgtataatctggccatcagttactagtgagattaactaactgatgttatatgtggttgcaagcctcaaattaaaatgatgaaatgacgtgacgttgaatcatccatatactaaatatattactgaatttaaaatagatgctatttattgatctaatttaaaattggtgatcatccatatattagtagacacatacgtctaaaaccacatcaacaatcatgatttccataattataaaaggagcgactagacatatcatacgcaattgcgcatattaatataaacaagagccgattgaatatatctttctcttttagctgattgccatgatatgcatgatgctgatcacacatccacactctacagcattgtccatcgagccgcaagtgagctctctcatcttatagatgacaccccgaatccctaaatcctggcttcacccctgattatcacttgagccttctccattatttatcaatatggttgtttgactactagtaagtaattatgtccacagctttcatggtttggtttctgtcgtgatccgtggatagttctgtaggaatgagtaggtaacaggacaccagtaactgttacaaggaaatttcaccataagcatttagtttgctccttcatagatggattttcctatcgtttctagtttgatattatcttgcccttttcggatttcagttcccgaagattattgtttgataataatgtatgctaccaatgcagactagttattcataccttgatgttgttggaaggacgacagttgtactaaagaagagaaacgtagttggagagcacaatgttcctttccaggtactctctgacagataggccttgatacatttttgaatttgattggtaattgtctgaatgttgctgttgtgagactctatctgataagcatgacatctcggctcaactgcaggtgtattacgaattcaatccgatcttcatgctcgcagaaccgttgatgctgatatcagccgtgttcctgttctttgtagcctgcattgcttatcttcacatggatctttccattgggaaatcataggctccttgaaatatttagaggcgctctccgcacttgcccttctaattatcacagttgaatcaaggctgccttttgtgttagtttgtacggttcgcgtggggga

SEQ ID NO: 21299 - DNA, 2956 bp, Oryza sativa
acataagtgctcacttttgtggagagggagacttgaagaattgcgccagaatcattgtggcctttttttttgcagattaaagttggggcgcactggcaaagaaagaaactctggaagtgtgggaaatcgccatgtaaacatataatcaaatcgaaatcagacatgcgagatactcgaatctactccctccgtttcaagttataaaatattttgactttgatcagagtcaaattatttcaagtttgaccaatttgatagaaaaagtagtaatatttttgatccaatataaatttattataaaaatatatttaattattaatttaataaagcttatttggtaatgttaatattactatatttgtatataaacttagtcaaccttgaagcagtttgactttgacaaaagtcaaaacatcttgtaacttgaaacagagggagtaacatacaaataagaaaatctcgcaacatattacgaaatgaatcaaatcgaaatctgccatgctagatactcgtatctaacatacaaataaggaaatctcgcaacatattacgattatgtatatatataaaatgaatcaaatcgaaatctgacatgctagatactcaaataacatataagtaagataatctcgcaacatattacgagtatctaacatacaagtaaggaaatctcgcaacatattacgattatatatgaaaaaaaagagtgaattgcactttgggccggttattattgcctgtgttttattttggactaggttatatctaacgttttcactttggtctaggttttcttgccttatattgcacattggaccacttttttgtttgccactccttgatttcattagcgagcttacctgcaacacaataaaccaatcattattccacatgaccttgatttctttactcattgatttagctgcttgacttctaccattttttcccttaatttatcatgtgagcttggaacaagtcactgtattgagcttgcaagcgacagctacagcagccagctaccaccaggcttgattttgctggttcctcaagctcgggaacagagcagagagagaaggaaccctggtgctttgcttgatcatccctcagatccatggcgcggctgcttaatagagaaaaggagggaagattgatggagaagaagggtggtctaatttaaaacttctgtaaatttatctaatccaaagtgatgaagataacttcaccccttgtccaaagtgaaactttggtaaaaattcctagcccaaagtgcaattaactcaaaaaaaatgatgttgaaatctgacatgctagatactcaaatctaacatataaataaggaaatcttgcaaaatattacgattatatatgaaaaaaatgaatcaaatcgaaatctgacgtgctagatactcaaatctaacatattacgattaaatatgaaaaaaatgatatgaaaaagatgttgaaatctgacatgctagatactcaaatctaacatataaataaggaaatctcgcaacatattacgattatatatgaaaaaaaatgaatcaaatcgaaatctgatactcaaatctaacatataaataaggaaatctcgcaacatattacggttatatatgaaaaaaaatgaatcaaatcgaaatctgacgtgctagatactcaaatctaacatattacgattaaatatgaaaaaaatgtgttgagagtgggatttgaacccacgccctttcggactagaaccttaatctggcgccttagaccaactcggccatctcaaccgttggtaggattatcggtgaaattaaattttataacaaaaaatctcctcctttctgaaaaaaaaacttgcgctgcgttccccactcccgactccccacccagtccccactcaccagcccgtccgttgagtagtcgaagaatcccaaaccctctcctccttccatggcgatttgacccccaaaccctagcaatgccctagactaggactagtaggtagcggaaggaagctggaatcggaaggaaggaaggaaggtgggagggatgggttcgaaatcgaacacggagagggcgaggaaggcgctggaggccatgaagcagctgggtttctccaagaaggaggccacccctgtcctcaagaacctcctcaggctcttcggcaacaactgggagcccatcgaggacgagtgctaccgcgccctcgccgacgccatcctcgaccgccaccaggtgtccttgtcgccaaagccctcctctttttttttggtttacatttcgattcgacttacttagccgctggggttcttcaggagaccgcagctgaccgcggctgcagcgcgacaaggccaacgccggacgatgatcatcacccccttaccctctgtggtgcttcgcgcgacgtggatactgagaccgacgaacctcgcaccaagaagcctagggccaccaactcagatcctcaatcgcctccatcccttacggacgaccaagatgttcctgcagctatctcacccccatcccatggtgcttctcctcaattccgtccacagaccagggcctctgcacgactgcgccaagcttctccttcttctgttacagcagcacacaagaggccaagacagatgatggatgaagatttccaagactctgcattcctcagggaacccaagcctgagcccgatatcgatatggacgccatacaaggcactgctgctacatcagactgcccaaatgcccaccttggcctcattgactatccgctcaatgccagctcctcaagggttgcacttcctctggcattgcttccacctgatcaaaatgttccacagatttcaggttcgcctacaaaattttaattgattcatccatttgttgtcatgccgtggataatagggtaccataggtgttcatcacttccattattagattacggcattttgctgtttgctggattggcatt

SEQ ID NO: 21300 - DNA, 1844 bp, Oryza sativa
gctcttttgggtgaaggtcaggtaatcagcctcgttgtttggctcacgcaagattgacaatgatgtttccacacaatctttctctctgtgtgtggcaactggcaaggacttccttgtgcacattggctatcgttccatccagagcgaggctttctagcttttaccgaacggctggcctttgcttagctaggctataactgtgctagccacctagctgttttaagaaaaagatgtagcctactatcttaagaacacatctttttcattcagttggttactcctctagtcctcttaaagccctagactaaaatatgccatatgcctttccatatattttctttggcacaatttagaatcttctagccttcaaaaactctgctggtaacaggttgcaacctttgtttgatatcttagcgtgataattttttaggggacgtctccaatagtttgatcaaacacatcttttggtcattttattgcattcagtatgcttagtctggttggactcatttaacctatgaactttatacaggtcctaaaaaaagggcaattcaaccttgtagcaaggtgaacacgggggaaggatcttcagtcattgatgtagcatcatccactatgggtgaggtcaaaatgtcactgaaatgcagtgttgacccaaagttccgcatgccttccttagaagcagttttcaagatggtggaggataaatatcttcactcatacaagattctgcctcctgagttttccattggtagcctcatgaatgagatatgccaatgtgttgtacaactgggtagtgatcatattgcagaacataatacagaatcagatgttgctggcaatgggagatgctcacaaaatgagccaatgacaggtagcattccatttgtgaagccaatagcatgcgaggatggtggaaataggaaatgtaaatctgcaggagaatcatttattgtggaagactcagaaaattcaagtgttgctaaacagcagactcatttggcacttgccaacttgaagcctatccatgatgtaactgatatatccaagggagaagagagagtgaggatatcggtggccaatgaatttgcaagtgagaaatgtcctccttccttttattatatacgaggaaaccttgttttccaaaatgcttatgtcaacatctccgttgcaagaattggtgatgaagattgttgtgctgattgctttggcaactgcttgtctgcacctataccatgtgcttgcacaagagaaaccgggggcgaatatgtgtatacaccagaaggtctggttaggacaccattccttgatgaatgtgtttctatgaatcgtttcccagaaaaatgtcacaagttcttctgtaaatcatcctgcccactcgagagatctaggaatgaagcttcaccagagccttgcagaggacatcttgctaggaaatttatcaaggaatgctggagtaaatgtggttgtaacatgcaatgtggtaaccgtgtggttcaacgtggcatcacatgcaatctgcaggtaatatttaatgcctttgacttgtattggtatttatgctatatttgtcattggcagtgtgcagattatactaatgccgaatgtttgaattactgtcaattcgaacgtccaggtatttttcacaggagaagggaagggttggggtcttcgcactcttgatgaactgccaaaaggagcctttgtttgtgaatatgttggggaagtactaactagtacagaactgcatgaaaggacacttcaaaacatgaacaatggtaggcatacctaccctgttctcttggatgctgattggggttctgaaggtgtgttgaaagatgaag

SEQ ID NO: 21301 - DNA, 688 bp, Oryza sativa
tttcttttctgaaatcctagagacgatactgccatatcatatccgtcagaaaatgacagagaatgtgtctgaatcttctgacaggacggtgctgttcggggagtacaactgcaaagggccaggggcgagcacgaagcagagggtgccgtggtcgcggacgctcacctacgacgaggcgcggccgttcatcggccggagcttcatcaacggcgagcagtggctccggctgtagatcatcgccgattcttcacaagttcagaaagttcagactgctgctggttccttctccactgcagtctgcagatagaacatgtacctagtagatataatagctgacatgtaacgatgtaccatgtaacaaactttgacatacatccatatgtagtgagatgagcagccccatcatttcacttatctttatgcttattcgtatcgcctattattagcaaacaaaaagtaatttataggtaaaatttaatgatacaaaagcaaaatgttgtaaaataaaccacgatgaaaccataaaatcaacttcaaagattgagttttatagaattcaaagtttgcgatataatgggaccggagatttgttagaccagccaatcatagcagatgagagtttgcatgtgtaaaggaactaggtaatgcatcatatgaatgtgacatgctgtgccagggacatcagggg

SEQ ID NO: 21302 - DNA, 12192 bp, Oryza sativa
  unsure (1)..(12192): unsure at all n locations
cggagcacatgcgacacggtagttcaactacacacattaaaactaatacaaaatggcccaaaaaaattatataccgtagttgtagccctaccaacatcaacatgaactatccatgccaatccctaaatattcacaatgcatcccacctaccaatttcacccatgccaaaatattacaaaagttgcaaaatcaacgtgaatcgcccctaccaacatagagatggaagtataattcacagcgcatcccgagccacatttgacaaatgacaaaccacggttttaataaagaaaatagtcagcatacatgggcaaatatttggaaaattaggcttttcggaggatgtttaccttggatcaatctccaatgcaatgcccacgaaatccccttcgattttggggtgaatttgaggagatttgtgaaggggaggagagagtgccctaggctcgactatccctagccggagaaaggggtgggaaggaagaaaatagcggtttggcaagcacggccgtgctcagcctaggtgtcctagctcagtgctaacgggcatggtgctgaggttggggactcgccgtcaagacggttggcgatgaagtcctgccacgtcagcaagaggatcaacttcgatgaaatctgggcagcgggtcagcgtcaacggacctacgctgtcacgcccagaaattcactagtaatttccgaactaatttgtgcataaaatcctcgtccaggaatcagccgaggtacacaaattgacaatttaatatacaaattcatcgtaataatgacgttacatacttacaaaagaaaagagaaaacaacggcggaattacggtctagcgaagctccggctccactcccacaggcagctcaactggggtataagccaaacgtcttctcctgtgcgacttttcttcaaaagaggtttgattgattattgcaaggtgagtacatggaatactccgcaagccacacagcaaatatgcaagtgcacaaggataccaaagaatggcataatttagggctcatttgcaaaagcagcatttaacaaatatttgaaaattgtaaaacagtagagtaactaatcatcaatattaatcaacactgaacaacacacccatgctgcacaggcccaactatcctgaataaccatatctggctgtacagatctatctccaaaccaggaatgtaccattccaaactaggagctaaattaattactatcaattaccacattattattaatgagtagtgtgggactaatcacaaaagtcattgttagatcctcctataaccgcgggcacggctattcgaatagttttactctggccagatgtgtaccactgtacccacaagacacaactccacaatatgtcaccatatcatcatgtgcccatactgaacatgtcaccatttgtgtagttgtgacaagacccctcacatagctcaactcaaagcagcgcacctttcctggatcataatcaccccccccccccgtgggcttatctccgccacttctcagtatggcacaccataatgagccttgctatacaaagtgtccagccgttgcccattttggcttgtggttggcacggttaatgtttcacaaccgaagctcgtgaaccggtccttaattgtcatgagcacgaccatcaaaactatgtgctcacaacccaccattatcaagttttagttggcaaattaattaattaaccaatcacgattagccatcatgagctatgattaaatatccatcattaagtaatagtgaaacattagttatcccaattgtgtgctaatgtttctaagcatggctaagcaattatatctaatatatctagttgaaccaatatataaatccaactagtcaaattataacccgaggtaatcaagaaatagagtgatcaatgcaaattggccataacaaaggaacaggttcacaccacccggtgacattcaaaaataaatgcacagttgaaataaatagagaatttaaatataggatcaacatgctcaaaggaattgtgtttgggatatgtgtgacttgccttgcaataaagggtcttcaattaatcttcttgaatacttccggcgcactcgcgaacctttgaaacgacggaaacgacaagctaacacacaaaacgaggaaaaagactaataaaaaccaaataaacagtacacataaagtaaaaaaaaacatgtagatcatgattttagatgaattatgagacttgaacggcctcattccgacttcatatgaattgattaccaattttacaagattaaatctaattaaagcctatttaaaaaggattaaacaaatttaacacaatttatggataattttaatatatagatctttattttataaaacttttgcaacttgaaccacattaaaccgagttacaatgaattagttatgaatttctaaagattaaaccgcattaaagcatttatatgggttttaattgaattatgacgcaataaagaattattttgaaaataaaaagggatttattgcgtcatcaaagacggtccacagtaaaccgggttcacagaagcggcccacggaaccaacggccaagatctaattgacctaaacttgaccgaatcggacggccgagaacgatccggtctaccacgggtctacggctaacatcagcaatgacatcagcgatgatgtcatcgccggcggcggctcggcaaacaatgctcgtcggcaaacgacggtgcaaacggaggacaccaacgcgtagagctcggctcggcgaactcaccagcgatttggacgatgacagacggcgacgatcgacgacggcaaagaggtcgaggcggcggtggtcttcgggtcgtcgatggcggcggcgctccggcagtcttcggcagaaacggaggacaggacgaggacggcggcgacctagcgaacctggcgatggccttcctgagcgacggcggcgactggagcagcggcgacacttggctggactcgcggcggcgacggcggcgcacgggctgacgcggaggcggcgctacaagcgacggcgggctagggcgaaggtggcggcgaaaagaggaggtcccgggggtcctcttataggggctaagaggcggcaatggaggcccatggccggcggcaaggagatggaaggtctagggttagggaatccgaatcaaaatcgaatccgagctttttccaaacaaaattagccgaagtttccaaaagagaaaaggaagaggagatcccgaggatcatttcccttctatcaatttgatcggagatggaaagcggcggctggatttggaaggggcatcggcggctgcgtgacatggctggggcggctggaggttgaagacaaccctgacaggtgggtcccacctgccagcggctgagagagaggcgggaggagaggtgcggcggactgggccggcttgggccgaaaggagggagagagagagacttgggccgactttcggcccaaagccaaaagagatatttaaaacctttttctatttaaattattcatgaaatgatattccgtttattaaaaatacttcctttgctcaaataaatcctagaaaaatctagtaactatagaaacaagagaagtatttaagaaaattttatctatctcacttttatattgagatttattaaattaaaattagatcttctcttttaggcttttaagatcatttctaataatttcttttaaacaacaatttataatttaaggattttttaaataagaaagtcatttaacataattatgattagatcattaatgattaattattaattaactaattgctgaaatattctttgtattactaaacttaggaattgagctttgaaaaatccgagaagattccaaagagtataattaatcctggagaatttaataaaaattaaatccagccatgctttatatttaggaaattttatttcccacatttaaattcacttgtaaattaatgaacatttaatataaattctattaataatttattaaataatttataaatcctaaaacggaaaatcaggctgtgacatacgctgaccgtaggacctcagcgtgaggtagttaacgttgaggtcgcgaatcattttttgttaaagttttctttatatggtttagtttctaaataagtattcgaaaagtaccaatttatcaattttttggtgcaacgtacctcagcctcatagtttggcgacaaaagtgtgtgcctagtgacactgacacacctggggtatgcatacaaggacaattagcatataataaaccactatcaagtcgtagttaaacacgatgacgattcatcatgcatgcacctgtgttattactagtactttactttaaataattagtcgctctcttatctctaatcctctcttccactttaaaataattgtcgctttagtttttgttttgtttgctgctatgcaacctagatggcggcaacagtgctgctatgctgctattttctaacaccctttacagctgcttcgcgccccagcaaacgacacgaattcatcccaaaaactaaactaagattaatttcgagtcaaacgtacgttagctcgatcccaactcgaaatatatattgttgtgctgcgattgcaatcgatcacgttcatgtctcctgttaattgacaaatgcaacatatatcgatccacgttgcaaaagaggcttcgttttaaaacttaaatagcgtttattcgtacatgtcatacgatattaattacgggcttacgtcgtgagatctatgagagcctagctgtacatatatattagctggcgcgggagagatctccaagatcttttgatcgtatcttgcacggttttaaatatgttatcgcaacatatattcgcgatgtcactgatgttcgatttttattttttattttttgtttaaaagaaaacaagagttgcaatctctccagtctctcctatgattagctgatgataatcattacagtacagatctgcttcgagatcgaggttctcccaagatttggctaattaaatcgtgaaagtttgcgctttagacctacctcggataagttatggcaaattttgtgcacgcacgcaatcgtgatccctttctgcctggcacttttgattagtttaatttaccagcgatcgcatggtaataaggctacttttcaaagataattaagctctgttcaacatgtttttgtccacactactccaaataaagtgcgcacattacaaaattaacagtcgacacgtttactggctaaaagatgaaaaccaacgtattggccgggttaatatctagcttctagaactagctagcaatactgaagttagttagtatttttgtgtaaaatgagttggtaaactattttgttcttcatctcgcacaagagcgacacatgttaatatattttaaaaaaaataaaaaagaaaagaatataccacacgtgcggatcaaacttgatactgtataaatgatctttcagaaattaaactgtctcaattgcacgcaatttacgcagaagccagggttgggacaactagggcttaagctctggatttaagctctataactaatcctatcagaatcttgataaatttatatagagattttggagacgaggaaggacatattatacgacctatttggaggagttttcggtagctacagctcctcctgaaaccaaaaggtcctcaaacggtccagctttttatgcaaattgtacgaacgaagttatatttatagaataaaaactgagttagaaaccaaaagtctcaaggttataactggctaggttcccaccagctaaataagacaactcaaccctacacgcgcgtaccttaattaacttgctagagaggaggaaggaggggggatacataagcttaaaatttagggttaattgaatccatgcaactgtaaatatgccaattcggaaaaataccattactatttagcatatcggctacgtgttactgaaaattggagaaattgtaaccgtaccactccatcacatttttcatcaaaaatctccgttagcccccaactgcacgtgggccccacctcccttccatctcttctcttttgatgaggacatcttccactattacctgctggcaaagacgcaaaagtcgggcggcgaccgtgtgagcctctgaataatcccacattgcttagcttgggaggagaaagccaccttaaaagggagagccacccttcccctattggactagtcttttagagagattgggcctttccccgagtgggtgtgcctaagaactgttgggatccaggcaaccttaagttattgggtctcggccaaccccacctgggctggattgttatcatctttccccttcctctctctccaccaccgtagatgcggcaagaggtgtcgtctccatcgtcgtctcaaagagggaggtcaggccgggctactcctgcgttgttgtcgtcgttgagcgcctcgtctcggagccggcaagccacgcggtatcccttaccgtacaaggaaagaggaggtggtggtggtgaaggcatcggcgacgacaagtacccatccttgccaccgtcgccgaggacctccatgatgcccggcagccggaggggtgcgccaccggcgccagcagcaaggaccccctcctcaataaatccattgctagtatgtcgctctaatggctcgcttcgccgtcgtcgctgccatcgtcaccctcctcgccgtcacggctgctgtgcaggccccgggagcggccctcatcccggcgctcaagatggccctgctgcctgctcccccaacgaggtccctggccaccgcccccatgccggtcgccacctcacccaccgccacgtcaccttcccccatggtgcctcctccgactccgcccactgacgccccagatgccaatgctccctccaccctcgccccgtccgtggtcacctccaccgcctctgcaccgaccggtgcccccgtgagctcctccgcgttcaccaccaccgacgctcccatcgtggggatggaggaagagatggggaagaaaaaagagggacaatgtaggaagatagaactgacatgtgggtcccacgtccaggaggctgacaaaaaacgtgatggagtggcacggttcgaattttctaaatttccagtggcacgtagccgatatgctaaatagtagtggtattttttcgaattggtatatttgcagtggcgtagatccaattaactataaaatttatctccaataagtcttatctaatgaggaaatgaaaaaaaatcttcagaattgacatttagggcatgtttagagagcttaaaattttaagcagcagctggttggtagccaatttttaagaatcattagaccaaaagtagaactgttttagggagcttgtgattttgggagaaactgcagcggttaaaaactctcccaaacaggtccttagtatgattttcatgctaacctaccccagtactacaattccgtggggtactacaattccttgtaacgcgctccctccgtttcaggttataaggttataagacgttttgacttgtgtcaaagtcaaactatttcaaatttaactaagtttatcgataaatatgataatatttataatactaaaatagtttcatcaaatcaataattgaatatatttttataataaatttatcttaagttaaaaatattactatatttttctacaaacttggtcaaacttaaagcagtttgacttttaccgaagtcaaaacgtcttataacctgaaattgagggagtagatgtgaatggtacacgggcttctatatatatatatgttacatctatctctctctatatatagtgtaggctaggtatatactccaatatgcgagtaattttacaatctttaaaaaggtaccatgaagtaattttagtgtaaaattttgtatctcatagtttttaggtataaagagatatcaaatttacaatataaaaaattgataagctcatattatcttcttagggaccgtaaaattacttccaatatatatatatatagcacaggaataaaatattgtactagacacaacgctgaacggggctcgtgccgtgccgtacgcacacgctgcggtgtcgcactggtagtgtacccccggcgcgtgaagcgttgacgtgcaccatggccatgcatcttttgacgcccttgatgtttttaaaacatatttgatcgttcgttttattaaaaaatttaaataattatgagttcttattctatcatttgatttattgttaaatatactactactattcaagtttttaaataatatttataaaaatttttaaataagatgaacggtcaaatatgtttaaaaatatcaacggcgttaaatattttgtaacggagggagtataatctagctagcacaagttaaagtgcataatattgttgcatgcaggggcacggccgagctcaatgcaaagtctgaaattaaccccccagcagcagcatggagtactgtatatgatatacgtaggctgcctgctaacgtgttgcccggacagcggggcgacccgtcgctgtccctccctccgatcccctcgcctcgtctcgtgtgctactacacaaaagcaacatacattaattgatacggaatacgtatatccttcctacttatcatttaattcattgttaaatatatttttatatatacttatagttttaaatattttataaaattttttaataagacgaaaggtcaaacatgttaaaaaaagttaacgacgccaaatatttaagtacgaagaaagtttatagcataaaaaactgaaactttttacattttaaaccttttcaaaaacttatttcgcaaaagacaaaaaaaaaacttatcttgaaaaaacttatctgtctacgcaagcctttttcgagcggtacttccgctagcaccgcagccgtacgtgcccacgcagttaattgctgcaagtgcgccactcatcctggcgccgtgtagagagaaggtggcgccagcggtgccggcgccttcccaatgtcacgtcagctggagggggccacgtgatgccatggtggtaggacggtgccagcgactatgatgtctcaaaaatgactatttttgaaataagtttttttaagtctatttacgaaataagttttttaaaagaaccaaattgtgaaaaaaactccgctacgtggtggggctggcttacgcacgtccaaacggccggccggccggccaggtggatcgagttacgtacgctacgtcaccaacgtacgtacgccacaagtggaaacggggtcacggggccggaaggaccgggtgaacactagtgctgccctaattccactgtctaatctaaaacggccaggaaacggaaatttaatgcatggagatcgtgttggattaattgaccacctatgcatatgtgtgtactacccgtttttccggagataaaaaaagcctgcactagtactactataggagtagctcgttaacgggacacgtacgtactcaaaggtaactcaacgagcgatcgacatgatacaaatcaagaaaggttgttatgaatgttttacagcggaaatgtgctgaaacacgcttatttggatgctagtttttctttaccacgtgtctgtccgcagcttaattggctcgttgaaaatacaaatcagttcgttgtagcttttgctatattaaaattcgagtttacccattatccagtaaatatgtactattaaacataaatacagctcaccatttagttatctcaaataaacggtactaggctatctattacaccatttcaacaaaacatcgatattctctctccgctttcttgttcctagctccatgtcaaaacaaattatacctaacaacctaagattatctttggacaataaatctaaacacataggtacgttggttgctacatattgaaacggagatagtaccatattcttataaatgctattgttatactaatatttgtgtcttagctaaaccaaaaaacacgatagcctttagtccaacaagagaaaagtggggactagagggtccaaggaaggagaactaccggtatgaaatggaggacatggttacacatatactccctccgtttcaaaatgtttgacaccgttgactttttcgtacgtgtttgaccattcgtcttattcaaaaaatttaagtaattatttattattttcgtatcatttgattcattgttaaatatactttcatgtacacatatagttttatatatttcacaaatttttttaataagacgaacggtcaaacatgtgcttaaaaagtcaacggtgtcaaacattctgaaacggagggagtatattgtatccaagatggaggtggattgagatcatctgtagtcgtaactatatatggctgcaacgtaaaactatgtatgtatgtttagccgttcattttaatgaccagtggtccatatttacagatactgtaatcaaactaaataattaccataacaatatttgttatagtgttttgtctaatctgtgatgtttgattcacattaaacggtagctgctacgactggataagttgcaatcagtactcagtactacgacttatccgaatccgatcgaggttcctggctagtttgcactaccgcgagagtaggatcatctagtaggtgtcatggggacccggaaggaatagtgttgttgacttgtagagattgaaagcgttggcatgataagatgggaaacactatatatatgtatcatggttgaagaaggttaactggagatagttgaaggagacgtacgtgagaatatacggagagtctgtattttagataaaggaagtttgtatggttcttaattaaacgaacaattacagaaaggtgatacagtaattattataagatcacttccaatttctatgtaactagatgtacagaacatataatatattatcattcataaagaacagacaggattaaaatatcatgtcctgggtacgggagctacaatcatgcaaactatctttcattctcgtacactaccaagccaacatttggactgcaatgaataccctaaaaacaattaatgtctccaatgaaggaccnnnnnnnnnnnnnnnnnnnnnnnnnntggtctaagcaataaaggtcgttagagcataggtttccaccccaaagagcaaattcttcgaactctagccatatcttcaataaggaagcaaaaccactatattgctatgaacaaccagctaagctctgagtggagattaatcaaaactcgatgtctagaaaccggtactcgataagcactacctaatcgggaatttgattagttttatgtgtacccctacaatagttacatgcttctagctacatatattcaatttaattacatattgcaaaagtgagtgtaactaaacttagtattcttgtggtgaatctagctagtacgcgcgtccacctgaattcaaatcctaatcttgatataggtgctcgatttacgggctaatattattttaatggtaggccggtgatgcatccgtcgacagcgagatatccataatgactttgttaatctcaaaatatgtcggtccgatctttcaaaggtggttatatgggtatggtgtacacgtatgtttataaacacgagtatatgttatgagtagttgtgtttgtactgtgttttatcagaaaagaaaattaattaattgcgtactgtgtggacacatacgggcgccagaggggggtagttactgtacctgacggccgtgcgtattgccgtaagcagcaggacgcgtacccaacgcatgcgtgccgcttgtatatcctatcctagttaattagctatagcatatacagacactggccggcctacgcatgaaggccacaggttggccggtgaagcaaatcgatccagcgcgcgcggtcacggcccgggctggtaggacgaaagcgaaagtgccgtacgcccgcgccacgtatatatatacccatgcaacatccattatggcgaatgcatgagtaattaggttaattataacactcataatgagtcttaattagtgcctagtgttacttaagtactacttaaacataactaaggacttgtttggatccttcgggctattaaataactctccggaatcttgctatttaggattattaaacgtagattatcgacaaaaccgattccataacccctaggctat

SEQ ID NO: 21303 - DNA, 4478 bp, Oryza sativa
attcccccccggagttcaccacgccccggggcacggatcggttctgggccccttttggcgattttagccgacccgagcccccgagagtaggattgagcacgggtgacctatttcaagtcaagattcttcaaaaggaaacaaaagcatagacacagcctttaggaaatcgaaaatgcttttattgaaatacggaagagaaaaaaaaagaaaagcccccggccaaccctgcacgcccgaggggggtgcggggttggcccgagccaaaacctgacactcgacccccccctcaggggtagaagcgacgaaggtgttcgatattccacgggttaggcagctccgtgccgtcgcccgtggccagccgaacggagcccggccgggggacgccgatcactcgatacggatcctcccacattggtgagagcttgctcaatccagcacgcgtttggacgcggcgtaggacgaggtcgtcgacgtagagtgatcgggcccggacgtggcgctgatggtagcgccgcaggctctgctggtagcgcgcggctcgaagggccgcgcgccgccttcgctcttccaagtagccgaggtcagggggcgtcggcttccttctttttgtcgctcgcaggcctcccctttcgggtggcccgcggagcgccctcgacggcgaggacatgaccctcgtcgtcggtatgggctgacctcttcttcctcctcctgtcacgccgccctgtctgagcggcggatccgggggcggccgaagctgccactccggaaccggaggagttccaggtccaggcctcctccttgcgagccactcggtccgcgagctgaaaaagctctgcggtagtctggggctctttggaggcgatcttttcgagcatgcggttgtgccgcacaccccccctgaacgcgtagatcaccgcgtgtgcagggatgcatggtatggtattgcggacttggcaaaaccgctgaatgtacgagcgaagtgactcatcatcccctcgctgtaccgcgtgcaagtccgcttcttcgcctgggcgcggataagtgccttgaaagttcatagtgaactgtggcataaatcctcccaagagtggaccgacgcaggtggcaggttcactagccaaccccgcgcctgtcccttcagggccatgggaaagaaattcgccatgaccctgtcatcacccccagcggcctcaatcccagtcgtatagacctggagaaactcggtggggttgacgctcccgtcatacttctcagtgatggtgggccggaaccttgggggccaacggacattccgaagactcgccacaaaggctctacagctgacaccaccagccgggggcacggagggctggtcctcacgtccatgtcgaggtgacactctggacgaagaggcgccctccgttgcgcggggagtacgccggctattacgccggcgctcgatgtcgaggcgagcatccggctctccatgctgatcctcccgagtcggaggtgccgacgagggagtggcagccgaatggcgtgcaacagccgccgctcgccgcgccctccgccttgacgacacggagccggtagtggcggcgccggaggtcttggtggtggcggaccgtccaccagcacccaggcgctgctgtgccgtcatgaccaagttggccacgtcgtctagccatcgctgggctggagactccgggtcagggacgacgggcgggtgacgtaggagcgcgccaacagcctgaagcgcgccctgaggcgtgctgccgtcgccgtagacgaggaggcgacgctccccatctcgccgttctcctgcatcacccgcgactggcgatgctgcggatttttcgaccctctcgagcgcctccccctgcttaggattttggtgtggaggaggtgggggagtacgagctcgacggcgtgggtttggctccccgtcgtcgccgctcacactcggagagaggtcgtgcacctttgcttgctcggccattaggctgaacaagaaaaacttggcgcacacggaggagtacgagagctcagaaaacacacgctgagccccctacctggcgcgccagatgacggagctcgtggctcctcaccgggagaccgcgcaggcccccctttgccagttcggccgggggcttagggtgaaatctcaagctctctcggtatgtggaaagatcgcgagctaggaagaaacgcgagacacgggcgatgtatacaggttcgggccgctgagaagcgtaataccctactcctgtgttttggtggatctgtgtatgagggagctacaaagtgtgagccaacctctcacttgttctaagttccgaatctggaaaagatcatccccctttccctatgggcaaggtcctccttttatacttcaaggggataccacatgcacccctctctttccaaactggacttttcttctcttcataaatggacggagatttgcacggttgtcctccgaacatccttctgacgggacggcacacacctacctccacttctgccgaaggcaggcgcgtcgtgggaacgtggctgtctgccgacgacatgaccagtgtcagaccggtcattcttgtcctccacgcgtcagttcaacaatctgcatgttcgcccttcttcatacaacatataggctgtaatggttgggatggagcctggtataaatctaaccagggctaacgtgccatctctaagagattacacgctagctctggcttgagacgagtgcctagaggctttcgtcttgacgggatggggcaaggcgtgcgtcagaccgccagtcgccacctaacccgtgatctgaccggtctgtgaccggtcacagaccggataaaggaacgcgctgcactgcgctgcatgcagcgtgacacgcttgaccagacttacaataaatgcggttaggtgagcactgccgtgttcacctatcccatatatgtggcgcaaacttcctcgaggggtcggggtgcctcggccctcggggccggggcaggagtaacccgaccccccctcgggggaaatcaggaggagggcggacacctcaccctcgggcccgacgtccccgaaggtgccaggccgcatgggcgattgtgtctgcctcaagcctctggtcacgatactcccggtcccatatcaccgacagtagcccccggcgttatgccagggcgatcgcccttctcaagggaagcggtcgggcgtgacgccactcctaaggcctggtgacaggtggggccggtctctacagttgccgtcgaactacatcacccagtgggcggtgtgaggcagctgcgatgggcccaagctggcctcgggggttgagacggtctctggagccggggtccactctgccacaaaatcggcgagggcctggctcttgatagcgtggcgtggttcaaagtgcagatcgaactcagaaagctcgattgcccattttaccactcgtcctgtaccctctcgattatgcaagatttgaccgagggggtaagacgtaatcacagtgacccgatgcgcctggaaataatggcgcagtttcctcgaggccatcagaatagcgtaaagcatcctctgggcctgagggtatcgggtcttggcgtcccggagggcctcactaacaaagtagacaggccgctgcacctttcggcggggccgatcctcttcgccaggggccgcatccccggggcgttcttcgtccaagtggcctctcggggcgcactcgtcttctgtgccgatgacctcggggtcggaggatggcaggagcggccttcccacagtggcctcggggccgtcctgggggtcgggggctcctggcgtcgtcggacaagcgggcaaagggccaactccggtcgtcaggggccttaggccaccgttcggctcgggggcctcttctccctgctctctcccggacagaatcccagcggtcgcacattacgcgcatcggcaagagaaaaccaaccgaaaataatgagcggccgctgggctcgtgtttgccttcaactccgacgaggaatgcggtgacgatggtacggacgaccgcgacggctaggccggctacccgggcgcgtcagagtgagcccccaggcccccttcttgtatagactgatttaatctgcaatcaaaagaggaaatttctatgtcaaatctatttgttgtgtgtatgagacgaggatggtctgtgccgcggtccttctgtgtcttagcttgaagtagggctcgtgcccaggtcccagcctcagatggcgcgggtcgaggctagtgcctggggagatccacatgtcgagactggccaggccgggagcgtggtgaccgagggttatgggtgacccgattgtgggtttttgccgattcccccccggagttcaccacgccccggggcacggctcggttctgggccccttttggcgattttagccgacccgagcccccgagagtaggattgagcacgggtgacctatttcaagtcaagattcttcaaaaggaaacaa

SEQ ID NO: 21304 - DNA, 9426 bp, Oryza sativa
  unsure (1)..(9426): unsure at all n locations
gaccccccctcgggggaaatcaggaggagggcggacacctcaccctcgggcccgacgtccccgaaggtgccaggccgcatgggcgattgtgtctgcctcaagcctctggtcacgatactcccggtcccatatcaccgacacaagctaatgattttgggggcaacattcgggtccccactggcatcctgaccgtgcttattaagcattttttccctggcattgtcaagtttaaaggaagagatgagccagcatggagttggaaacattacaggattgcaccagacgatccagaaagcgctgtactgaatcgcttgccaagccgtctccatcgtgttgaggaagatttctgggtttgttttagagcattaccttctccaatatgaagtacactatgcattttattgtgtcttcagttttcatagtttacggccaatttgtactgtacaatagtaaagtatcttaataccacacttttcaatgtcaagcaggctaactttttgtagttgcagctttactttaggtgggcagagggaatggaacaagctgctagaaaggttgtccgcaattgtatcaagcgccttttttcggacctgatttatgaaactcgtatcatggccgtgctcaattaccaaaggaagatcttaaaggtagaaacttctcgggatattgcttgcaggacatatctaatagaggaagagtacctacaggtgctatggttgttcattgataatttgttgtcatctactgatcatattagtaattaataaatctgtgcttctcctataggtagaaccatggtggttcctaaaggcaaaaaatgcgtggcgggagttgatacgattgaagtggtgtaatcctgaatggtaggctagctcacatgctcatangatacggagggagaaaatgacatggccatctcaccgccaaggcagtgctaacttgagtcgtttccaaaaaaatttggtatgtgcatctatgttgaaacatgtagcagatcatgcacagcagatcatggtataatatatatggtacccatgttctgttttaggagaagagaaaaggcaggtagtgtctcaaatggaggcctacacagaaggaaggggggaatatggagaggatggacgattcagatgtaacacacatgtaactgggaagcttgtaattgctgaatatttagtggtagtttatcatttgtgcatgagtactaatacactatttgatctgactgtaggaggcctataatgaagcttatgttcagctgcatggagcaggaagtgattggcgcaattctcccattgatccaatggctgtgcacatggctggtggtggaaagaaacatggtcgattcatgatcggtgatgggctcattgactcatcagcaatctttggtgacagttcacttgatgatccacgtcctcgcagaagactgcgaacaaatcttgacaacacaaaccaaattgaagaccttgagcggcaactacaagaggagcgcgaggcaagggaacgagagcgtgaagaaagggagcgtgagaaggagagggagcggcaggagcgggagcaggagaaagagcgtgagtgtgaagagagggcacgggagaaggagcaggatagaaaggagagggagctggagcgcaaggaaagggagttggaaaagatagcgtttgaacagaaatcatcgttctttgaagttgctttaagagtaagtggttatgggatccatctagtagtgttttcattatttgagggcttgaattctgtgatggtcgcactaactagtgtacatgtgaaatggattgcaggctatacaacttaagctgaacattgacttaccttcagcctcaggtcctcctcccttgcctgtcatgttgactaacccagtaagtatttgatacatggtagtgtaggtgtgcatgaagtaattgttccccatataacttatgaggactaatattaaccattttgtttgtaacataaaacaggctttgtccgtatcttcggctctgaatggaaactcattttgtgctgaccatggaggggctgctattgtttctggtgcaattttgatggttcagcttgacgcagcgagcgcaatctgaagataattatgactttgctactgctggaaagaatggactagttctacatgcctggaacatgtggatgtgttttgtaattaaactgacctagatggtcatggccatgaacctgagtagctgttggttgtggctgttgcctttagtcttttgttcttagttatatacgtttactttcctaaggggttgcatgaacctgagtccatattcggactctagtagctatttcggtgtgcatgttgccttaggtacttttggtcatagatgttactgtgctctggagtttgtgaactggaagtttggtacttttggttggaaatgttggcattcagtggaacttatcaacttggaacttatgtggtgtggcagtggccactgtccagatataactcacgcgttcagcaaaactgatgactgatattatttcatattttggagtgaatgtctggcaacttatggaagggtcgcacaaattagtaacaaactaattgtgtttgttcattgtcaaccaaattatcactcaacgatgtttatatattatgaatgctttcaaattaatgccatatgaaaattttttaaataggagtcccaatctcaacagcatgacaacaagctgatatcttttttagttgaaagttagaaatgttcattgtttaaaaacattttaagacataaagctgaacatttcctaagaaaaacaggtttgaatatttggatagcttttagaaaaattaaagataaacgaaagttttctcttgaaatgtacgcaaataaattctgagatagacctctgaacaacacttttaatcaaaattataaatttgaataaatttgattaaattaattgaagaaataaattcttattatatacaacaaaccaaagtttaattcttaacgaagttaaaaaggaaatagtttttgtttagcaaaggcacttaatgcaaggatcaatcaaaatttagttcaaaagttctacaaatcataacagaatcaaaggaattgttaactaattttaataacacgcactccctccgattcatattatatctcgctttgactattttgtagtcaattttttaggtgttgaataagtttgtagaaaaatttagctacatctacaaaaacaaatttgtttgataatatgttggttttatgtaaaaaaatgttgctatgttttttataatcttattcaaaacttaactactttttttaatcacctcatatttttctcattgtcacacgggtcgtcctgcgtgacgcggtccttacggtgcgccgggtggtgaaggcgaggacgggacgggcgtcagacaggtggacgaggtgccgcggcgagggagatgggttgcgcggcgagggcagagcttgcgtccacggcgtccacggcgaggaaccggatggtgttcaccgactgctccaccgccgccggctgctgcgcgtggagggcagtcggccgtcggcggccgacggcaaggcatttttgacatgaaacaatggcgacgttcgcattcccgactacgtccgttcctcttcttcttccttggttaaggccaagtaggcagaggacgagcgggcacgcggcatcaatctttagaatatgagtggaagcgaaaatcatggaatttagatgaaagcatgttcattttgctagtttaaaaaaattgaccaacaaaaagtcaagacgagtaatataaaacatagtgagtattttttttagctatttcacattgtattgggaccaaacgaaatttagtacaaaatttcagtttgcaatccacatgtaaatagttcagttcgaaatttagttcaaaattttggtttatcaaaggcaaatatatttagtttagaattccacaccaaatacagatttgtagagaaaaaaggacgaacagggtagtttgcattcctaatcttatcgtgtgttttggttagaaaacaatacagtaacgctcgtggtccacatgtcagaaatacatcgcggcaaaattctcgcaagcgcgcggcaaggtcgccaaaaatctggtgggtgtggctaggtcaccaaaatccccaatctctctatccacctctcatcccaatcaacccaccacatcgcgccgccgtccaaggccgccgccgccgcgccgcgtcccatccaaggccgccgccgccgcgccacgtcccgtcaaggcgaaaccgccgtgccgcagccagtccaggccgccgccaccgcgcaccctatccaagcccacgacgtcgccccgcgcccatccatttgctgtcggtcgagtacgagaccccagcccgcatgcgcaccaccgtgccggcgccaccagtcgccacgcacggcagaggattggctgctcttccagcaaccctccctaggactgattcgtctcaggtgctgttgtcttgctcccggaatcctcattcggccttcaagtttcatcatctttttgattagtgaccagttctagaatttactagtcaggttgcggttgtactaagggattgcagaactaggttgttatgccatgtgaaagtttgtgtgattgatgatctgaactaatgtttgatattttatttctcagtcatacaaactaaactaggcctttcttattcttgaacctttcatgaatagaaggacatttcctaacataaatttattctgtcactttgtcataactaagtacaatggaaactgatcgcagttggatgtacaagggccgttgaaagcgtggcgaggttaccgctgagtggatatcaaagactacataatttcttgacaaggcattcagcagggagacaggacgtgctggtgtgttgtgtccatgtaactactgcaacaacacacgtcctcaaacaagagatatgatgatgaaacacctttgcaaatttggtttcaggccagcatatactgtgtgggtgtatcatggtgagacatatcctgcacgtgaaagcgatatatgccaaagcactgaagatgaagatagggtggcagagattgatcggatggatgagatgatagatgatgtccatgatgattatgtctcagttgaggaggaagatccagagcctacagcgcaagctttttttcaaatgctgtctgcagcaactcaacctctccacgaacacacacaggtatcacaacttgatgctatcacacgactactagctgtcaagtctcaatatgctatatcaattgctggatttgatgcacttttaaatgtgatatgtgctctcctcccacaagggcacaaactaccagcaaacttgtatgaggcaaagaaagttcttagtgcattgaacatgccatatgagaagatagatgcatgccctaaaaattgcatgctctttaggaaagagaatacgcagaagacacactgtgataattgtggagagagtaggtatgtggaggttgaagacagtaatggtcacaagaaacaattaactgttgccaagaaggtacttcgttatcttccattcatcccaagaattcagcggctgtacatgtctgaatcgcaggccaagcaaatgacatggcacaagaatggtcatcggtaccatactgacaagattgtacacccagctgatggtgaagcctggaagaaatttgatagggacttcacaggcttttcaatggaagcccgcaatgttagaatagcaatagcaacagacgggttctgtccatttggtatgggttcttcttcgtacacttgctggcctatgtttgtcattcctttaaaccttccacctggtgtttgcatgcgccagcacatcatgttccttaccttgataattcctgggccaaattatcctagcaaacacattagtgtattcatggaatccttagttgatgaacttatacatgcttggcagcaaggtgtgttgacatatgatcgtgccaccaagacgaatttcatcatgcgagtctcatttctttattctatccatgaccttccagcatatggtatattttccggttggtgtgtgcatggaaagatgccatgcccaacatgtatggaggcactccaaggaaaaaggttgaagtttggtggaaagtactcattctttgattgtcatcgccagttcctcccaattgatcatagctttagaagtgattcaaattcttttctatcaaacactacagttagcaatgaaccacctcttcgtctctcaggtcaagagatccgtgcccggttagataaccttgtccctgctgctaatggagataagtttgtaggctatggcaaggatcaccattggacacatatatttagtttgtagagactcccgtactttcacaaactagtacttcctcataacatcgatgtcatgcacaatgaaaagaatgtcgctgaggcaattttcaatacttgctttgacattccagaccaaacgaaggacaatgtcaaggctcgccttgatcaagcagcactttgtaacagacctgaattgaacctcggccacatgcatgcgtgtagtgagtgggttaagccgagagctgactctcgcttgaatagagctcataagaaggaattatttcaatggcatcacatattgacattccctgctggctatggattgaacctagagagacgtgtgaattcgtacaccatgcggatcaatgggttaaaaggccatgattaccacattatgatggaacgtttctttccagtgctgttccgtggatacttgccaactcatgtgtgggaagtgttggcagaggtaagcttcttttatcgcaaactttgcgcaaaacagtttgatcctatatagatggcaaacatgcagtctcaagtaattgttttggtttgcaaattagaaaagatctttccacttggattttttaatccaatgcaacacttaatgatccacttaccatatgaagctagcatgggtggacctgtgcaatttagatggaattaccccattgaaagaggccaaaagtatcttaagagcaaggttagaaaccgagcacgtgttgaagcatccatagcagaggcttacatactagatgaaatctcaaacttcacatccatatactttgctaatcaagtgcagacaattcacaatcctgttcctcgatacaatgttgctactcagtctattgattgttccctaaatctattctttattaggggggattctactagccgtggagtccctcgacacctaactcgtgaagagtggaatgctgccatgttgtatgtgcttacaaaccttactgaagtggatgactacattgggtatgaactatgaaattgatatgagttacttctagttcatagctgcatataattttactttaaatcattgtgtgcatttttatcttgcaggaaattcatagatgaggaatggactagacgaggtatcccaacaaggcaacaacaagagaatatcttacggaatggtgctgggagagatcgtcctaatttcgtatcttggttctatcaacaagtaatttctttagcccagactttacttatattatacacttagctatgcatatcctttcagatcagattaggaaatctatctagcttagttcgatgtaatatcttgcatgtgtatacatactttcctaactgttgaacattaagttctttcatgaatgttcctgcaacctaggtaatccccatcaaaccaataaagtattactgctaaaactctaaatttggtgacttcttatatcagtgctataaatttggtcctacaacagtaaagcacatttggattagtgcaagttcctagtatgcatctgcctttttcatagtacaatccgagttaatttttttacaagcattatgaaaatagtactgaacatgtatgtacatgtcattaatatggagacacttctcaattgatcatctgttaggtcggaaatctggaaagaataaaatcattgccaatttctactaacaaaaagaacctagccaattaataacttgataacttcagttttgaaattcgatacctcaataatcaatagtgccttcttccattttctttttgttttcattagtttgcagtttaacacctgttaattgcatttgtgtcaataacctaataatacttgtgtttttctataacataaccttcaatattgccataatagaacattatgccacaatttattgacacattatttcctttcatttcactgctagagtatgtttagacgaaactatgagtgatgatttgagacaagtaactaaaggatgccacactcgagtcttgcaatataatatgtatgatgtgaatgggtatcgattccgaacacacaaatatgaacatgagaggccaaatgcaactacaataaatagtggtttggtgactataggatagggagaaaatagtgacacaactgagtattatggtacatcaaagaaatagtagaaatcagctttgatggcagaaaacctctcacacttgtgctcttcaattgccattggtttgacccaagcaaagtgaggatacaccaagatatggtctggttgaggttgctcatgcgtcaatccttccaaaattcgaaccatttgttttgtctcatcaagcgacacaggtgtattacatgccgacccatgtaaatttgtgcaagacctcactaattggtgggttgtgtataaggtgcagccaattggtagactacaagtacccaatgatcaagattacaattctgttcctaatagcaatgttgtccactatttccaagaagatggtctgtttggcagttttgtaatcgatcttggtcaagaactcaacaatgatcctgagcaagttgccatcagcagggatactgaagatatttgcaatgacaaggacttgaagcttctcaatggatcatctattcaagatgaagatgatgatgacgaggatgatgaatcttattgcacttcctcatctgctgaagatgatgaagttcccactagtagggatatcttatttgacgaatatttctaaggtacattattcttttttttatggagactataatgccaattttttatatcctgtgcctccccaaatgaatatttcctttgtcaactatgcacaagaattaatctttcataaactggttgcgtgctgtaataatatttggcagtcatcttactttcgtaaaatttcaggcatacaattggatcattgcaaaggattgcagttgattggtgctgtcaatacacaaatttggagttggttactcactagcctctaacatttctctattgcctccctaggagaggttgcaagaactgagactcaccttgttactattgcattatagccacttcagacaaccattgatattgggtttttgtatcattggattcaaaaattaatactgggataatat

SEQ ID NO: 21305 - DNA, 9506 bp, Oryza sativa
attcctgcagccctccgttccgtgcatgacgtgccgttaactggaaagttaccggcagggtgttttcacacggtaagctttcagcacatcctgagttcgcaagcagtttctcacgggtagagtgacacggtaaaggtgaaaggctgccgagtacaccttcccgagagtttgctcacaagaacgacgttaccgtgagttttagccctgttaccgagttgtttaggcacacggtagacttccgttccctggtagtgcaactaccttcttttaaatagatatataaaactctcgaataactcaatgcccatgtaatcgatcatgtatacgttgcttttttttgtggaaagaagatagtaccttatttagggagaagcgaattataccaactctaacgtcccaaattaatttatcttcttaaatatttcgcagataatttcagtgttaaatgaaaaatggctgcttccattgtgagaatcattaaagtgagtcgtatgctgtatgcatgggatgagccaaaatccctttcatgtgtccagccgactatgaatattatagagacccttcaattcaaattgcatgcctccttggtaacaagccgcaccacatgcatcgatatatcgtttttgcgtagttggccggggtgggaattgtagcatgccgactttttggggcattaatacaagatatatctagcttagttttaacaaaaaaaaacaatagcaaaattatcctagaaagtaatgtgcaaacaataatattcaagggacaatgagctgttgttgactttgttagggatcgatcattctggcgagtatattccagggatagttaattttgtcaaaaagattccatttaaatcttatgagaaattttacggactaaaaatattggtgcctcaaggtatacagtatctggataattttactttataaaatatcatatgttatttcacaacgttatcaaaatctttgtgatggtagccatgaaaataaacaagttaaattggatagagtgtttatttaccagcctcaggttcatgcgcaattttagtttacgtgcttttgcttatacgaacgttgcacccaccgtagtagttctgttcggcacgaccgagtttgcgaaaaatgctggaatgtacaattcaaccgtggtgttgttttgtggagttcctttttttttctaatcaatagtgcaatttttgttttaaaagaaatcagcactttatttaatactttctccgtcataaaatataaaggattttgattttgggttttggttttggtttacgctagtcttgtgtaactagttgctggaaaaatgctgatagccggtgcaacattttcgcaagggaaactggaaactttttgagttacggctgacacataagagtagtggagtgtcgttgactaactcgatggtcaccaagcagatggcatatgtcggagcaaggtctagcaaatctatccatagttgaagaacttcaccatctccttcgatctgcaaaaaaaggagaaaggaaagacatacaaggctacaacggaattcactcgactatgagacaaacccgtccagcctccagaccgcccttcccttgtctgtgaccaacggccatcgcagacaaagaggagatgggatttggcaagggaaaaaagaacacttggagttatctttcatagaagcactcacaaagagatagaaagaaagttgtcatgaatatagctaattaagaccggttaattttgggctacaatgactatacgatacgatagtggataagttgaagatctaaattgatattcatgtactccctctgttttaaattaaaaaacctaaagttttatctcagatatctaaattagtagtactagattaagttcaatccgaacatatattaatttattttagaatgaaaagattatagaaggacaatattgtaaagtaagatatttatactgtccttccatacttgtgacgtgagaaggaaccaaatttatactctgcaatccccaatactgagactgagcacacacccacacctgccacgtgtccctggttgggtgatcgaacactagcccaaactgccagaaatacacaaagtttctccccaaaaatagctgaaaagaaaaatcctggggccacatgtcgcggcgtcgcgcctcccacggcatcctcccgcgcactctacgtctctactggtgttcctatatataccgccacgtctcgtcttcccccgcctccaattccaacctagcaagcgatgcgacctgccttctcctccctttcggcctcgccttccttccttgcgactcaggtcattcttccgaacaccatccccgccttgaaaagctctcgaccaggatcgatcgatcgccatgggcagcggccacaggaagctcatccacttgctccgcgccgagcaggcggcggcggcggcctcggcggcgtcggcgtcgttctcgcccaagtctttctcgtcgtcctccgcctccgacgacgacgggtgtagctcgtcgtcgtggcagacgaacgacggcgccggtgggtacgggtccgcggcctcgtcgccgtcgcggtgcagcgcgtcgacgccgcccaagtcgccgtgggcggcgcacctgccggggcttggcggcggcggggtggggacgggcgccggcgccaccgggctcgtcgcgtcgctggtgaaggaggacgggcacgtgtactcgctggcggcggcgggggacgtgctctacaccggcacggactccgagaacgtgcgggtgtggcgcgaccgccgcgagctcgccgggtttaggaccgggagcgggctggtcaaggccatcgtcgtcgccgacgacgggcgcatcttcacggggcaccaggacggcaaggtccgggtgtggcgcgccgacgcgggggaccccgccgtgcaccgccgcgtcggctcgctcccgaggctcgccgactacgtccggagctccgtcaacccgtccagctacgtcgagacgccgcggcgccgccgcgggcggcgccgggaggtgtggctccggcactccgacgccgtgtcgtgcctcagcctcgacgagggcgccgggctgctctactccgcctcctgggacgggtccttcaaggtgtggcgcgtatcggactcgaggtgcctcgagtcggtgtgcgcccacgacgacgccatcaacaccgtcgccgccgccgggttcgacggcgtcgtgttcaccggctccgccgacggcaccgtcaaggtgtggcggcgggaggaggagccggcggcgagtggcggcgaggcgaagacgaggcacgtcctggagacggtgctgcgggaggacgagagcgcagtcaccgccatcgccgtctcggccgagggccgcgtcgtgtacgtcggttcgtcggacggggacgtgacctactggcactggatcgacggcgaggcgaggtacggcggcgcgctcagggcgcacgggacggcggtgatgtgcctcgccgtcgccgggaacgtcgtcgtgagcggctcggccgaccggacgctctgcgcgtggcggcgcggcggcggcgagcactcccggctcgccgtgctcgccggccacaccggccccgtcaagtgcgtggccgtggacgaggaggagacatcatcgtgcagctccgacggcgagcggcggttcgtggtgtacagcggcagcctcgacgggtcagtcaaggtgtggcgaatctccgacatcgaacctaccaatcctccgccgcggctgccgtcgccgcatgtatggaagagagaggatcagccggcggcggcgacggcggcggcggcgagggcgtggtcgccgtaccagacgtcggagatgaacagcgtggcagcggcgtgacggcgaggctagagctgatcactaacttgacacaaacgtgcgtgcatgcaagaacagtgtggggctcacacgtgtactgtagcagaagagtgtaaatatacgtagaatatacggtgcctgtacgtagattacgtatttgtcaaatgtatggatgcgaatgggtggcttggtcggagataccattttggtaggaggaatgggcggttagttgacagcgagaggtctaccagccacgtcaaaaaccaataatggaagggaaaaaaataaaagggagaaggttttgggaatggctttgttttgttgattttggtagtgatttaattaacgctctgtgtaagatgtacagatgtatataataatataaaagccaccatattaattttgatgtatgaatatattattaacagttcggttttggtggcaatcctcacctttaatctgttactacttctcttcagtcatctgtagtagcatcaaaggacagcagcatgcatgtattcttccctaaattaatcaggaatatatatggcggttcatcgtaattaaaagtcctaaaattacatttcccacaccaatggcgacatgagattgtgatttgtgtattctagtaggaatttgaccacacagaacaaaaattaccatgaacaggtctagtatccagatcattcctgatggacaacgtcaacaaatcaaggcatcaagtgtgaaggacatatatttccctccgcccaatcttacaagtcgcgaattgacttgacagttgacactaagtcgtagtactaattaattgtgcatataaaagaaaatttgccttattcttcaaatacttattttttttaatattcaaaatttctcacaaaatacttgacactctcaagtattacttgtctcatccattatctccgattcaaatttctctctattctacctctacttcactcgcaaagtctcaaccatatatcatttaatgggataatatggttttttttaaaaaaaactatacttaaactatctaaaataataagtattttaagaggtactctatccatttcaaagaaaaacaaacttagaactagatataacaaacatattctaatataaccaaatctggtcatagatctgtagggagtagggagtaagcaattaattaattttaacttaattgtgtaggactggacgactcggcaggtaaagagtgtaataagaccaaattgcggtacagaggtcgccatctttccctttccaatagctcgccgggggttcccctgaaacaggagttcccgtggccgccgaggattccctccccacgccgcaacgcaaccggagatggaatgtatagtatctggtgttcgcagcaccgctgttgcgctgctgcgccggccaacgcctcgttcgccgccgggcatcgtctcgcgaccacacccatccctttcccggccggcccaaccacggcgactcgatcggatattgcctgcctgccatgcatgcatggacgacaactcgcaaaggtttttgggctgatttcgagctgccgatgcaagcagattcggtgatgaccgttcgatgaagggtgtgattaggatgcaacaagccaaagctgtttattctaaatattaaggtctcgctgttcttttataattaagatataaattaatcttagtttttgttagctgttagcacgatttttaaactgtcatgaactttttatattgaagttgctataacatttgaccgaaatccattttttgaagtttgaaataattaaagctcaattaattatacgctaaagatttcatctgacccatgttcaaacgagacataagaaatgtacttaactattaactttcctctattccttcaggatgtgtttggcaagtgggatataggagatgggattgagaaaaggaaatagatgaatggctaggattaaatgaggtgtgaaatattgcccttttgagggtgggatattatttcccaattccatttgccaaacaagcctcatggtatgatcgtttcgaatttgttcaaagttattttttaaattttgattaaatttataaaaaaatttactctatttttgtatcaaaatatatttgattttacatttaaaaaaattaatttattgttgtggtagttactaagatttttttttatacatatggtcgaatttaaggaaatccattaagaaaaaaattaaaatgtcttataatataaaatattataatagagtgaaaaaaattgtatctttaatccaatattaatgtataaaaaatctaaccgctcaatttcatggagaaacactactagtacatatactaattagggacaattgcttatttgaccttgttttagagcctaactactaatatgaccctactttttcaactttgcttacttaaccatacttttcaaaatcagaactgccgtcttagcctattttactgtaccattagggtttaatctagggtgcaaaaaaaatattttatactcggaactggctaaaatgcctctgactaccaaatcaatcgtgtccctaaattgctcaccccacggtctactcatcccacgcggataggccttctaggcggcatgacgttagggggaggcggcgctcagtgcacgctgaggcggcggcgcgtggagaggtcatcagcgacggtggcggcagtaggagctgcggaggttgcgcacggagaagggatcggcggcgatggcacgcggaggctgcggcggctgcacgcgggtactgagtagtggatgaaactagcttatgacttagggattttagggatgaaatttgtgagattttaggtttatatatgttgatttttatatatgtggcttagtgaaatttatatgtttatgacttggtgatttgcccattagtgaattactacgataagtttagggtattttagggttttagtgcaaatgtatgaaatttgtgatgtggatctaagtggatttatttatttgtgacttccctttcttttctcaacaagagttggataaagattaagattttcgtggcacacttttcaaactttctatatgaaagttgctctaaaatatcatattaatctatttttcaagtttgtaataattaaaactcgatcaatcatatgttaataccaccttgttatgcgtaaaaaaacttaatcttcatcttcaggagaaaagaacaccaagagttattttagagatgcatgatggatgatggattttagtgtagatactacctaggttatcaaatcaacatagaatatgaggtgctgtccggagttggtttgatcgagttagtgcattcatataactgattaagataccttctgaccctaagcccctcgtattctgtcatttttagatattttagggtatttatgatatgtttgtggtaatttagagtattttaatgaatttttagggtaatttagatatacatgtgactagtgatatataatttagggtattttgtatacttttactgagatagtaatctttgtttttactttttatcgtacacaggttatttagaaaatgtctcagaaagacaaacccacgttagcgactaggagaaaaacggagtggattcagactgatagtggtcatactatatcctaaaccatatttattaagctaattcagagcgggtgcggatagtgtacggatgtcaaaaatggagcataattggttcgaaaacggattaaatttatcggatgttacgtgtgtatgcaatcaatacaacatcgagttggcaatgcaaggaacaataatacaatagtcaataaacgatccattgtaataattatgtgcttaagtgctaaacaatatgaatacatgatgtctataatataaaaatacaactacataagtatgacatgagacggtgaaagtctcagactaagaaatctagggtaattgatgaattagtacattggatggaccaacttatgttatatgcaataggtagagtcgttacatgtgttgatgatttcggattatccggcaaacggcctatcggataatccgacagaaatgtcggataatccgcagccgccggattttggagataccgtatcctcatccgcatctgcattatactatccacatccgcatccatatccgtcggatttctaaaagcccatactatatactcgtttcgaacggatttgaatcggattggatcggatcggatattattatccgatccgttttcaccactattggcgacaactagtgggaccacatcgacccggaaccataggacccgaaataggattcctaaggatcagaaataataagagcatcgctaaaagccaaacgagggctacctcaatttcttcaagacctaaaaatgtctgcccctatctacaaaaatttaaattcacaggtaatgacatatcctgcaagtgaaatatttaagatgccaaataatacatctacaagacatcactgcacaccattgtaaaattcacagggaaattcagttcccacaaccaaacacatatccaagtcatgaacattttatagaagttgataaacagttttgtcacaacatgtaacaaaaaaaaagaaaaagatgagtaaatttcacattgggccatatattttgaacatagttttataatggactaggggtaagccagagtgttcacttaacactacatatctttacactgatttgcgctttgggctagggatgagcaagaagtggagcagcgggggtctcaccagatctggacggccgcggtggcagtggcggatgtcgttggagatgctgcgggcgaggtcagggagggtggcagcagcggggatatcacgcacgacgtcggggagggcggcgctagaccagcgtggtagcgaggtcgggatgggcagtggacaatgtcggggagggtggcgatcagagcttctgccgccggccgtgaaggcggcggcctcagacgagacaacgcccggtcgcgtgctccaagaagaaatgaggccgcctctgggtcggtggggaattggccaattggggaaagagtaaatttcctatatccttgcaaactcactcaatccctttcgtaccccgtgaaatttacccgatctcctttataccccccaaaattttaacttgatcccttccatgcccctaccgttacattttccttcatttcactattacgtttggttgcaaatatttatgcccttaatgctttaggtttgaatataaacttgaaaaacgattaaaaaattttatttcgctgcacaatatgtgcattttatgaaactaattagactaaataattagtgcagaaaattttgacataaatttttaaaataaaacaaatgtaataaattaaattttttatttaaagttttaataggacaacgggtattttgatcgggagcattcataaaaaatattgtgagcgctggtagtcctatgcatactccttttttttatgactttcttttaaaaaatagatacatatttttttatttatttatctaaaaataaattttgtgataaataatgcattgcacaacaaactcataactataatagccttatgcgataaacttttacatttttaatactgtaattcatgaatttctatgttcatccaaagggtaaaatggtcaatttttatagaaattagacagtca

SEQ ID NO: 21306 - DNA, 5503 bp, Oryza sativa
  unsure (1)..(5503): unsure at all n locations
agaaaaccagtgttacttggacagtgtccgaattgtttggccaaaccggacacctgtgtccgtgtccaggtaacaccggggaaaacactagactggctatataatataaggaagcaaaatcacacagaagtacagaaccatttgatttaactgttcaggttggtttgcgttttcatataatatatatgcaccaaccccaacagcaccagccgcagctcactctagcctacctgcctcctctgccaccacacatcctctcttcccctttcacaggcttctatattcgcacctgctgccaccccacccagctcagctttggcaacgcttcatgccaccacacatgactgccgcttgagctaactttttcgaagccgaaccctccattgcctgccccactctatggctgtgaaaaaagctcaaggctcgcaagctattcatactcgactcattataagctcggccccaggctacaacgaatcaagctcgagcttcaactaaggctcatatccattaacgaacagagctcaagtagctcaacaaaggctcgaggcttgagtgcgtgtttttgtctccgtggctactgctgtactactgcaggagtactagtactgctactatgctggccagccgcagcgtccatctttatttaaacaattaatattccaacgttcaaatctagaggctaatacctccgtcccatcctaggttgctatattatgggacggagggagtagctagttgcagtacttgtgcagccttttgtcagtgttagtgtttattctcttgatggtgaacgcatgtgcttgcatttgttgttcctcctgggcaagctcgagtagactcgaggctcgttcgagccaagcccgagcttaactgcaaactcgaggctgttcgagctcggctctgagttcataacgagctcgagcctaatcatataaactcgctcgagctcggctcgttgacagacctaccccactcaaccatccatcctcatcgcatggagggagcctccctgtcccgatcaccaattccaccactggcccatcaacctcccgaccatcaattcctccccaaatccagaaccctaaccctactggctcaattgctaatcgccgctgccacaaccgacccattgatctccctgaccactaatttatccctaattcctcccaaatcaagaagcctaatcctactggcttaactgcgagcgacagcaccggagtggaaccagagctgaaggggacgaggccggtgcacaggggtaagattcgcatgattttgtccccgagaatatcttttcttacactgtaaacagattacaagttgacggagaagagggcgataaaagtttgagctttctgtgcacagatcgatgacgatgccctttaacttgatgatttagctatataggtcagtggatctggttatagtagattaaagcagagaacaagctgaaaatttaaaagaggcataccggcctggattcgccgccgccgccgccggcggcggcgtttcatggacatgatcctcgccagacccagcatccccatcttgtaatagacgacacgacacgacacggagaagtttccaagtgttgtatagtactactctactctagtcctgacgccgactcgtaaagttgtactatctccgttttgaaatgtttgacgccgttgactttttagcacatatttaactgttcgtcttattaaaaaaaataagtaattattaattcttttcctatcatttgattcattgttaaatatatttttatgtaggcatataattttacatatttcacaaaagtttttaaataagacgaacggttaaatatgtgctaaaaagttaacggtgtcacgtattttgaaacggagggagtactgatcggaagcagcagcgactcctgtcctccccatcgtctcttggtgcaaggagctacggcggcggctggagcctggaggggaacggggcaagtaaatcgtgttcaggcacggccagggagacgagggatgtatagcccgcccggcccagcaagccacgggccctctggtggcacggcaactgtagcgggccgtgccaaggccttagcccaagcacggccaaaagagatgctgggccgtgccgggccagcacggctactgttgcgaatttttttcatttttaatttattttgttttaatatttacagaaatattataccgacgaaaatatttacagaaatagagggcgacagggtgacgtgtgtgattgaaggccgctgagcgggcatgcaaattttccatgcgacgaaaattgcatttaccgggcggcaagggacctaagcgcaaaatacacgcacggcgtcatcttgcatgtcattttgccgccctccacttgggcggtagggtctatttttgtaaatattttcgccggtataatatttctgtaaatattaaaaaaataaaaatgaaaaaaaaaaatcctactgttgcggcacgtgggccggcaccagcacacgtgacccataaaaatttgaaacttgaggggaaaaaaagaaagaaagggaaaaaataataatacgaaggaaaaaaggatgcatataggattaatgtgaggaaaatttagggaaaattggaaatataaccgaaaatatacagtaaaaatatgataaaatgtgaaaaaataaaaaatatgagaaatataaggggaaaataaaaaattgtagggaaaataattgggccggaccatcgataggcatgccgtgccgtgtcggccctaagatgctggcccaagcacgggacgggcaaacggatcgtgcccgcacggcccataggctggcatgtcgtgccatgcctgggccggctacaataaggccgtgcccgggccaacccagcatggctcagcctatttggatagctataatcggatgggaatgggatcatgaggagagagaccgcagtgggtcctattccctcctcacattcttggcatgttggtttttggaattgggtaaatttgatttaagccattagaaatttactatattggaaaacatcatcactattcatgtatttgaaaaattgttattacagttttatagttattcaatatatggcactacttacctcatcaatgcattttgttaaaaaaaaaagttagaccaaaataccattttttgggggaaatttaactatttgtcactattatgattgccaattatccaaatactcatcttagatttgccttttttttttttgcccctctaaggtgatgacttctttaactattttctacttttacccatgtggcatgccaacgtgaccacctagtgtaaaaatcgatgtgagacccacttgttaatctcacaaacacttcccttcctctctccctctgttccggctagccccgctggctgccagtgctgctccggctagccccgctgtcgtccctttcatagatcctcggtggttgatggctgcggtgttgctggaccatgggacgataactccggtgcttggtgggtcccactccacaccacgctccacgtgatcgtcgcccgcttcccgaccgtctccaagctcgccctcaagtgcgactatcgcgctgagggcgtcaccaaccccacgttcgtgctcctcgtcgaccgcctcgacccgacccttcaacgactcaagctccgctccctccgcctcgtcaccgattacggcgtcgtcgtgctcgctgtcgccgccactagcctccgcaagctctccatcgcctcatgcacctttggtgccaaggggatcgaggtcgtcctccgctcctacctccaactcaaggagctcttcgtcaatgctgcctcccacctccaggacaacggggctgattggagcagcgctgacagcaagtgaggctagccggaccggaggaagagaggaaggggagagttgtgagactgacaggtgggtcccacattgaatttttacactggggtgccacgttggtataccacataggcgaaagcggcaaatagttaagaagccaccaccttataggggaaaaaataaaagcaaatctaagcgtggtgtttggataagtggcaaatataatagtagcaaatagnaaaatttccctcctctttcatcccctcctctctcatgttcttctctaaacctcgcccgcccgtccttagcaagtcaggcatgttcatctggttctcgtcgtgggcgccgtcagccttcagtgcctctgtggctacggagatgccgactgcaactttgtctccagtagccatggggggtgtgtgtatagctgacgtagtgacgtggcgccggtgttgacagccgccgcgcctgtggttgaggggttgtcagttcgctgcgtttgtgatcgcggatatataattttatcacgtgtgtattattactgatttagggaatggcattataaacaaatagggtttctggtgtataaaactggggggccaacacatagctagaagttgctatatattggctgatagatagatgagggatattaaaggaataaatttttttttatctatggacagatgatatgtgagaaagtaagagtggatttattttgaaataaagttaaactaaccgcagaactcgatttgttttgggcagagagagtactaagcaattttgtttgcttggttatgccttgccgggcagaatgaaatgaaccacgtgattaggggcaaaagtgtaaatacaaagggaaactattatttccaaccctagattccttccttgtgctgctataaagcttttccagtgtgtgacaatatgcaactgcctctaccgccgccagctctgcgttagtctgcttcaatttctgtttctcccaggtttcttgattcttgctttgagttttcctctcttcttttggattatttttcttttgttctttatttggagagattttcctaatgatgatgcgaatatctattcaccgaaatcgaggcatttttctcagctctatcctcccccatatttcgtgtttttctttctttttctttttgtcttcacaactatggtttcttgatatgagtaattggagattggtgatacgtttacatgttgtaagagtttcttctctgatgaatgatgaagggtttcttagtttgttttcatggaggctgtgttatgggttctgatggtgcagtgatatggtcctttgttcaatttcgcaaccttttgaatcattttttgtttgtttatcaacagttacatagacatgcagcagtgatgataagcaaaaaggactcataacgtcatgaggtttggacaaaacatgattgctttcaagcactgttgagctgcatctgtctcgcattgcaaaatctattgttcaagaaatttttttccctcgtgttcgtaatttaagtccctcgtattcataatttaaggagccagtcatctggaatcaagggccagagtgactgaacgttcaagtcaaaagttgttgattgacagacaaaaggcgatctcaccgttatccactacactttagacaaccc

SEQ ID NO: 21307 - DNA, 2649 bp, Oryza sativa
aacagactcatgccaatgcaatgaatgacttaacataacgatagaaggtagatagacactacacatacacatagaagtatgtatacatttgcaaagtttgtaaattcattaaggcatgtaaattacataaataaaagtagcagttcagtactacagaaatgtttctaggcaataacctgtcatcaatgttgcgcattgtccattgtggaggggcaacactctgacttctaaggttatcaaacccctgcaatccagcccataacaacaagttagaagaggataagccattagcttttattaactattacagaaagacaatgcaaatgagggatcaaagtaagtaccaatacaaacgtgcaaccactaggatcattcgaaataacctcaacctttgtgagatgtttcaacttgtaaagcttggctggctgaaacaaaaggaagatattatgtttctaaagggagactaaagagaactgcagaaagtggtaagaagaaaaatacaaagtgtgatttgtttattgaagtagttgataatgaaggcaagttacaatagtaaacataagctagatgcagatgctcacatatagtaaagaaaacaaacctcaagtactgcgccggatgaatacttcaatactcggagaaaagctttggctgcctcaccttttgtcgattgtttaactgcgtgaagttgttactgtttagcagttgttacaagcatatgctttacatagaaacgaatactgtcttaaatctagcatgacaataattaagtcctatttatacgtcaaccaaaccagcttgcaaacagacatactagcaaatctccactgttaagtactaacaagtttaaaatatgtttataacatattggcaaacaacacttctaaagtataactatcatgtttatttgagataaccaaagattaactcttcacttcatttagaccatgccaaaacaatcagagtaatcaatatcaaaatgtcaaggtttccttgttctaataatcaagtatttatagagtgttgcccaccagatagagcagataactaaatccaacattccaactgcaaagaagtaggaagtcagtgcaatcgattcagcacagcaatgttcatcaatccacgctaactttgagaattccacaatccacactaacgtgcatcattacattgagagacatcaattccggtttcataagttttaaacatcttgattatcttatctgcctcccaaaaataaaagcaagcttcaagttaaaagtctgaagtggctatactggccaaggcttctgattcccttagccaatgaagcctttcaaaagaaaccagggataaagttttggtcttggacatgcaaggatttgacaactacttggcccaggtccatccatatgggagaaaaaataattagctcgtcggtcctagccccttttatgacaagtaatggcagatccttctgacaatgatgaacatttcatcctacaagttgtagtgttaatgagcatctctaacaactgtcatcaactccaggctccatctaatcacagttcacaaggacttgtccaatcagctccaacacctagtcgattccaacgattactggtctggtgagatgcttagacgttcctatcaatccatgcattaactcttgtgtaccggtattcgaaatttcggtctcaacaccgcatgatgaaagctctaaaagaaatgttccttgtacaagatgcttcaagtataggatcgaattgtagtgtaggctacttccagtataggatcagctccagcttccaaaactctgatgattctgtgtccttgcacagtatggcagattctcatttggagctccagtggcgcatgcacgaaaatttactaattttagcaatttacagctaaccgcatagaataagtaaaaaaaaaaaggatctctgcccaaaacaacaccttgtatagtcccctagtggtctaggctgtcaaccgaagtccaaccacaggccatcgctcgatccaagctccccagatcacgaaactcgaatcccaaatccgagcaaggatctcggcagcgaagatcagacaggattagggcagcgtgacattttctccctaaacatggtagcttttccccgagcaaccaaatcagctactactactacttctcgagtctcaccagagcgatccctctccgagcaaccaaatcagctaccgtggaccgaatcgaagcaggggaacaaaccagcaaagctgcagcagagcgagaagagaggaaagaaggaaggagggaggggggggaggcagtgaccggtgagcgcgaggacgcggggcttggcgaggcggccgagcttctcgaagatgcccctccccttggcgacgcggatggagaaggacacctcctcgccgcgcgcccccgaagccgccacggcctgcgcgcacgcgcgccgcagctcggcgtcgtccgcgctcgacttcgccatcgcccgtgcgccgccgccgccgctcgccgccgatctgaggagaggaggaggacgacgaggtgggccgcggttggggaagagggatgagttggtgtcgcctcagactcctcaaagagtcgagattaatcaatcaaaaaccaaatcattttcttttttaccgtttttactgcctgtttttctt

SEQ ID NO: 21308 - DNA, 3734 bp, Oryza sativa
gaaataccagcccttaattccccggtccttttcccccaaataacagtaattaagcggggacacacacacacctgacacgcggcgatcaaaaaaacccaacccctcctctcctcgccgccgccgcccatggccagcgaccgccgctactactacttcgaagaagacgatggcgatggcgaggaggaggtggagtggctggcgatggaggccgacgaggacgacgtcggcctgctcgaggaggacgaccttcacctgcggcttcccgacgaccgccccgcggattgctgggtgagcatgcgctactactacaccccccatcatcacttcatcaccacaccacaccacaccacgggagggggatagatagggggcgaactcaactcgctcgatggatgcgtgctaggccgcctcctgatcgtgcgcggcgcggtgctcgaatccatctagtaggaaaaaaaaagagtcgtcctctgatttttttttttaattttgtgccgtttgggttatcctgcctgcgtcatgggtggagtatagtaatgccgctgattgcacacaacaagatattatggagaagacgccgtctggtcgcttaccggatcgggatggggattggcttcttatcttgtactactagtagtaatgccgattgtttttggaattccggtgtgtgatttgagagaaaaaacaaagtattttaaattaattgctcttgtttgcaccctcataataactacattagttccaatctggttttacctctaagtattaggatttaggagtacaaaatcaattcaatccctcttttccctgcaagggtttgatcatctgcatcaaaaatcatccaattctcacaaactagttgtccttgtagctttgtattataattaatttgcctttattgcattctgttgattttttttttgcaattatcgtatcttagaacatgtaaatttggtttacaaatagaatggttgacatgcgcagctttgtttcttaaacttgtacattattactacatttattattgtgtacaacttcaagcagcgcatgagccatgtatgctgcattggatgcattcatttctttgtgctgattagcttaatatttacaaatcaccatttttttaatttagctgctaattagggtatcacgaatagatatctttcgcacaatttacctatgtttggttaagttcccgtctgtcaccaccaatgcattgatctttactgtaaaaactgtgctccaaataatttatcttgttgttctcacagaaaaaatattatcatctccacattgcctgggatttgtcatttatgcattcaaatcaagtgaatggaactgaagccttaatttgtttttttttctcctgagaagatctatttagttattttgacatgtataactgttgttgtaggccatcacacaagagtcacttcctgctgcccaggtaatgttgctctagtcattcttgccatttcgagattcagattatgttggtcctacctatacttgagatcaattgactgttttgtgtatctactctacccacagcaacaagacctgtctatggtaatgaacttgctcaacataaagcagcaccttgcacgcacactccttatccaccaccggtggaagatgcattgcatttatgatcaccttgacagaaaggggcgggaccgcatgctcagtgaggcatgcattattttgccgaagaatagcatgtcagcagctagctcaacaagtgttacctgcaatgtgtgttttgaggacttctcaatgactgatgtctcgaccatggactgtgggcattgcttctgcaatgactgtgagtccctacgaacccttcagtaacttccttctgatgtcctgatccttacagctattacattactataaacctttttattcggtggcattcgattttccttaagaatattcatcaacctaatgtatcaaatagtttctaggttttcataaaaatgaaaaacagtaggacatatttgttagcaaaacactgcacattttcttacctatctttttttttcttcaggttggacagagcacttctttgcatccattaatactggcaacaagcagattcggtgcatggaggttaagtgcaaggccatttgtgatgaggacattgtgcgccgcctcctcagtctgaagtaccctgctgcatctaagcgcttcgatctcctcctacttgagtcttaccttgaggacaatgactcagtgaagtggtgccccagtgccccacactgtggccgcgcaatccaggtaggcaccggcgagaggtactgcgaggtcgcttgcccctgtggtgtcagcttctgcttcaactgtgcagggcaggtgcactcgccttgcccatgtgccatatgggagaagtggaaagctaagggccatggagactcggatagcgtcaagtggattcttgccaacaccaagagctgccccaagtgctccaagcccatcgagaagaacggtggctgcaaccttgtccattgcaagtgcggccagtgtctatggtaagctgttgtcagttgttacacacatatccacgcagggtttagcggtgggagcttttcatcatttggtgagtgagcttgctctctatggtgatcggcaacctgggaataggcgatggtgtatctagcttaaaatcagtttttcatctccttgattactactctctctgtcccaaaataatttaacctagtactccctccgtactcgtaaaggaagtcgtttaggacagcgacacggtctccaaaacacaacttgaacttcttatttctataaaaatatttattgaaaagtgataaatgtatacttttatgaaagtattttttaagacaaatatattcatataatttttacattttcaaactcaacaacttgagagttattcatgatttatattcccaaggtttgacttaaacattgtcctaaacgacttcctttgtgagtatggagggagtacgagatatgacacatactaggactgtctagattcgtaaaattaagatgtgtcacattccgtactagattggtttatttttggacagaggggtactctagtatcttgaattgctgaccctactgaatgcatgcagctggctctgtggtgggcctaccgggagggagcacacttgggatagcatctccggccacagctgcaaccgctacaaggaggaaaacggcgacaaggtggacaccagcagacagcagatgcagcggtacacgcactactgggaccgttacaacatccacgccggctcgtacaaggtggagcagaaggatcttgggcctgccgtcgaggagcaggtgaagaagctggagtcgaacctaacaggtccgaagatgaactgggacggtagctggctcgccatggcgtaccaatccctgctcgcatcgcggcaggtgctgtcgcggtcgtacgccttcgcctactacatgtttggcggcggcgaggtgaagacgcacccgtcggagcgggcgagcctcgccgtggcgcagaacctcttcgaggaccggcaggagcagctggagcgccacgttgagcatctctccaaggagctcgccacggacttgctggggctgccggaggaggagatcgtcctgaagaaggtggagattgccaacctcgccaagatcgtccaggcaatctgcgggcagttgtacaggtgcatccaggacgaactcctgccactgctcgtccagcccatgaa

SEQ ID NO: 21309 - DNA, 2828 bp, Oryza sativa
gtatttaaacattgttcagaagattctcctaatctgccgcaaaacatcttgtgttatataatattgttgagaagattctcttaatctgcagcataacatctagtgttatataatatgagacatcaaaagttcgttttcctactgaaaattaaccaataagaccaagttgcaaaaggcaaattaaatttgtttcaaagggtcatcacaaagagcatcacaatgagcgatttagattttctcttgggtacatcatgatggatccctatgagcaattgacgccctctgtttatagcactaagcaagacaagttgcattgttgtgtcaggattctaagtttaatgtcttttatatctttctgtccttttctgccggataactaaatatctgaatggttttcataattatccgagatacaaatgaatgaattaattataataaaatttgacaaaggatttaaaacaacattctaagaaaaatatatagaaaattttctataaaaatcataaaagctcaaaaagcgtttatttggctatgctgaaatatagataggttgaaggtaaagaacaccgacagtgtctagcctctcgagaaccaaaggatctttcagttttcgtagtctgcgtatgtttcggtgaaaagaatcttgccactatagacgatccaaaacacgttccagtactatcagatttgggccacacgcaagccaggtcaacaacgaacagttttgagtacagtaattaactagccaaaaaaatggatttacagttgcatagttttaagggattagatcaataaagtattggtacatagttcagggcctcaaaatcctcccgtgtgcaattctctatctgatataaaccactccaattgtagagaacaattgatcaaggcatttttgaatcaaaggccaattttcaaaaccgccttatcctacttgtttgatacataaaaaaaatctgtctttaaacttaaggaagcaatgctacaaaattgcctgacgggacttcctctacagaatacatctcaattcttcagctcaaatggtctgtaacaccccctccaaattcccattgcttgtgaaggtaacccgttcagcctcttgtatcgaatttcatcggtgggaatggttgcaaaaaaatgcaaggtggaagggatttgtcctttgtgtgacttaacaacatttaaggggtttttcggcatcaaccatctactactaccctacaagtcctcgctctcttcttttagtcggattggatggattacaactccattttgagctgatcggacacggccccatcttccaagacgaggctcctggtaataaaagatatatcagtataaaatttaggattttgaaacgaaactaaaaagagtactgtgttgcaacagtatagaagactatggaatggattaacataaatggtatctggtccacttgtagtgctaggattacaaggcagtagtattcctattcatcggctaatgaacaagagaatgcgatgatgaatctgcaattctgcaatctgcattcacttttgaggctgtcatggagtttcaaaacgtagcaggatagggtgctctacttctattaataaaatgttgtaagttgtgtacagtgggaattttagttcaatcagttaagtgtttagccagaaagataagttcaatatagttgctgcttcccagtctttatttgctgaatagtatctcgtaataagctttttagtcaaggcgatattttccattgtaatcaatgaaaatggatagggtttccatgctctaaaaaagtttcaagaacttaatgtcaatgattaaaccggaaaattaagtttttccatccctgttgcattctcaagataatcttgggaacatactgatatcaaaggttaaaaaaaactgaacttttctgtaacaattaacaaaggggatttaatatactgacctggcccacaccagcaacaataaagcgtccagatttcgggatggcgagagaattaacaaatccatcctgataatggtagaacaaaatgtatcaattatttgcaaccaacagtaaaaatatgtagactcagttttttctagcattggcagtacaataaccttgtcatctgaaacgattgccccttttcttggaaagtgccattttcactgtttatttattgggggaaagcaagatgcatgatttgcaatgttttcattttctacccaattcaattaattgcataaaagaagctgagcagctgtactattgtagtatggcatttagtaggtgcacagttatttcatattaattcttagatctggtgtcttgatctaagacccatggtggtcctgataaatgctgtaaaaccgagggagtataattatcaggccaaagtatacgctcctatgaagtacaacaatcagaaaatgttagtgaacgtaactaatatgattatacaatcaactaaaaatcccaaaggacctagaactgagacaataaattccagtaatgccaagtcaaaacagtcagaggtgtcttgggaccttggtagcttatctatggtgcattttattttcataataacatccaaaggggtatcatggagtagctagtgtagcttaccagtctcaaactaaataatggccgaatgcccttagaatcaggttcaatagcccaaagacgaactgaaccatttgctgctcctgatgcagcaagatcagaacctcttcttgcagcaatagcactaacccatgattgggctgatgagacactttcaggtttatgtatgccattttctgcatttgaggtgcaaagcaatagataagaaacacatatacacacagaa

SEQ ID NO: 21310 - DNA, 671 bp, Oryza sativa
aagcagcaacactccaatgatgcagtagcaggagcacggaacagtagttgtgattcttctggtatctgtccacacaagagttttcaactttcaggttaaatactgagtcacacaccagagtcaagccagtctaagcgtcatatccttaaattcatgtggtccaatcagttttaccttggtcagcatcatcatggttatttagatttcccatttgaaaatgatacaatacaagtagatttttttaagagacatacttccataatattataacattattagggattcacaaacaatatgtgaattttggttagtcacgcaccataatgaacaatgggaaaataatatttctatgtatcttaatcctagaacaatgtttaactaaacagtttctttcagttataatatgtaaataatcttagtgcatgtgcatacacacacttttaaggaaagatgtaccttccaaagatgcattgttcggtcccgtgctacagtcaaaagcctatctttactaagtgcatccattgtcaagacttcgttctgatggccaaataggcagttcatgtacgttctgtcttctgcattccactgcattattttacggtcaaaagaaccagagaatagctccgatgagtctggtccaaaggaaagacaagatattgctcctcgatgac

SEQ ID NO: 21311 - DNA, 2216 bp, Oryza sativa
ttgtcggtgcttcacgagcatcttaaagccatcctcaagatctggttgtaatatcctgcaatagttttgcaaattttagtcatatctatttcaacctcaccatttatgtgatcagtatttcaagaacacttatattatcttattgcaccttttagttagagatttttttaaaaaaaagatggattcaattaaaaggttatcatatttatatagcttttaacagctgtagacagttaccacacccagataactgatgtcatatacaagtgacttgtggatagcaccttcagtaatcatgatgacaaatgcattcccgagccatctaaatgtgtatagttcttccgctcacgtttcattccgtttcagcatgctagttttggaacattatccaaatagatcacgcatgaattgagaatacaacctaagtaaaaagtaaatggatggggatggcaaatgagaaattattggaagaagctccacatgcaaacacatctaattttgtagataaaataaatgccatatggttcaggtgttgagggcatatataatcatgtagcaagcaatatttcctaatattttaaccgccccagtttgtgaactactgtctataagcagagtagcagattctgcgtaaattaacattatgccaaagtgtacaggttgcaaaaaaaaccaatagcaagcggaagaggaggggtagatgtgaactccaactttcttcttccattatggcacatcccactacttgtgactataaacgattttcctctcatgtttggttctaacagaaacatttgaatatacagttgtttggatgtcccaattcagtaccaccaatgcacttgctggagccataaaaggacaactgcttgaatcccaagaggccaagagtgcatcattcacaacaagaacttcacatgtatttcgaaactaactcctatgttgcaagtaagatcagtgtaatacaaatatatgacaaaaagttgaaagcagaaaattacaagataacaagaatcaagaataaatacgaggttttagaaagtttagaggatccaggacagttttaggcaaccaggctgttttaatggttggtttcaggacatctctagtttgttgttaactctatattttcccctcgatgcattttgttcggttggtcttatataagcaataagccaataacataagatcttggcgaagttaacatgaaaataaatactctttccacatagtataacctactggttcaagccagtgtattcctttatttctctccatgattatagccctttatttccctccatgaggatatatcattgtaccaccacactcagataaccatatattagcaggaatgttgtccatattccacccctaaaagcacccacctatgtacctaagcaaaaccccaaacgcatacatgtaacctgacccgtgtgcttgtcagctcgcaaaacgcaaagggctattaatttggaactaatcaattagtacagacaatggaacctcactctgatccaaattgctaccctaaaacatcagagatacatgtcctcttcatttcaggttatgaactgtgaccattgacgaaattgtcgtgtaaatttcgttgactctgaccactgacgaaattgtcgtgtaaaattcgttgcaattgagggcgcaaacattcagagctactgtccacatttagggggctgcaagttggaatttgcaaacaattcccaccgacatttagggggggggggaagaagatctcacctgtcggcgagctccatccgcttcctgccactctcctcgaattgcctcttgaggaggatatcggcgacccgcctccggccggcttcctcgccctcgtcctcgtcctcgtcatcctccctcctcctcctcgccgcgtccgtcaccttcttgagaagctccttcgcgatccgcatcttcttctcccccgccgtctcctgctcctcctcctcctcctcctcctcctccccatcgtcgccgacgccaccagcagcagccgctgccacgccctccaggtcgctgtcctcgctctcgatgtcctcgtcgcggccgcccccgcggcgccgcttgggctcggactcgaagaaggggtcctcatccccgccgccgcggccgcgggaggtggcgcgtggcttgggccgcgagacccgcttccgcggacgaggcgccatggccgggggagggatggggggagggga

SEQ ID NO: 21312 - DNA, 12473 bp, Oryza sativa
tccgcatccgcctcatactatccgcatccgcatccatatccgccgaattttaaaaggccataccatatcctcatttcggacggattcagagcagagtggatcggatattatccgatccgttttcacccctagtagtagacatttattcacattttctgcttgtactccctctcctgatgaatatattaccttagtccgaaaatataaggaagcacccaacgtcctagagaaaatggaacgctcatatctggtagcttaaggctgcattcagcctcactccctcgcacagaaaatgaagcaatgattagggggtgattaattaagtatttgctaattttttaagaaaaaaaggattaatatgattttttaagcaacttttatatatattttgttttgcaaaaaaacgtaccatttagcagtttgaaaaacgtacgcgctgaaaacaaggaagaaaagttgggaacaggaggttacgaacgcagcagcctaatagaggcaacgtactgtgtatagaagctgagcgatgggacctaaggtgagaagaaccaaacatgcatactcgaagagaagagagagctagctgcatgggcctctgtctttttttctaatgtatgtaacagtttcattagaaatattcaaatagtatttctttttcatgaactatttatctactttataaaccagatgtatctttatatttgttacaattaaatcttcatgagactatacatgattatatttttgatgaaaatatatatttagcacttttttgttataattaaatatttaataataagatatcacattatcatattttttttagtttttttcaacaaatatttctgaatgttgcacacgatgttatttggatgtttaaataagtattttcttatggtttatgaggtcatttgtaaatgttgcacatggtgtctttttcatgtttcattaagtattttgtgaagacttgatagttgcaactcgatgtttcacgcgtaaaaacgtttcaataaagtcaagtttttgcaaatatgttgatgtttcactaatgaggaccttaatgtataagatggtggttgtcggtgttgcagtcaatatttttgaatgcttcatatgtttgaagtattttatgaagtgagttggaacgtttgataaagtgatgaaacaatttcctatgacaggtgaaactatgtttcagctcaccctccacctttactcgtgttctgagttaaggatgcaacttgccaaatggaaaacccgacgagatgaagcctccttgcgatagccgtccatgaccttttattgaggaagaagtggctcataaacaaagagaagtaaggacatatttgtctttttgaagataacttaacagctcattcacgatattgatggcagtggcatacatgataaataaattcagtccagtggcatatacaagaataacatgtttttatgacatataaggaacgcaaaaatggttccatgccatctaaatttccccaatgtagttttaagccttgtttgattatgtttattgggcgtgtagccaactggcttaccggacaagacactcaattagcgcattatttagtggtttgagaagtgtgccgatgaatcaaagtagatagtacttctctagtacttaaaaaacgaaatctgcttgatttgtccgtccgtcggttttcctactatgtttgtatgtatgcgtgtccgtgcgaaccgtggacgcgcggcagggagagcgagtgttactgtgtggggagacgtgagagagtggtgaagagaagatggatggagaggagacacaggtaatgttgggatgagagggagaaggcacggggaggaagagtgccagaggaagaagtccagggtgggggtgggggggagaagcgttggtggcggcaagctgtagagggaggtggcagtggatcgaagatggcacggggaaggaagagatgagccgcccgggtggaggggggcggagggagaagccggtgatgacgcgttggaggggaagggggcagcgggtcgaagatggtgcaggggagtaattgtggttgatggtgctcatgttagggggatcgagagagagagagataggtggagtagcatgggaaggatataggatatcaaccgctagatctaaagtgaaacaaagaatcccgggaagaatctcagcccttgcagggaaaatcaccatccccactatgttctttttatataagaaaaaaaagtaaaaataaagataaagataaaaaaaattaacagggccacgaagtgtcaaataatttggtccatgtcccagtcaaagcaacagcctctgtgatgtcacccgtgtctcacttgagttctgtaactcggaggaggacgacctctcataaaccctaataagcaccttccgtaataatagtaggcttcttaattcctcgcgatcggccggtcgatcgatcgttcctctcgcctgccgccgccatacccacgccccgccccggccggcgccatgtcgagcgacgacgaggagtgcttctacgactacgaggaggaggaggaggaggaggaggagccgggctgggacgacggcggcggcggcgacaccatgctggtcgaggaggaagcggcgttgccggagcgccccgtcgattgctgggtgagtaaagccatcccgacgtacgtacgtatagcgatcgcatatcgattgagcaaaggggattgattaattatgtttgttaaatcttgatctgatccatccatgatgcatatcaagcataataaaggaaggaattagaaacgacattagatcagatttaatttgcgcgttcttttagttattctggggaaaaaatgagttacggttttacattacttctaatgcacatgcataatatgttagtatttctttatgctttgcatttgtgaaaccatcggtgaactttaaaaattcttgccaaatatgttttcaatggatttctccctctgatttcaaatatgtaccgttttaggcttttagcatatgttctcagataccccctccccccctaaaaaaattgtgtcctttaactggagttgtttatatgcaccttttcttttcttgctagttcgtctttacgaaataaatgctaattttgtgacaaataagtgaatcatccttttcaatgtactataaatgaagcgcaacaaagtgatttgaccaatttttcaaaatcttctgggcaagcttagaacatgtactcttggattcagatggagtatgctttagtgcacggcttaatgttgttcgagtttggaatacaactgggatacatatttttctgaaaggtatatgtgagttaatttgcagccataattagcatgttttttgtatgataaatggatagcatactcacaagcctaaaaaatcccatccacgctgatgttatgcataaaaacattcacaggtaaaccgagcaatttgaaatgtagccactatgtatgttgggttaaatttaacctactggccggattggtcgactcattctaacaaatctcacgtaaaaccaaggaagtgtggcaagattatattgttaccttcatcgaagtacatccaaattgtttttctatcactaagtataccccaattattttttcaaagcaatcattaacactgattatttgagatgggccaataaaaattgtggctgtattgatatgtgactgccatagggtagagggggaatgtcacctctagaaaatgctttcaaatgagagaacaagaagcattttgataaagaaaaaagttgaatactacaacgacaagtaatatgaaacgtataaagtctatagaaaaaaattggtgtgcagtagatgtatttatacaatgtgcgattgatagttaataaagtatgggaaacaataaaaagtatgtgtcgccaaatttcgcgaagcgagagccaggtggcctccttaatataggaaaaatgtaagccaaattaatttgtccaaaggctagctgctagtttctaagttgttcaagccccctcggccactttccagctgtaatctgacattttattccttctaatatattcggcaaatcttttgccacttttcgtttaaaaaaagtgtgagtgtttggagggggggttgaatgacttgattatgcagttttttttaaataacgtgctcacttttttatgtcaacagcttaaaattgggtcgacctttctctcattgtgagtggtgttgttgtctctttctatcttttttcttgtatattttgctatctttcaaacgtccaaacgaactcaccttagggagcttttatggattctccccccttttagatcgactagaatcttaattttagcactaagcattagcatacaactcaacataatattagcgttacaatatacttcctccgtcccataaaaaataaaatcctgtggatgaatccagatgtactgtactgattaacttttgatgtctgttgttgttgcaggccattacagaagagtctcttccggctgcacaggtaatgtgattcactccacctgacctgacattgttctctgcagcttgcagcttgtgctacagcaattagtactagtaacaaattacattgtgtttcttgacatgctcgatctacctgcgctgtatgtatgtacacagcaacaagacctgtccatggtgatgaacctgctctacataaagcagcaccaagctcgcgccctcctcatccaccaccgctggaagatggaatccatcctggaccacttcgacaggaagggccgagaccgcatgctcagggagaccggcgtcgtgatccagcagcaggcggaggagaagaacggtggcggcatggccatggcggcgtcgccgtcgccgccgccgcgccccagaagcagcgtgacctgctacgtgtgcttcgaggatgtctcatcggacgctgtctccaccatggattgcggacactgcttctgcaatgactgtaagttgcatgtttttctccattttattgtttctttgttttctttttgttctgtaaaactacatcagaagaactttataaattgtatttgtgaagaacttataactgtcttcatgaaaaagaagaattatagaatttggtttcttcctcacttgcattgccctgttcttttttcatgatcgggtgtatttgaatggttgagtaaataaatgattttatgctaattgttcaaggttaaacaaatgaattaaatattataaagttgaaaaagtaattcttccgctttaaattataagtcgttttcacttagtgaaaatcaaaccactccaagtttaattaaatttatagaaaaaagtagtaacatattcaacacaagacaaatatactataaaaagtattactatgttacagaaaatatctataaacttgatcaaacttaaagttgatgttgtcaaagtcaaaacaacttataatctaaaatggaggtagtatttttgaatcaatattataagaaattcatacatataaaggttttgcgaaaatcacatacccgttaatccattcctccataaagtagacaagtagaaaatctatccaaagtattgttttgatatcaattatcaaaatttaaaaatagatttttttaacataatttaaaattagatgctttgttggtactctctctgtccgaaaatatatacctttatctaatcttcctatattttaagacagagagttaattttccccggggaaatttcatcatcaattatatacttcacggttcacgcacaagttggaaaggttttttttgtgtttgcaaaaggtgtgtgattgtgatgtgttgaaatggttcaggttggacggagcacttcttcgcgtgcgtgaacggcgggcagaagcagatccggtgcatggcggtcgggtgcgcggccgtctgcgacgaggacgtggcgcagcgcctcctcggcggcaggtaccccggcgcggcgcggcggctgcgcggcgccctcctcgcgtcgtacgtggaggacaacgcggcggcgcggtggtgccccagcgcgccgcactgcgggcgcgccgtccgcgtggacggcggcggcgggcggtggtgctgcgaggtgtcgtgcccgtgcggcgccagcttctgcttcggctgcgccgcgccggcgcactcgccgtgcccgtgcgccatgtgggagcgctgggaggccaagtgccgcggcgaatccatgaacgtggactggatcctcgccaacaccaagagctgccccaagtgctccaagcccatcgagaagaacggcggctgcaaccatgtccgctgcaagtgcggccagtgtctctggtaataaacaataagatttaaaactcaattcatcctttaggggatatcacctcattttttatgtcacttaaaaattcatcaaaatatttaaaaaaattaggtgagatagattaatatgtgatatatcacttcacaaacatgcaaattcaaactcaacttatataagtagaaacaaaaataacaaatttaactatgaatagaacatgtaattcacagttaaatttgttatttttatttcgaattgtataagtcaaattttaactctcatgtttacaaaaagatatactctctccgtttcacaacgtaagactttctagcattgctcacatacatatagatgttaatgaatctaaacacatacatatgtctagattcattaatatctaattgaatgtgggcaatactgaaagtcttacattgttaaacggagaaagtatcatatattgatctatcttgacaatttttttaaatttttttaattaccttataaacgccatgtacaaaacgagatgatgccccctctgagggacaaaaatccacttccaagattcttaattcaccttggcaattcgatcgccattgatgcgacgaccatgcatgaatgttgtttgcagctggctgtgcggcgcggccaccgggctggcgcacaactggaccagcatcgacgggcacagctgcaaccgctacgacgacgcggcggagaagaggaaggtggacggcgcgaggcgcaaggtgctccggtacgcgcactactacgagcggtacaaggcccacggcgactcgcgcagggcggaggcggagaagctgggcccggccatcgaggcgcgggctcggcggctgcgcgaggaccccgacccggccacggcgccggccagcggcgacgccgccgaggcgctcgccgccgcgcaccgcgcgctgctcgcctcccgcgacgtcctctcgcggtcctacgccttcgcctaccacatgttcggcggcgaggagcggacgttgaaagcggcggcgccggagtcggaggtggcgacggcgcaggcgctgttcgaggaccaccaggagatggcggagaggcacgtggagaagctgtcggggctgctggcggcggacgcgcctccggcgccggccacggcgggggacgcggccctgcggcgggcgaagcaggacgccgtggcgctcaccgccgtggtggagaagcactgcggcgagatgcacaagtgcatccaggacgagctgctgcccatgctcgtggagcccatgtccatcgccgcctaccgccgcgacggccctatcaaggccaaggactttccaacctgtggtggcgcgtcgtgaattgaaaagtttcagggtgtttggtttatagccacactttatcacatcatacttgtggctgtcacagtttgttaggtatgtgtctggtgtactactacagttgtgacttgccacactttttcagtagcatgtcccacactttttcagtagcatgtcccaaatgtcatagacttaattttcttgctaactttgctatactttgtgactagcaatttgtccatcacttttttttggctgccataatttacctaatgttagttgtggtaaagtgtggccgacaaccaaacacacccgttcccaactatgttatgcttactaataatgattttttaatttggagcacatagatttctttttcccgatttctatacaagtttctgaaatgaggtctgaagtttgttgctcttatagcccatagaggtgtgcccacctgaatcatttgtttcctattttagatgaagcaaaattttaaaccactttaattaaacttgcatactctaaatcaaatgtggatctgggatcaaggactgccaaagaaaaggattattttctctaacctgactccgtgggagaggggggggttaacaaattttaaaaatcaaaaaggaaaaaaaaactaaagtgaagatattttcgcggtccgttatttgtgtttgagtcggttataaaattgaagatgttttcgcggtacgtcatccgtgtttgagtcggttataaaaattgaaaatgtttccacggttcgtcatccgtgtttgagtcggttttaattttattttggttttaatctatatttcttctctactattataaaaattgaatttgttttgccggtattttggtacgtcatccgtatatgagtcaatttttaatttcgtttgcttttagaaatacatatccgtatttgagtcggtttttacgatcgttcacttttgataatacataaggaatcacataagaaatctatttaaaaaactcgcatgctaacttgagacgatcggactcctaactgtagctcaagattttctatatatgtatatatatatatatatatatatatatatatatatatatatatatatatatatatatatatatatatatatagacacacacacactagaaaaaatactcgtgcgttgcaacaggtaaagacaattttcaatgatatattaagagccgagtaataaaatgaaatattgaaatcgctatacattataattaaaaaaagttaatgaaaatcctaatattggatcgctatattagattataattaaaaaagttaatgaaaatccttcctggtattaggccgaaagccttccttcctttttcagccataagccagtccgctacctctctccgtttggtttgcttccttcgacccaaccacgagtgaagtcgttttcagccctacccatttcgctaccttcctccgtttggcatgcctccttcgacctatcaaatccacccaaaattggttgagggtttttgatccactcaatcttctctttccgttttcccaaaaatcaaactcgaggtaaaaaagattggggaagatagtcgtcatcgtcggcaactattaggttaaatccagcgaaataaagccaggaaaatcatggagaaaataacgagaaaggagtgggaatcgatttttttaatcaaattggaatagaagacgcactatcgatatggcgcgttatcatcggcaactgttatattaaatccgatgaaataaagctgggaaaatcatggagaaatgatgagagaggagtgggaatagatttttttcaatcaaattgtagtagaaaacgtacaatcaatatggcgctgagattcaactcgggagacatgcgggaagcgtagtgaacggattcaaaaaaccagacgaaaaaaaccaatgcgcacaaaaaaaaattcatttgcgtgcaaaaacaagtcacaaaaataccggtgaaaaaaaccaaacagatttttattttttggttttttgttggcgagattttttttcctttttttttctagagtcggatgattttttttcactgacgtcacagaagctatttttatttttattgcttgttgagtcggactttttttccacctttttagttggacttttttttaccgcctatggaaatttcttgttctttttaagtagagaagattttgataagatattaaaaccgaaacataaaattaaaaccgatttaaatacggatgacgtaccaaaagtaccgacaaaaacatcttcaatttttataatagtagagatatatctaagtgaactctcacagtgaatttcatcttaactaaaccatataacaataataagattaaaataggctttacctgttgaaatgcacaattattttttccagtaatacataattacatatttgtatatataaatattgaatttatagatagaaatatatacatggaaaatttttacatagcagtattttgtaaaaattaaattcgaattgaaatcaaaatctggcccataaatttgcatacaaactttcggtgtataaatttttgaggtatagacttgtaggtgcaatgcaatatttcatatgaaaaaattgaattcgaactggaatgcaaatcatgcatataaaattctgatgtacaatttttcaatgtataatttttaggtgtgcaaaaaaattttcggtgcataaactttagatgggtagacttacctaaaagtgaaaaaaaaagaggtgagaaaaaaggaaacataggacgtgaggggagctaacgcgcaatagcattttcgctaacccactttccgttcccttccgttccaacattttaccgctacggccacatcttattgatgatctctctactttttatacaaacaaaggctaagttagaaacacctatttagaatcaaacgctagattagaaacacctttatcgctatcattttggctgttgctcttttttgggcaacgatgacttgtattatgagctgcagttgtgctgccacatttttagacccggttttgtctcaaaactaagataaatcttttcttcttacatgaaaatagatagatgctccctatcctctttttcagttttaccttttctaaaaaaagaaacatctaccgcgacctcttgtttttagagataacaatgccaaattataaacacaaatcgcggtttggataggtctactactaatacaactttgtcactccggatcttaaaccttatctgtggtcatgtggtggggtcgagccgaaccgaaccgagccgagcaagctccatcgatcggccgcctcgtcgcatcaaattccaaaaaccctccgcgagctccgacgacgcggccgccatggacggcagcgacgacgagtgctgctactactacgacgccgtcgacagcgatggggacgaggaggaggaggaggagataataatgctggacgaggacgacgtaggcttgctcgacggcgccgcgctgccgccgccggaggaggaggtggagcaccgcgcgatttgctgggtgagttctatctataataccctagcctatatatctcccgttctctctcgggtgggaattaaaaccctgcagttcttgtgattgaacttggcactatgatcgatcgagttccgatattgggggagggatcgcctactgggtttagttaattcctttggaattccaaccaatgtgaccaagttaattttcatcatatattaattattgataacagcagttgattgtatcgatttggttgagagaatttgcagccctttgctgggtctctttcaatctttgatttcagtagtaagaattatttgatacacttctgaaagaaaaatgttctaaacaaaatagttgattcacttctgaaagaaaaatgttctaaacaaaatagttgattgaatcaaattcgcatcttccactgcaagccatggtcttttgtgaaagtaaatggtccgtttatacaagaatattgcattgtttcaataattgttacttatgagagttagttttagctatattttatcctgttccaaaataattgttactggatatatcatatttaaactctgattacttgtattcttcaaaaataaatataaatgcttaaaaaatgtcgtattatcaaagtgtgttgtaccacaaacataagctttaagctttcgtccactgtagtctaatcatttaaaagttgttaatggtcaaaatttaataataagtactatttgggcatgaagtattatcttttctttttattaaagaaaatattcacctcgagaagaaggctgcactaatcaagtaccctgtttttgcaggccattacaaaagaatcccttgcagctgcgcaggtaatgatgaggttgagcaataatcagtcatttcaatatattcatagtttcagattctgtccaaaatctcaacacactgttcttaaattttgctgctatatcaatacatctacaggagcaagacctgtccatggtgatgaacctggtgaacgttgagcggcacaacgcgcgcgccctcctcgcccaccaccggtggaagatggagcgcatctacgaccgcctcgacatgatgggccgggacgccttgctcagggacgccggcgtcgttgtgctgccggagaagagcagcagcagcggcagcagcatggccatggcgaagacgaaccccccgggaagcgtggctgtcacctgcaacgtctgctttgaggagtacccactcggctctgtctccgccatggattgtggccactgcttctgcaatgactgtgagttgtgcccaatgttcatctcttgaatgatgcttcctccgtttcacaatgtaagtcattctagcattg

SEQ ID NO: 21313 - DNA, 2669 bp, Oryza sativa
caatgacctacattgtgaaacggagagagtactatgttattttaaaaatgtatgacacgttagaattttccgcacaacgtttgatcatttgttttattcaataatttagtataaacatataaaactaatcgatgacaaaagaagtcagaacaaaataaatgatatttatataatttttaaataagatagatagtcaaatattatgtgaaaaattaaatccgtcgtatatatatttttgaacgaagcatttcatttttcgcataatgttttaccatctatcttatttgatttttcggatatatatttttgaaatgggggagtatttgttggtagtaaatgagaaagatttgatgatctttttttttttgcaattttgttcgatcaggttggacggagtacttcgctgcggcggtgagcgacggcagcaagcagatgaggtgcatggaggtgaagtgcacggcgatctgcgacgaggcggtggtgcggctgctgctgcacgggaagcaccccggcgcggcggcgcggctggaccgccgcctcctggaggcgtgcgtggaggccagcgacgcggtgcggtggtgccccagcgcgccgcactgcgggcgcgccatccgggtggacggcgggggcggcggcgaggagcggtacgccgaggtgtcgtgcccctgcggcgccgtcttctgcttccgctgcggcggcggcgcgcactcgccgtgcccgtgccccatgtgggacaagtggggcgccatgcgcggcggcggcgaggtcgacaacctcaagtggatcgtcgccaacaccaagagctgccccaagtgctccaagcccatcgagaagaacggcggctgcaaccatgtcacttgcacctgcggccagcatctctggtgagctcgacacgacatctatcgattctccatgagattgatgtcacgccattgttggatggatgcagctacgcgtgcggcgcggcgacggggacgttgtacatgcacatctgcaaccgctacaaggaggagggcggcggcggcggcgtgaaggtggagatgaccgccggtgggcggcagcggctgcggttcatgcactactacgagcggttcgagatccacaccgagtcgtacaaggaggagcaggggaagctgggtccggccatcgacgctctggcgcggcggctggaggcggacgccacgctgccgtggtcgggcaccagggacgcccggtggccgtcggcggcgcaccggcggctgctgcggtgccggcaggtgctcccgcggtcgtacgtgctcgcctactacatgttcggcggcggcgcggcgacgcggcgcgagcgggaggaggcggcggcgcaaaaccggttcgaggatttgcaggggcagctggagcaccacgtggaggtgctgtccaggacgctggcggcggcggcgcggccggccgacgcggcggaggtcgtgaaggcgaagcgcgacgccgacaacctcgcccgcgtcgtcgaggggctgtgcgccgggatgtaccggtgcgtccaggacgagctgctgccgctgctcgtcgagcccatgaacatcgccgcgtaccatccggacggcccggccatggccaaggagttcccgccggcgaccagcgtgaccggcggagcaccgccggcgacacgccactaagccacaacgtgtcgagttcattattactatacgaagcaaggttgtaaacggtcgatgggtgaagggaagcaggtggttttgggaaaaattctattgtccaaacatgtttgtggtttggcatggtggatttttggattaattactagctaagtagtataggaaatatcctatattgatacagaggaaatgatggattattttgtgctgattaattagtctaattgttcgacgttgtgcaacgtttctggataacttttcagtatacgaacacttcaaatgatcagacctctcaataatttgcagccaaccaaacgggtccaacttcatcttaaagaccctatcctatgttgtttgtggtctgtttataggaagtcggagctgctcttgagagcttggtttgtttataggaagtcggagctgctcttggtagcttggcaacgatgacctttgttttatcctccagttgtaccgtcgcaagtttttagttttttctccgtgtgggttttgctcggtttcccccttcaaaccgtgcttaagtgagttttttgggtccggtttcccttaaaaaactgggccaagtctcttattcttaattgaaaacaggctctccctatcctcttttgaggtttttccaaaaaaaaacaattgtcggtgacacataaatttggagatatgaaaacaaagtgcacgaatggtaattaacacacgtagattttgagatatcaatgtaaacttttttttaagaaaaaaagaggaacaactacagatgacacaaatacatttggggatgtgaacgtaaactgaaaaaagaaatagcacaaacatggtgagaaaagttaggaaaattgacaaccacgatgagaaaaatgtaagtaaataggaagaacatggaggtttggagatatgaacataaaccggaaaaaatagcataaacatgatgagaaaaggtaagtaaatagaaataagatgaatctagagatttgatggatgatgacaacaatcaagaactaggccacc

SEQ ID NO: 21314 - DNA, 4898 bp, Oryza sativa
caaacaccacatgtagcaggcccaaggaacaagacaatgtgctaacaagatggggcttgacatcttgataagttggccaattatccaatagttttattttatactgttgaagattttccccctaaaacttttgcatttttagatcgttcgaatgtactttgagattcatacggggagggaaaaaaatctacgctatgagcgaggcgggattggagcagctgatctcatgggcgaaagaggagtgcaactagctaacctagctacatgtgtttcatatctatcttatatgttatatatacgtcgcattgtaaccacactagagttgcattgtaattatactagaattacattaaagttacatttgaaagatttggtagatttttatgttgaaagttgtataagtaatccttatctaaatagcacacgaccaacttatccatataacatcatttttttgcaagggaaaaaaaatcatattttcatccaaattccgtactaattattaacatatgccaaattttaaagaaaacatataccaaatctttatccaatcaaatttacgaatttacaattgaagcaaactaacaacatccgatcagttttcgtccctacttctatattactataatataagatgacaaagtagtagttgtattctcaatttatacatggcataggcttgtaatttcttacaaactcctagggcaaaggctatgaaagatgcagaagcggggcctttgcccaacttaaattgatgggactgggcctagctaactgactaggcctagttgggctttccgaaagcgccccacatatcgggcccatcaagcaacgttggcccatcacatcacgtatttcaattcgtatttcttcagggactcggatgtaaaaaccgacccagccaagcctcctcacccccacctgtcgtcccgtccccaagagagattcgtctcgtcgccgtctagggttttagccgccgccgccgccgccgcgaaaccctcgccgcctcgcctcgcctcgcagcggagtcaggatgttcctcggcgcgatcccgcggcggccgagcaaggaggtggcgtacaagcagctgcgctcccacctcatcgtcatggcctcctgcgttgccgccatccgcgccgccccctacatcctccacttcctcaaccgcgacgcggaccgcctcgagctcaccctggagctctaggccgtaaccatcccccgtcccccgctaggtgagacacccgcttctccctcctctcctcctctttgattggtttaattcgggattggtttagttgggggtgaaactcctctttgattcgggacggaactcgcgatcccgttggagaaaccgtgcggagatcctgtgcatgcttatgctattagatatttacccttgccctaatgatctatttcgaatgagttttgcacggttaggttcatgcttatttattgcacaaacgatttttaactatggttgatgcacctcgtataaatcttgtatggtgggtattcagggttatggtactgtaatgctgggttgcttacttgctttaaacaccactgttttgaagaagctttctaattgttgaatgctgtggagaggatctggtagagttaaatggattggtattgcattggaaataataggatccagtatgctgatctatattcttgtagtattaaatttgtgcaccttgtttagataataattcctgtttagatttggttttttaaagaatatttgggttctgtgagtcattgggctatcgttggtgattcgttttctttcttcatggtactatctgccatctttagatgccaattcttttttcaattggataatttattattttttctgcacataacccttgctggatttgatgcactcgaaaacggatggcctaccagtgtgctgtaaatcagtagcatcttccatctattgacaacttcagagttcatatgcatttgttcatattatcgcgcaaactagactcatgtctcagccaaacactgtattggtcaaaagctgttttcaaatttcttgtcaaaacaaagttcatatatgatgtaacagaagaataactttaaattttgttttcctaaaaaaatcccacccaaaacatattatgtgacaagtcattaacaatccttgcaaaccgacttgactgaaaggattaagctatcttttgataatgttagcgcttctgtttctataggaatttctcttggtatggtcctcaaagttgaactttgacgatagacttacggaaatgcatttctaatactacagaaccgtgatttcacaaaattactttcgattttcgaatggatctaattgttccacttttatatcactagttgtttaatctatatatgtaataagacttaactattggtaaaaatatgcattaattgaatattgagatatgtgcatgcttattagtattttttacctttagttgatttacattcttattgtgccacggattcttatgtttatgatcaattagtgtgcagtttgattgataattatagtagtctttatgtatcggcatcagctttgggtcacatttgtaatgttaatgtaatgcactcctggttttgcagtgttcctgttctatttggtgtgttgtttttcccccaattgatttagaattaatatcgatatattcagtatgttttcaaatttcaccaattatctttgctgaataacgataggctatatcttgtggttttatggatttaatatgttctaaattttaatttttctagctggtcaatgtgtaaacccgtgcaatatgttcgtaatggtacttctactcctgtttggctactatggcagcagattacatacaaaaacatatcagtcttttaagtaggaagaaactagagtatttttaagttggaactggaatacgtgttccaacttccaagcgtgtctagtttgcacccggctactaactaagcctactatatgcctgctgaactttttaaacagtgaggttcattattcagtcacaagtcatcataacctaatgggccttgttgaaactgtttctctgttcactagcaactcaatcaatagttgaaccgttgatgtgctcagtgagtttgttcttgtatctggcattggaatccatcattcgacccagtttttttttataaatgatctgttaaaataaactaccctatattaaatctgcattattttttggttccattgtgggaacttttgtggctaaatgggttgatagcatgttgctattttttcacctaattacaaatgagcctcacactgatttgtttctgattcttgttaggtgctgcagcgatggacgaatcatcttcgccttagtgttccatggatggttgcaaagctatgtttggataggatttttgcagaccttataaaacttaatcctattatttttgcttgagaggcatttagctttctgtacgataactcaatggcagcactcctcgacttatctgttctttaagtttgcagtctttgcaataggcattgtgtttcctattgtgcttatattttaactggctatggagtgatttctgctattttacttgaggatagtttagaaaaacaagactgagccatggttaaacaagcaagttaagatacatggttcggaaaagctttctaagcaatttcataattgttttgagggaagttcactaaacgttttggaaattacggtgagcgtaaaatgcatgtgctggcaatatgtttgtcctctaatctgatctggaccctcggttgattgaaaccatcttgcatgtcgtggatacgaggctttgttaccaacagttaaaatagcaacaagagttcaagatcatgaatgaaccttttcccttctcttcttgtgcttgtttttatcgtccctggcagcacggcttctaccggaaatgcttaccatgcaaggtggtttataagcatgcaatgctgtttcaaaattaaaacatttttttattaaattatttatccaaattctaaactaattatatttttggatttcgttacaactaaatctttataacaatatatcacatgactatattatgacaatttttttttaactttttaaatgttgcatatgtaacgtttcaatttattgatgtttcactaatgcatttgcaatgttgcatgttatctttttatttgtttcagaaaatattttttttatgtctcaataattacagtttgatgtttcaagctaaatgtaaatttgttaacaaaatcaaatattccaaaatgcttatagtcatacatacgacgcaatcacataaatcggacgcctccactccatgctactagtatattaaatagatgctcatagccatagcctcatgtatgatgatgcatatgcttaaaatgatgttttctttaaatgatgttttcttttatgttacatatcaatgatctaattatatcattatattcgttataattaaatctttatcacaaggatcttacttattatattctaattattttttaacataatttttaatgttgcgtatatttttatttagatgtttcaataagcatttttttaatgtttcactattcatttataaatgttgcacacaaacttttttttgtttcgtactgtctacaaaatgttttagcaaaattaattattgttgtgaatatattgtatgtttgacatgccttttttaaaatgctttactagttgggactaaatgtttcatgagtgattattgatgttgcattgtatatctttgaaacacatctgatcaaatgatgaaacaattcttttataagcggtgaaacaacactcaaaaatttcattcaaaatataaccatatgatatcttattgccaagatttaattgtaactaatataacaatgtaat

SEQ ID NO: 21315 - DNA, 9079 bp, Oryza sativa
  unsure (1)..(9079): unsure at all n locations
aggggcggtgccatggggcaatcgcgcgggattgatgtggtctcccggattggtcgcacgacaccggcgcggtgccacggtctgctggcgcagcaccaacactattttagacataatcggttccacgtaacgatgccgtgggaccgtctcggtgctatgtggtctcgctggccaccacgctgccacactcttggtccgtgagaccatggcggttccgctcgtctgctcagcgggaacggctcgagcggcgctcccacgtattcgatctgtgggatgcgtatatttgtgccatttcttcctatgaagatatataaactcaaattattaaaaaaatgggtatattctcaattttttttctctatcttttctgattgtatatttgttccttgtacttcacgctgttttaacttggagaatgattagtttatgatgagaaaaatgctaattgtatattaagcaagaacagacagcactctgttgaggaaattctcagcttggagttaattagacttgaggacacctcaatgttgtaaatgtcccacaattacttccaattcctgtacaccacattttttacgaactgttccttgttattcaatttttgcacattagtctaacgtactgctatgtttctctttggccttcttaaaatattaaacgaaaatgcccaggataaattgtaccaacattatgccactccaagctaatcgtataattaaccgtgtgaacaatttaaacttgcaaagtgttctgttataataatgcaaagagctccaacagaagaagaacaatacatttgttttgagcaataacattagaggcttaagtagcggcttaagggtgttttacactttcccaacttttattttctcgttttctatataaaaaatgttttattacctccgttttatattataagtcgtttgatttttttcgaagtcaaacttggttatgtttgaccacgtttatagaaaactttcgtaacatatataaagtatcaaattgtttttattaaatctatcattgaatatattttaacaatacgtttattttgtgttaaaaaaccactatatttttctataaatctggtcaaacttaaaaaaaattcgagtagaaaaaaagtcaaatgatttataatatgaaactgagagatcactaattatttacgcatcaattcgtcatttctttttattggtcggtgaggaaaaactcgagcatgtgagcatatgcaaacaaaatttaagcatcgggtttttccctgtgtgctattaagaaagatggtgtctacctccgtgccactaaaaagttcaagcctccttctctatcatcgttgaactttatcgagccctccacactactctctcttctccctcgattcccctctctccgcaacatccgcgtctgcctcactcctggccagcgcctagctgagcgtggccgagccgctggacgcctgcaccgccatgctggcctccccttccctcgttgccgccgtctccgccgtctctgccgagccaagcggacagcgctgctggccacccctccaaccggcgttcgacctcctcctttgcccggcgctgctttggctcgtgcaccccgacggcttccgtcgccgccgtgccggccttcccctatcctcctcgatgccgcagggccaccttcatgccgcagccgcgcagggccgatcggcgcctggccgccacccagccggggcaccgcgccgccatcgcctcgacccggtcgctggctgcgccgccgcccctagcctcgccgctgcactgggccgcccccgaatggttgccctccgaatggcacacaaggaaacaaacttcattaaatgtcctctcaagcctaagggcaactaagttatttggctgcgccgttacccaccgttacgactaaaaatggacgaaataatgtggagggcgtgataaaatttgatgatagtagagagagaggctcaacttttttttaatggcacaccatctcaccatctgccctttcttaatggcaaacaagggaaaaacctccaactctgtgctgtacaacggctaaatattcgagaaaacccctcatattattatgaactgaaacacaaacttcgtcggcagctgaggcgcgatgcgtggcggcgcgccacaactggagcggccctcccctgagcctgaggggcagaggtgggctagctggagcctggaggtggcagcggccgccgcgcactcgcaactactcacaagccgcctcggccccctaatcttccgcgagaagaacgcggagtagcagcagcagaggcgtgcggggtcggtggactcggtgctaacggagcaacctttctgctgggtaatactaagttcttgccaactctaatatcgcctgcaaccgttcttagctatgggttgccgccgcaacggcctaaatcggttagatcaaaataatccatctttagcgatgaggcagatttattattttaacacattgaaatcacatcacatggtactgtactagtattattgattgatacacttgtgatgtcatgccagtaataatgctgtaatggtaaaacagagggatctaaaagcatttgactgaacaagaacagtaggatcaatctttgtgcatgccttctgggatcagtactgattgatgctgaacctttctgctgtttcttgtgctatgtatgccttgatgcagtgataagagcataagacctcttctcctgtgagcagaagcaaagcaccggggattgattctggcacaggcatataatgcagtaatatgcctcaagacagatcatctcctttcggtgctttgaaattttttcgccaaccagcaggtgcgtgcaaataccgatttgcttctcctgctagtctgcaagcagacagccattaaacaattgcacatgcctaaatcagaagcaagccatttgattgggaactccatcaaaacaatgacaagaagattctggtcctcacatcatgggagcactaagctatgtcactgtcactattctggaaatttctcaaggtatttgatagctatcgcgatttctgtaggccttccagactctgttggaggagttttatcaggacctgtgtcaaatgtggcaacaaggtggtactttggtatttggtagaaatttatattgaaatgatgggggaggatcggcattctaatttgggctgtgtttagttcgtgtgccaaattttttttgaagtatacggacacacatttgaagtattaaacgtagactaataacaaaacaaattacagattccgcctgtaaactgcgagacgaatctattaagcctaattaatccgtcattagcaaatgtttactgtagcaccaccttgtcaaatgaggctaaaaaaatttgtctcgtgatttacatgcaaactgtgcaatcggttttttttttcgtccacatttaatgctccatgcatgtgtccaaacatttgatgtgacggaaaagttggaagtttgaatctaaacaaggcctttggttcaaatgtgaaacttcaggaagaaattgagacccgtgcattccccaaaggtgcttctccattacagcacatggtcaacaacattacttgctgtaggaaatgaccttatcatcatgcacactggtggtcctattcatatatctagtctctttcgcagttcccctaatttttggactgaagttatagccttgtaatgatgtgatgaacaatgagattgcgctgtcacatcaagggaaccccagtccctactaatgtaatccacataggtcaaatggtggttaatttggcactcttcttgtaccttccgagccatgttgaaagttccacagaaatattgggccatccaagtagtttctgaaagcaacatgaagaccagaagcatctatattagaacttgatcacttctcttcagcctgctctgggttgctgaaagaagttcttgtttcttagagaactttgaattttctgaagataacagtaaagaaagggctcctttcgcaatcttcacataaggggagggttcagtaacaagttgagatatgggaaactgcgccagctttactccaaaatggtatacatctgatctcgctaaaggtttcctgtcatactattgcctcgcatcttttgatatgcttacttctgtttatctctgtgtttctcaggggattaagtgatcttcactgtaagggtatggttccaattgatgaggatgaaactcacgaaggcataaagacaattaggattcagaaagcctgtgaattcaccaccagttcagttctttgcgtctgcattatcacctggaacatgaacggcaaggtgcatataatttacttcatttcattcttctagatgatgactgcgccattttctttgatctgatattcattgtttgtgaagatgtctgtggaggatgtaacaaagttagtgagctccaacaggaagtttgatttgctagttttcgggttgcaagaggtaccaaaatgtgatgttgcacaggttctgcaagaaaccatggctgagacacacatgtgaggacctttccgtttcaactcctcaattgaatacttggaaggctttcattgtattttaatatagtttaatggttgtcaaattttagtctattatgccagaaaaccatgcagtctcttcagatgtttctttttggagcaaagagttcagagaaatacatcagaggtgattccatatttgttcagcacttgaacctgtacatacatacatatggccagatgctgttcatgtaaaagtatctttttctttgagtgactaaaatttgtttaatttcctaattttgcatagagttgaaggtggacaaacatgcagttggaggttgtggaggtataattggaagaaagaaaggagctgtagccatgtacatcaatttcagtggatccgtatgtttttgtatcctgccatcttgcaggtttccttttcagctttggataatttcattttctcagtgtcacttatactactaaatatgtgccaatgctgatgtcctttttgttatcgcttaaccattcaactgtgccattgctacacagtatcaaatggaactaaagtagaactgttttacaattccctttgctgaatcacttggatcaaaagatatttgatgatcaaaggatatcttgacaccataaactaccatctgcttatactgatgacaagttgttgctaatttgccatgaatcaaatgccattacaaacaactaacaggatcttgctgaagtgtagctcatgaaaataaggtggagaagaggaactcagaatgccagcacatttcacactcactgttctccaagaatgatatacagtatactaaatctgcagacataacggtgtggcttggtgacttgaattacagactacagggaataagctcaataccagcaaggaagttgattgaagagaatcgtcaaagtgtaagtgtatgctgaaattacatatttttgcaccaggacgcctcatatattatatgtattaattatttcagaagctaagaggcaaagaccagcttctgcaagaagctgaaaagggtgaagtattcaatgggtactgcgaaggaccttgttgtttaagccaacgtacaagtataacatagggagtagcaactacgatacaagttataaggtatctctagttatatcatttgtgaatctaaaatggcaagctgcagatctctttcaattgtggatattttccacaatatctaatggtttgatcttcacttgcacagatcagagttccttcttggacagataggatattattcaaagttgaccacacttctggcttggatgcggtcttaaactcatacgaagcacttgattgcattaagagttctgatcacaagcctgtgagagcccatctttgtctgaaagtacatggtgacagtgcatagatagacatttccagattaaaaaaaaggagaaatataatttaaaatgattaatttgtacaattgtgtataacccggtgatgataataaagtatggtggtgtatctgactatctgctatgctgagcaagaccaactgaccacatgaggcatggttaagcttaagcagtactgactactgaactatttctttcctagttgcaatagccaacatatgcagctcatgtaaaacctgtcgacatgcatgtttctgatactgttctttcctccttccgtacgtctgatgtagaagacttctgcaagttgcaatgcataattgtgctgtaaatatgcagcatagagagtctccataacgtatggaggttactgaagtgtgtttcaagttacagttgtgatggagtatagtgaagtagtatttggagagtggagaatggggttgacttgtggagcaaaataatgcagttccagagttcacttctaggatggtacagagggaaattgtatctgaaaaaagagaagcataaatgtttcagaaacaccatgccttaattcttgcatgatgttaatacatattcttgctaaaatcagtgtttcctttgctgattggttcaaggacagtatggttaataatggtttaacactcaaaaaatggaatcatccctactatagacagtcttggtgttcctttcagcaagtgcttgtcacagttgcgtcggttaggatgcatcttctcaagctagggtgcgtgatccttcaattttggcagcttgtctactactagaaagaggttatacatcttttgtctggcctctggccttatctttcattcactgtttttctgtacttcttttcttgagatgaattgatcttttttttttggtaaaacttgatgaggtgatacttattgatggagatgaagagaaaacatagtagaaaattgtcagatgccaagagcccaagagaatagaacacatggtgatttggctaggattatgtccatatggagcacttcatgataattctagtcatcatcatcatatattgaaaatgatagttttaattgaatattgtgggtgaaaatgtgaaccataggcccatagctaactaacgaaatgcgttgtgtatgtgagcacttgtgattaagctaattaattaggcattgcatctcccgtccatttgacgccttcaaatctactttcgcaaatagcaccttacaacttgtaacatatttgcatcgtcgtagctgttcgtcagttccagtcttgcagaatccaaattcaaagtttgtacagataaacctttttgcaattgtttccctgccatgaggagaacctgctggcatctggtaagagccattttaaatccagctgataaaagtttgtaagttgtttgattaatagatttttaagtctggttataagtatactaatcctttcagcttgtaatatttgacattattaacttttagacatagtttgattattcattttattcaaaaatgtgtgcaattatgtaatagtacaagtcatgcttagattattggtaatgataaaataaatcacatcaaataatagttgtgtagtaatttattaaagcttggccaacccacaacaacaaactgccaacataatccaaatcggtgatgtggcgtttccaactctttgctaatcatcgatgagcctagcagctgccaagtgcaaccaggctcgagcgccggtggtgtttagctaacactatctatttcaaaagggaagactagatagtatcggtagagccaggaacattaaaaaaaatgttaggcgccgatagtattgatattgttttaagaattttctttgttctagtaaatacaacaaaaaatttcaaaccatgggacaggccaagctcatggtcgcctctccttgtctttgccgatgctaggtagcaagtgagttggcttagttacaaacatccattgatggcttgttttgcaaatgagattatgaactaaagggtaaggttcaataatatccatccattatttttattgggcttcccctaatacatgagtgatcgtgcacatcaagatacgtgattaggaaacgacaaaaaacagcccaccctagcctatgtcactggcctaactcatatgctctctctttctcttttcctatcctcttcttctccgccacaaaaggaaggcgagcttacgacgatacaacaaggaggttgatcaaggcaacgcggcgacgaccttccttgccccttcattttccctccagcaaactctagatctaggtnagctccactctcccacctcctccgccgccctaccatccttctccgtctcacttttgcccccgccacaaactctagtctactgcccgctaccaacccagtggctcgcggccgcccacccttgttcgtcacccaccgtcggtctgctgcctcctaggtaatccctcttaagcttgatccccacttccttcctcctcaaatctcacccataaaactctaatcctaatccaacctagctgcttctcgccacacagtcgaaaagtgatcgtgtgcgcgactgatcgcgaggtaacattttaacttttagctcatatataataatccactcattcacattttccaatcccatcccttataagttataacccattgccaaagagggcctaaatagatttctttagccatttaaaaaattctcaaatttccaggactgtgagcccctttctgtaaaatcaccgagaaggcctcgatgaagaagaaaaagggaagaaagagagcgacctctcaccgtcgctccaaaaaaccacatcactattcacaacagccgcgggaaggtattaaaatcgagagcgcccaaccaccgctgctctctccctctctctgctgcatccgcccacgaggtgttcgacggaatgcgtgagagagacgccgcagcgggcgccacccctccccccatgtgggcctcctccctactccctcttccccctggccacgcgcgggaggggacggggggttgacgtcccgcgacagcgacccgggcggtgggcgagggggagtgtggtgtgtggcgtgggagagagagagagatgtcaccttcaaccccagtttttcctctttccttctcttttcttcttgacttggcctactgccggtcgtccctccc

SEQ ID NO: 21316 - DNA, 1463 bp, Oryza sativa
gcgtccatgtcacgctttcccttcgttctgtttctctctcctcctcctcctcctcctcctcttcttcttcttgttcgtcgggttcttgcgtgaggcctgcttggggggatcctcgggcttcttgtcgcaagaaaccaaggaggaggctttagccgaattacagggctacttggtgagtcttttggtgatcctcaggcaaattatggtgatccttagttgttttctgtagaacttggggggataatgatggcgttttgcggtgaattggtgaattgtgtactttgtaccagctggttgctgtgtggggactggcataatgacttttgtttctgttaaaaagtacaggagttcaggcttgaaagtggtggccaggtggggttgccctgatgccttcaatgatctgattgtttctatgcggtccctgtggttctgaactcgaggtatttttttttcctccagtgatatttgcttttccttttttttttccttcgatactgcttgcatctgtgttgttaaaagttccatttttcatactctttattgtccgttttgtcttcgttagtatctgctcattggcatcatctgtgttcaatgattgtttgactcatgactcttttatgtgctttaccatgatttcaagatcctctctagcttttcgaggcctcctcatggaacaaatgtttacattgatcattcaatttatctattgtctttgctaatttgttactactaacaagagcaatattgacgcatcatactgtaatggcatcacaaaaatgtaaaattgctaccagcgggtaccacatagcctgagcaactgtttttttgcaggacccgggtctggattttgtggaatttgctgttgtcagaggttcgtgtgtattgcttgtgttggtccttttcctttattggctcggaggaataccaatcatagggagatatgccaaagagactggacatgtaatgtgattggttgctggtcattttagttcatataagagcattccacattacattttcatttccatctgtatttttctgacttctcacatacctggccttttcaaggcaagaaagcaattttatttttaactggatcctgtcatggataatttattccttaccgccaatgtccaccaatttatagaggtttatatcttcactatgtgcttgcatgccaacaattttacctttttaccagtttggaggcacaccaagccaatatctaatcagataaatgaatatttgatatcctgttctgtatgtagttgatattctgtttcaaaacaaaagagcacatgcttgaagcacccagtaaattatacatgtgatgggcagatggggcagacactgtagggatttttatctacatattgtctcttaccaaatacatgctattgcagtcttcttatttatgagtactatatacatgttattgcacaatttcaatatgtatttacaga

SEQ ID NO: 21317 - DNA, 1970 bp, Oryza sativa
  unsure (1)..(1970): unsure at all n locations
gtcggaggtaagcatgcatcatctcatgagccagaatggagccagttaacagtctgcatgtaatcaaaataatggaaatgaaaatctatgcattcaggacaaataacttctcntaagttggtaggccagttgcataatcaacgccaataacaaggggaaaaacgaaaaataatagtaaatgcagtataatagtactcattagttagatcgataaaacatgaaaataattcaatataccttggaaggccatataggataagaattgcagtcacttcacagcgtctaaccagtttgtatggtcctgtaatcatgtctacaatcttgtttcctggtccaattactggtcttcttagtatctgcatatattatgttatttagccataagccaggtatcaagttcacatattcaatagataactaaagcaaggcattatttttaagaacgtacagttcggacaatttgctcttcagataggcagagacctctggtttcagcaaggtgatgtccctattaaggaggtcaaaggaacaataagttaaataatgtacattactgttagaatattataaaatgatcatttcacttacagttttctcggcctccatggcttcatttaaagcttgtcgctcaaccaacagcaagggaatttgttgttccactttcatgttcaaaccctcatagaattcttgaatatcaatatatagtggttggcattcgtctgtgtccattattgaagtattcaggcattccaaacagagtttccggccatcatctaatgttatgtacttactatcctttggctagcattgagattaaacaaaagaaaagaagggaagtcattagattcaccaattcataattaaaatacgttttcactacgaatggacattgctatgaaatcatcaaatgcatgtgcataggcacatattgaaaacaaacacatttaaattgtaagggtgatttcgaaaaaaaatttgtaagggtggtaacagaagctacatgccaaacttctattttttttgttgagggaacatgccgaagtgttagttacatcctgacacttccatttgaatcactacatgtataacttttttataggatagcacaaacctccattcgttcacaactgcagcacctaggagtacgatcagtttcatgggcaggacaatacttctgcatccagaaaggatgggcccgatattcaatgtggccatctttgtttgttggaatctgatcatcaaatgtcattagcacaactcaacagataaagttaaaaagtagctattactaaattctcatgctcatccaacatgaattcttacaaagttcttgcagacatcacattttggatggaaaagctccttatagcaggatcgatggtatgggttaccttcatgaactgcaaacttcccaaatgaatggataatgtcagttatctcatttacttaaagcatgttatgttgaaatatgctaggtctctttacctcatattctgatattggcctatcacaagcaaaacacctgaagcactgggggtgccaaacagaatccatgcaactaagaaaccgtccttgaccgattggagttttacatccagcacaaaccctacaccgtcaatgtggtacatgagaatcagagaaccctaagggttccaccgcatgcactagaacagggtgagaacccaagtagaacagacatgaagaagataccagttaaaactatgaatgcgtttataattttcatacccataccctacccaatcaagatgattataagatagtacatatattcagtgctaataatttgggttcacaattccacaacgtaatttttgaatttcaggtctactagcaggtcttccagtaggacatttttccggtcgagaatttcgaattttgttgggaatttagaaaaaacaatcgatcatattcagcaagaaattgttcaaaattctagattgctaactcaa

SEQ ID NO: 21318 - DNA, 2665 bp, Oryza sativa
ggaaaaaattgctcttgtctctttctgtgatgtttctgtggatgtttctgtgatctatcatctgcttagaatacctgtgcatcatcttgtgaagattggcttagtctcctgtttcgaaatttgaatttcatcctttgttacgttacccagaagttcctgtcctaaaacaccggaagttccgggcctggcagaccggaagttccggtgttccttaccaggaagttccgggtctatttgaattttaccgctgcgatttgttttcaagttttcagggacagcctattcacccctcctctaggcttcgtcagcacgttcaattagtattagagcaaggtactcttgattcaagcttcaccgcttggagtgatccacaatgtcgcatctagagggaaccgaagggttggatgacaagggagacgcttctagcaccaaggatactggacccaagggagctactattcactttgattacaacaaacttaatgttcctcctcacaactttgtctccgtgccttccgggcgtgctcctcaatttgatgggacacattacgccgcttggaagcacaagatgaagttgcatttaatctcgttgcatccaagtatttggaaagttgtttgtacaggtattgatgtaccccatgatgacatggagctcacctcggagcaagagcaactcatccactgcaatgctcaagcttccaatgcaattctctctgccttgagtctggaggagttcaacaaggttgatggacttgaggaggccaaggagatatgggatattttgcaattggctcatgagggatcacccgccgttcgtgaggccaagattgaattgttggaaggaaggcttggaagatttgtgatggatgacaagaagacacctcaagagatgtatgatagaatgatgatccttgtcaacaagatcaaaggacttgggagtaaggacatgacaaatcactttgtggtcaagagacttctccgtgcttttgatccaagaaatcccactcttgtatcaatgatacgggaaaagaaaaactttaagaggctcaccccaagtgatattcttggaagaattgtgtctcatgagatgcaagaagaggaagctcgtgaagtaaggcaaatggtgaagaatgccgccatgatcaaaaatcaagaagtggctttgaaggcaaaacaagaagaagagtcaagttgtgaagaaagtgaagatgaagagatggcttttattgtcaagagattcaagcactttcttcgcaagagtggctatggcaaagggaggaaggatgatgacaagggaaagaggcaatcaaagagagcttgcttcaattgtggcgaatatggccacttcattgccgattgtcctaagtcaaatgaagctaaggctaagggaggcaagaagaagccggagcgtgctcatgtgacagaggtaaacatggcggaggtgtggtactccagagatgaagaagatcccgaggtcaagcccaagcccaagctaaaagacaaggttgaaggagaaggtggtgatgctaccgtcgccttcaagtcatcctcttcaagcaagcagcgtctcttcaacaacttgagcgatgacgagacgactcctaccactactcatgtttcatggcccaaggccgcaaggagatgactcaaaagccctctcacacttctcttgatgttgattctagtgatgaggaaagtgataatgaattagatgatgtgcttaagagctttagcaaacccgctatgcaacatttggctaagttaatgagagctttggatagtaaagaacaatcactcgaaaggcaagaagaattgcttattcttgagaagaaaagaaaccttgccttagaggagagcttagctaaagaatgtgctaaaaatgaacaactagctaatgagcttaatttggctaatggttctctagctagccttagggatgtcaatgaaactcttcaagagaaatttgctaatttagacaaaagtcataaagatcttgacgttcaatttgacactctttggaatagcacttctcaaccaaatgtggtttctaattcttccaacccatctactagcaatggttgtgctaggtgctacaacattgatttgaactcttgtactactaatgttgatgctatgcaagctcttaagaaagagaatgagaggttgggcacattggtgaaatatggatgcataaagacgtaccattcaaaagatgccctttacaagaccatcaccgctcatcctaacaaggatggacacggactcgggttttcaggtggaagtcctgtgtctaagcgtgtgatggtaaatggaaaagaatgcttgatgtttgtgagagaaggtaaaactccacaagcaagtgaggagactcgtcccttcagtggtcaacacccggaagttccggacaaaatgatcggaagttcctgccctgtaagacaggaagttccggacattttgacaggaagttccgggcttctgataggccgaaggggctgaccagaagttccgggtataataccaggaagttccggccagagggtctttactatgattcatatgtaatttccaataattcagagggcaaggtggttgcttactttaacgggaattacaatgatgagtaccacacttgtgtgtgggtgcctaaggctttggtaactaacat

SEQ ID NO: 21319 - DNA, 25903 bp, Oryza sativa
tttggcatctcttctaaaaggacaacacattcttggtttatctaatgtttcttttgagaaggatcgtgtgtgtagtgcttgccaagtcgggaagcaagttgggagtccgcatcctatcaaaaacatcatgactacaacaagaccactcgagcttcttcatatggacttatttgggcccgtggcctacataatcattggaggtaacaagtatggttttgtcattgttaatgatttttctcgcttcacttgggtgtactttctccatgacaaaagcaaagctcaagatgtcttcaagcgtttcgcaaagcaagcccaaaacctctatgatctcactatcaagagggtgcaaagcgacagtggaggagaattcaagaacactcaagtggaggaatttcttgatgaagaaggaatcaagtacgagttctccaccccctatgatcctctccaaaaaggcattgttgaaaggaagaaccgaaccctcattgaagccgcaagggcaatgcttgatgagtacaagacttcggatgtcttttgggcgaaggccgtgagtaccgcatgtcatgccatcaaccgcttgtatctccacaagatcctaaagaaaacttcatatgagctcttgagttgtaagaagcctaatgtttcatattttcgtgtctttgggagcaaatgctttattttgagtaagaggcctcgctcatctaagttctcatctaaggtggatgagggattcttacttggctatgaatcaaatgcacatgcctatcgtgtcttcaacaaaacctccggtattgttgaagtcactagggatgtgacatttgatgaatctaatggctcccaaggagagcaagttgttgtacatgttgtaagtgatgtggatccaagtcaagctataagtattaaggctattggagacatacgaccagtcgagacgcaggatgaccaagaagatagggatcaacctccgtcatcaacatccaatagccctacaagtgttgtgtctgctgagccggaagttccgggtcctattgactggaacatccggacatctccaggcccggaagttccgggttctctagtccagaacctccggaccagtggcagtgaagacgtgccaacggcgcaagtgaataggatcgatgctgcgggcactttagagcatactgattaggctcaggtccatgattatgtccaaagagatcatcccgtcgacaacatacttggtgacataagaaaagggtaactactcgctctcgtgtcgcaagtttttgtcaacactactcgtttgtctcttctttggaaccaaccagggtggaagatgcgcttggtgatccggattgggtgatggctatgcaagaggagttcaataacttcactcgcaaccaagtatggactttgatggagagacccaagaaaaatgtcatcggcaccaagtggatctttcgcaacaagcaagatgaacatggggtgattgtaaggaacaaagcccggttagttgtgcaagggttcacccaagtcgagggtctcgattttggtgaaaccttcaaacctgtcgctcgccttgagtcaattagaattcttttagcctatgccgctcaccatgatttcaggttatttcaaatggatgtcaatagtgcctttctcaatggacctatctcggagttggtctatgtggagcaaccaccggggttcgaggatctaaagttgccaaaccatgtgtacaagctccacaaggcgctctacgggctcaaacaagcccctagagcttggtatgaatgtctccgagattttcttttaacaaatggttttgaaattggaaaggcggatactactctcttcacaaaaaaatttaagagtgatttattcatatgccaaatttatatcgatgacataatatttggttctactaatgcctctttttgtgaagaatttagtagtatcatgactaaaaggttcgagatgtctatgatgggcgagttgaccttcttcctcgggctacaagtgaagcaagcacaagagggcaccttcatctcttaaaccaagtacatgaaagacatactcaagaagtttgggatggcggatgccaaacctatcaagacacccatgcctactaatggacacctagacctcgacgataatggtaaatgtgtggaccaaaaggtatatcgctccatgattggatctttgcttcacttatgtgcatctcgtcctgacatcatgcttagtgtttccatgtgtgcccgttttcaagcggagcctaaagagtgccatttgattgccgtcaagagaattctaagatatttagttcatactcctaatcttggcttgtggtatcctaagggttgtgactttaagcttttgggctattccgattcggattatgccggatgtaaggttgatagaaaaagcacaaccgggacttgtcaattccttgggtggtcccttgtttcttggtcctccaagaagcaaaattctattgcattatccaccgccgaagccgaatatgttgccgccggttcttgttgtgcccaattccattggatgaaacaaaccctaaaagattttggctacaacttctccaagattccactcctatgtgacaatgagagtgccatcaaaatagccaacaatcccgttcaacactcaagaaccaagcacatagatattcaccaccacttcttgagagatcatgaaactaaaagagacatatgccttacccatgtgagaaccgagagccaattagccgacattttcaccaagcctttagatgagaaaagattttgcgagcttaggagtgagctcaatatcttagactgtcgtaacattaggtgatgggtggttggctaattcatagccaaacatgtatcactaaaatgtaaattaaaaaaaatgagcttttgtgtcttgagatcacttcttgtgtagaagatagtcttgataccaggaataaagctcaaacatttcccctcttatccaaaaacccttttgtgaaaatttgcgaaaatttttgtgtgtgtttttattgcgaaaatttggtttttatcactttcttgtgatgtattttgaccattgttatgaaatgttgattgttggctagtcgtatgcatcataagtctttgcttgtccttagttctccaattccattcgttgttttctcgtctattcctttgaacttgggcctgactgccctctgttctgtcaggccggaagttccagccaccctagtctggaacttccgagggacgggggtataaatacccagggggagcccaagcctgtcatctctctcctcacttcttctcctccccgattcccaaatcctagccgccgctacagtgctcctctcggcgatttccacttccaaccgtggaaatttgattcctctccgtggaatcaaccacattggtggctaggaggttcatcccgcgatcgatttatgatttcctctctcaaagtagcacttttgatcttcccttttggttcatcatgtttttgccccgatctctaaatatgtgaacccagggagaaaaccttttggatagaattgttcctgctaccttgtagattgccgatctataggattttatcacatgcactgacattctcttggacctctgttcttcctgcttgtaggccggaagttccggtgttcttggcccggaacttccggtctctgtccagccagcccgcaatccttgattcttcaaatttttcatttaaccattgcactccaattttgttgattcttgttgcagtggtcagtatgcctcgtgagaagagacagaagctgtcacaggatgttccctctgactcgagtcccctggttcgtggtcctagggggagattgggcaaagaaaaagtgggagatttttacagtgggagtcagattctgattcattccaggagggctggtagcattgtcattcgtgatgctccccgctctccctctccagttgcatctgagtcagacaatggtggaaatgaggatgagcctggttctgagagcaatcctttaaggctttacaagacgagggctgttgatcctgatcctagacatccaagggtgaactatctgaagaatttgctaaggtgtgcaaaggatagaatggtgagtcctgatacaatgactgctgactctcaggatgacagattcaggaccttggtgcagattgattggtacaactctatgatcatgcgaagatcttatccagtggtagagatgaagtggctagactggcagtacatgtcctcaaagaacaacttggttttcaatgaggtgcgcaaggtgtgtgagcgcaagcatgtggcagatctgttggccttgcagtattcctagaatgaggaagttattggtcagttctactccaccgctttcttcggcaccaccaagaagggaattgattttgtgaagtggaccattcaggggcaatagtatagggtctctatggcacagtttgctgcagctttggggttagatgatgatgaccttagtcgtccacatatctttgtagagaatgctttgtcagtgacgagcactactttcttgtatgagaaggatgctcccaaggattgtttggggactactcgtgggttgcatccatactatagagtgctttattctatcttcaggtggtctttgctccccaaagtgaatgatgctacagctcttccaagtcggcatgcgctccttctcagtcgcatgcgctacaacaagccagatttcagcatcatgaagcttatctggagtgagatctatgagacagtgtgagccaaagaggggctgcatctatgctccttatatcatgaagatgattgaggcaaagactgggatttgttatttcaaggacaaccagcacaggtcttttcgtcctcatgctcccactacttcagctacttcttctgccagggcgactcgtgcttctacctcagctgctccttcgtcctctgctgctccacagcgctctgagtcttcctcccccataaagaaggctctccgggctatcttttgcatgtgttctaagacagcaaagaaggtgaagaagatagagagacgtcagaaggaaagattggattgcagcaggcaaggaggtctctgatatttctgatgatgaggagttcgttgatccttttgctgcttatgaggctgctcgagacattgctaatggtgagggtccctctggcactactcatttcttcaatgaggagtcctcctactccgaggagaacagcgatgatgaggagtccgatgcacctactgagaatgtgcctacagatctagatgaggcagtggacgccgctgggcaagacattgactctcctgactccggcgacaccgagatcatttcttctgatggagatgatgatgaggcttgatcctcttcttcccttgtgattttatctctttttggtgccttgatgccaaagggggagaaaattgcaatcgaagggggtcaaaattttgttcttgctgcttgctgcctgatctgtctgttcatccggaagttccggacctggcaactccctcgctatatattcctgtcagcttgtccggaagtttcgggtattttatctggaagttccagacctagcagtcctttggcctctactcatatggacttgtggacatgtaataattctcgatttgtgtttggtcctttgtaatgactgttagatgctcttagctgctctttatatatattgcacttcatttatgctatgagtgtcttatttgtttgttttttgtgatgtgatgttgattttatccttttgagtgctcaccatgtcatatcatttgcatatcatatctatttttcttactgcttatttgcatcccacgaatgagcagggatgaaggaaactctcctcggttgctcccttatatatatgcatatgagtttcactcatatcttccatatgcatacactaagggggagtttcattcacctctaaccattcaaaacaaaatttatatcaatattttgtaagctttaaccatgttgtcatcaatcaccaaaaagggggagattgaaagtgcattaatcccatagtgggttttggtgattaatgacaaatgtggttaatggaataatgagttcattgagttactttaacgtgtattagtccaaggtgtggaagatggatgccttgagaccccccaaaagtataaaatcaaagcggaccggaactcgggaagtgcataggatagtttatttatcgcaatcgagtttttagaaaaaatcgtactattaagaggggttccaggtgatgctctgagatatgtcatgtgctcttagtatgaaccaagtgtcaagtttccctaggagtcattcttgccaatactccatctgtccaaaattgcaagtccggaacttcctgtcttccaggtccggaagttccggtcttgtgaaaaagatttttctaaatgtagtctggaagttcctgtcttccaagtccagaacttcctgtctagtttccagttcaaaattgtgagtaacggcaagatgatgtcacctagccgttatacataaccagctcgttcttttggccattccactttcagttttcgaacatagagctgttgctagcctctcccaagtgtttcttgccttctccactcaatctagagtctaattcttgtgagaaagggagattgagagggagagaagaagatttgaagatgtgtgaagactaggatcttgggtgagcacttggaatatctcgtgggctgtcatctcggtgcttattactcttggagatgatctcctagacggttaggtgttgtccgcgaggatccgttgcatattgtggatgtcccgggtaagtttgtgaaggatctcctctcctccgaaagggaacgagataagttaatgaagttcttgtgctgagattctagaggctttccaagtagagcaacccacacttgtggcggatttctagaagtaggttgagttggatcttggtggtcactcaattctagaaattcacctaggggtgtttagggttgaaggctgtggattttctctggggtttttgcacaagtgaggcaaggggttaatcgagacccagctctttggagctcctcaacggacagtaggatcgcaagatccgaactttgggaaaaaattgctcttgtctctttctgtgatgtttttgtggatgtttctgtgatctatcctctgcttagaatacatgtgcaccatcttgtgaagattgtcttagcctcctgttttgcaatttgaatttcatcctttgttctgttactcagaagttcctgtcctagaacaccggaagttccgagcctggcagaccggaagttccagtgttccttaccagaaagatcctggtctgtttgaattttaccgctgcgatttgtttttaagttttcagggacagcctgttcacccccccccccctctagacttcatcagcgcattcactttgtagggaaaggcgggcaattcactttatacactccaacataacgtactcgcaaaaggaggttattggttcactaagaaataagtattgaaactctattttttttaagtaggaaatcaaacttcactcactgtagcagacgtgtgtagctagcaaaattgatagtggcgtgacagccaagtgaaataaatcaattacttgcaacacagtcaaaacagctgcactagtactgaatcttggctataacatcagatcaggagtccggacgtgcacttaataaaaatagaaatcaatctatggatgcgatggtttacaggctatgcaaaggaatacagacaagcaactgaaacaaagttctaatggatcaaaaaataacaagactcacgagagaacaggttgaaacaagaggcttggttagggatgatttttttgtgtggtaattttctggttatagaaagataaattacctaacgggcaatcgtgctctgataccaactgacgagggatgctaggtcccgatcttccgataggtattaataaacagtcgatttgggtggagtcgcgacacaactcgatccggcttctgaacgaacacgctactgagccccgcaatcgcagcaccacgtctactctggttatcaaccgtgccgaaactcggttgacctcgccgagaaggctaatccctacatgcgaatcgaagaacacaagcaagaagaagatagattgcaaccaaattgcatatgaatgattaagcactcggatttggggttccacaaaccgctctagcagtgaaactgttcttgacagaataatctaagcaaaaccccactctaaacgatgacggctacagaattaatatgattaagaacgtcctagggttgccctagggcgcataccccattgggctaacccacgacacaattacagggcccaaaactcaaaatcagattcggactggatgagctatgtggcttgttttgcagattcccggcagctcggtaggaattttgacatgggaccaaaaccatccgaaagtagactccataagctttccaacaagtactcatgggccccaaaactccttctagattaacagctaggtccgtttgaagttgatcctgttaggaggcccgaatccgaatccaaaacgtgtagaactttatctcttgtcttctatggaccaaaagtgatgtggtgagatgaaagaagacttggaaaaagtcttggtttggtccctaatcaacttcttcaatcatccatgcattctttacgctcggtctcttttctttcgcccaagcaagtacctctgcaaacaaaaacacacgaaactcattgtgtagcaacgtttgttcaaatatataacaagtaaatctaatgtagaacatatgcacctttggttgattcatacataaggtagtcatggtaatatccgagctaggtgtgtcctcatttccgtagctgggccggccgcccaaccccgcctaatgggtggtaccgcccctgagtggcacgccaggtagaaagatttttggtgcttcaaggtttcgacgagatggattcaagagatgaattcttcaacaacaagttactcgacgacttcggctgtgagaagatctaacctgaccggatccaatgagatcggaaccatcatcaccaataattcaatctgtcaagatcgcgcaagttacgggacatcgccgtcgcggaggacattaattcaatgttttttgccacgacatcctcaccaaacttttctgccgtattaccgccagctgagttcgattgctttgaggccaagtgctggagtgttccgtctcagacacaaagtgctactgacaaacagaatgctattacatgtcgcctgtattgtcttgccgtggtcagattggatcgatctcaagtacagcagcaggacagccaagcaagaagatggccgactacttcacgcgttgacacatatgttagcatgcatgcggtgggacccatgtacggtattgcatggtgtgtaccgaaggctatgttagccataggtatgcacacataggtatataggcaggccatccacacgtgctaatcgctaaggataatttagtttggctaaaaggtaattagtggattgatttattaaattaatttattaatttcgtagcggcatgtatctacaaaggtacgcaatattttatatatacaatttatcgtacctatttttcagatatataaaatattgtcaggtcaataatttattatgtttatttagagcgtgtttttatacaatatctattgtgcgagagttttcaatgttaagccaactacggtttaatactaggggcttgctctattttcttcaatataaatcatatttgtttacgattttcataatgactgatatttaatttgctcattatatcctgataatactagaagattcatgcagttttttgagtacatgctctatattctctgctatatatcttgtcttctagaaaatatttttcaggaacaattgagcactcgagtaggatgtggtcgagtacaccccattatcgaaaacgttctcgaaaaatgctgagttgtcgcacccaacctatcaacaaaaactgacgacttatcttatgtatagcgccagctacggctagactatttgagagaaaattgttaacggataattcctcacgagcgttgtcagcttgatcacccgacatgattatgaacaagtatccggacatactataagttggatatgtgagtcatgttgggcacatgagatgcacgtataataaccaactctagcacccttataggtgattgagagatgccgctgctggttatcgaccagatagttatagcgacttctcgccgcctatcaatttaaatccacttgtggaccgttggactccatctatcattgtcgaaaactccatgtctctacggtcttacaccaggatcgaccaagtgagtatggcaaatattgataaggggagtcgcggataacaagagatgctttcgcgaatacgttttgtttccgtatgccaatcagttccctataggtgatcaagatacgcctacacctggtcctcgaccagtagattgtagcgatctctcaccacctaaaaattcatcttcaggtgatcgagatacgcctactcatggtcctcgaccagtcggttacaacaatctctcgacatctaacacgataatcaacatgatcgtgatagcgacaaccaagaccgactagatcgctgttgtcaccaggacgacaacgtccaggactaacgacatcaggacgacaacggacaaggttaacgacttcacgacatcacacgacgacgacgacgaaactcgagatccctagactcctagagggcccaaggacgaggccgtaggtccaggagccgaacctctgactacgataattcctcattgtcttcgtcgtcattaggaggcagttctcgcaggtcacatgaatgccgtccatctattactctggattccctttaagtggtcgagatacgactacgactggtcttctactagcaaagtagcgatcctcgcaccacgacttttaacagtcgaggtacgactacgactggtcttctaccagcaacgtagcgatcctcgtaccacgacttctaacggtcgaggtacgactacgactggtcttctaccagcaatgtagcgatcctcgcaccacgacttttaacggtcgagctacgactacaactggttttcgaccagcaacgtagtgatcctcgcaccaggacttctaatggtcgaggtacgactacgactggtcttcaaccagcaacatagcgatcctcgcaccacaacttctaatggtcgaggtacaactatgactggtcttcagccagcaacgtagcgatcctcgtacctcaacctcaaaacagtcgagagactcctccttgttctcaaaccagtaagtcatagcgatctctcgtacctccacttcaagtggtcaagttatagctacaactggtcttcgatcagcagtgtagtgattctcccactacttctgcgatttgttgagtacaactatacacctagtctttgcccggtgtggtggtcatctcatcatctacatcaatttctgtaagtgtttatctgtacaatatttatctgttgatctcctcttcttatatcacctcatcttgaaggcagtcctattgtccctttacgctattctgacaaggctccgagtaagctaagggaatttcagcgggggacgcctagagcagataaggtcttgtcagattctaagagccaaacgaccatgtaaaacatggttatgtaagagtgctcaatagatgcgtattaaccaagctgtgtaatcgaaaattgatttttccaacttcacggctgggggctaggatctatcagtttcagcatggtttgttataagatttaagctgcctttgtggaaaatggcttttccataaaaacagctgggggctaggaagaataccaaacttcgtttgttgagggcaactctagcgagcgtactcttttattgtcacatgcaaatacaatttattttcaatttttccatacatagtatagcatgttacccttgcgcgttcgctcgggggctatttctatctaacaatttgttctgagtattgatttcagaaaaatcatatatcggaacaatcaaggaatatggaatgaagcgatagtgtacccgccgagacgaaatttattgacttcaatccaaattctcgagtacagcaagacgggagacttagtcgcatgctccataccttctcggtctgcagagtatgtaatagctaactagtatacttttcctgacgtaaccaagcggatccaaattaagaagctgttttccacatcgaattaatgatacagccacggtcacagtgatttttgccatcgaagtcgaagcgccgtaatcgcacaaatgtgtggcagatatagaattgtgtcagcaagaaaaataagggatttatagctggttatataatcagttagagcacgacagacacaggtgaaaaattattgactctcatacaaaagccaaatttacacacgtggttcaagagatgaaataattatatagagagcagataaaacttgagacacaccttttatactaaactactccctccgttttaaaatgtttgacaccgttgactttttaatacgtgtttgaccatttattttattcaaaaactttaagtaattatttattcttttcatatcatttgattcattgttaaatatactttcatgtacatatatagttttacatatttcataatttttttaataagacgaacggtcaaacatgtgctaaaaagtcaacggtgtcaaacattttgaaacggagggagtattatactaccgttcacaattataagaatattcaagctttatatacacatagctagacaaatagtactcacttagatgtataaactttaattccttatttgtgcacgggtaactctaatagtatttgctagctctaacacccatatttaaatagccttatataacaagttaaatagtagagccaactattagacatggagtataaattatatcggtgttatccaaaatttgtaggagttagctattacattgtattagctactcaataatcgatttttacatgcggtcaaaattgattttcgtagacagctaggtgactcgcttgcacccatgtgtctgcgaaaataaatttttgcatgtgggtagttcaaccgttttcgaaaatacaatttttgcaagcaaaaccgtctgtctgcaaaaataattttggcaaaaaaaatccaaaaataaaaaatctagaaaccccggaatctaccgccgccatcaccctcggatccgctgccatcatcgtcgtgccaaagccgccaccatcgtcgcattgggatccaccatcatcatcgcttgaagccaccgtcatcgtcatcgctcgaagtcaccggatccgtccctcccatcgcaccgttatcgctcaaagtcacaagatccacccctcccgttggtggatccgcgtgagaggggcggagagacgacgggcgagggggaggagacgtcgaatccgcccctcccatcacacccgccggtggatccgcgtgcatggggtgcgtaggggtgacgggatccacacgggaggggaggggctgcctataggatcaagatgttgaccaaagggggtgaatagacgatataaaaaaataaatgacacctaatcaaaactaacctaaattgctaggcttgatgagagaaaatactaactaagcaactatattaagttttgcaatcctagaatgataagggctcaaatagtccctataaaacaaattgcataaatgtaagtgcgataagtaaatgagatatgagacatggaaattttcacccgagattcacaaaattgacaatttcctaatctccattgagacgagctcaacttcaccactcaaaccacgatgccaccgaaccccttcatcaaggggtgggcaaggtgggagccagtcttgaagtaaactacccaagcctcgatcagtattgtagtcatttcttcactctgaaggtggttaactacaaaccaatcacaaccaacaccgggactcctccacataccttcttagagaggtcaccgagcaactcctccaagccgtctacgaggtagcaaagtagcaacctggctcggagatgatcatgtggcatactagctcaatcaatgatgcaatgcacttgtcttggctcaatctaccgtcaaacacccgcaatgaatggacaagtgctcaagtggtgtggaagtggatacaaggggtttatgcaaaatgaatagagtgacaagagaactcgcttgctgcttgtgggggagtatttatacccctaaccaccaaaacaaaccgttggggctaaaacaccaactcatatgactatacataccagcctccagtgatgaaccctgaggtcctctcgacactcaaggctgttgttggcccgatcttttggtgagttatgataactacgatttgggagaaacgttgacgatccgactacaaccgtacgagacgttgtgttgcgcccttagcgatcgatacacctctccgtgagttattgatcttgtcggtgcagatcaaccctattcctgcaagcaaatcgaagaaacaagcaagaacaagataaaagcaatctgatattgcaaataggaatttaatacgaatgataagttggggttccgaagaacaagcagacggacggtctagccgacacgcgcgctgcaagcaagtagcaatggctaaactttaatctaacaaaacccgagaaaccctgaaggggtaactagctatatataggggtgggaggacgacctaggggtgcctagggtcgtgctccaccagcttggggcgcaccccacatgggccccacctggaccggggtcccaaatgaagttacaagcccataggcccattataggtgatgcaacaccttgttcctgtgattctggccacacgagatagaattcagagaagaggctggatccgttagaaagagggctccgagagctttccattaagtactcacgggccgaaaacggaggtcgtatgcagattcggtggccgtttgaagtcagcagtatagtaggtggccgaatcggattccagcacttggagtacttgatctcgatatcttcttgttcatccatgatgtgagcaatggttgcatccgtggtagccatggtcacatcatcctccccttcttcacggaaaaccgtccttggtttttccatatggtgctctttgcgtagtccatttacaacaatctgtttcttccaatcaaaacaaggcaaactcgagacaatttggttagcaataacatttttctctagcttgcatattttatccacatgtacaggaggttctaaatccgagcagatgtaaactctatgcacaaaatatattccaagatcattatattcaccaaagatgtgaaatataacattggttggatatggcaaatcagacttagcaaataatttctccttgaaattatcgagctcacaaaaatcatcaaactgaacatagcccaaagtatttaaagaagatctcaattcacgctcctctacttcattagcaatgtgaacaacatgcttaaaatcagtgcagtatgaattaacagtaggaatagcatgttcattcacaagttgtggcatggatataagtgaagcattatcgcataactcttctttatcacaaggaacagcaaacaaatcaatttgtgacaaaggaatctcagcagttggttccactaatggttgctctgctatagcatgaaaagtggacaaattcaattcattaacaacacactcacctttattaatttcagcaccattaagtttacctttgatgccctcttcagataatggaggtgcctcgactttgagtgtgatcaatgggactggcggctctttcatgtctctctcctccttttcatgattatgcacttcctgcaaatggttagtaatagaagacaaaaacatagcatgttgcttcttcatgtcctcctctattttactttcagcattgcaagcaagttgtaacaaatgagaaagagatgtatatctttgacaatcaagcatgtcctgaatttctttgttaagcccacataaaaacctcaattctttagcttcttcgcattcatctaaaccacaacgtaataaacaagcttgcatatcatgatagtatgaagtaacagttctggtatcttgttttaaacattgcagtttgttgaacaaaatgtcagcataatacatgggaacataaacatctctgaaatatcgtttcaggtctttccaagattgtggtattttgttatgcctacaaagatgtttccaatcattagaagcatgtttaattaaaacactagaggcacacataaccttttgtttctccgacaagacatgcttttgaaattcactatcaaccgctagctcccaattaatgtaagcacgaggatcatagtctccctcgaaataaggcagtgcagatttgatcttacctagaacatcatcacttacctcataatggtcatgttgatccctcctcatgtctcgacgaagatgtcgatgttgagcgcagctatccccaattatcttgcgtatccctgccattgttagtagaaaacaagaaacatacacaaaaatatgcgcgttcctattaactactaggtagtggcagctcaaaaatcgcacacactcaagcttttaaccaagctcttacaagatcttaccaatgcaagtggaatggtgacatacaccgactcaaccaagcaccccaatgaaggttggatgtatcgatgccttggcaaacacttgcggtagagctgtaatcaaatatgtggagctctgggtaggcttaaatatgtagcaaaggaatagcaaatgctcaaatcagataatgcaaagttgaataattgttcaaagtcaagtaccgtgctggtcctaggctagacgtactagagacgcgagcctagacacaaacgataccacaagatagcactaggaacaactcatgcacaactctgatatatgaagttcagctcaaacataacagtattttctcttttctttctttcttctttcttcttttctttttttttctttccttttcttttctgttttttttttgtgcggctttttttttctttttttttttttgcacctttctgcctttttttcactttttttcttgatttttttttaacaaaaactgactcaaggaccttaatgtaagattacagggactcaaacataaatataaaatttatagggactcaaatgtaaaagtctaaacccaaaattaaaattatacaaaaaatggaatgctgaatttatgccgattccgtttttccaaacagatctcgaaaccgacaccaaacaaaaattcgccaaggtgtttgacacaactcggaaccgtggaagagagggagggagtcggactcggccaaaggggcgagtgggactcggccaggaggtggagtggctggcagccgaatttggtgtatgggataaaaaggaaactgatttttaaccaatccaatctactatatctttccaaaacaatcttgactacttccaaaatcagatatggtaattcaccttcctcctctcgtgcacgacacaggcacggccaaaacaaacacacacaaggatcggcaaactctagatgcaactcaagaactccaaaactaaccgacagaaacttctgaaaactacaaaaatagaaccgtggcagcgagccgattccgttttcgtaggtcccgacaacaacagagacacggtggcagcgacgactgtggtacaaaacgtgaccagaactcgaaactctaaacgaactagacgctaagaccagcaacacgacgtgacgatgcaacacaaaattcaacaaagcaaaaactgaaaagaacaatgcaatggcacaatatggctaggtaaatgatacgaattttttttgtatggctattttctggttataggaagataaaaactcaccgagcaacgaaagctctgataccacctgatgaaccctgagttcctctcaacactcaaggttgttgttggcctgatctttcggtgagttgtgataactacgatttgggagaaacgttgacgatccgactacaaccgtacgagacgttgtgttgcgccttagcgatcgatacacctctccgtgagttgttgatcttgtcggtgcagatcaaccctattcctgcaagcaaatcgaagaaacaagcaagaacaagataaaagcaatctgatattgcaaataggaatttaatacgaatgataagttggggttccgaagaacaagcagacggacggtctagccgacacgcgcgctgcaagcaagtagcaatggctaaactttaatctaacaaaacccgagaaaccctgaaggggtaactagctatatataggggtgggaggacgacctaggggtgcctagggtcgtgctccaccagcttggggcgcaccccacatgggccccacctgggccggggtcccaaatgaagttacaagcccataggcccattataggtgatgcaacaccttgttcctgtgattctggccacacgagatagaattcagagaagaggctggatccgttagaaagagggctccgagagctttccatcaagtactcacgggccgaaaacggaggtcgtatgcagattcggtggccgtttgaagtcagcagtgtagtaagtggccgaatcggattccagcacttggagtacttgatctcgatatcttcttgttcatccatgatgtgagcaatggttgcatccgtggtagccatggtcacatcatccagtcactcagaccaaccttggcttgctcagaccggtatcggctctggtggctctagattgccaagtcatttatggccgcccaactgactcgctaggcgcccaattagaccgagtcgggctcaatcagactggcccagacactacgattagaccggtcagattctccgataagacctaccggggacataaaagatagatgaatgaaaaacgaaccaagcaccctcatgcatatgtcctaatgtggtattttgatcacttcgaagttactacccatcttgagagtacgtcaaaactagaaataaaacctagcaaattcaatccctcaacatctcgatcaataaaaacgaaaagcaagattaatcaacaccacaaatggctctccgttgacgatttgtgtttgaagcccgacactgatggctattgtcagtgacggcatgaagtactagcccgttacggaggtgttttgcccaaactaatggcctgtttggggagctttagattctgagaagtagctgtttggtagccagcttctgagaatctggaaaagctctaaaacccagcttctaacttcttagtttatttttcagaatctataactacatattctcagaagctgtggactgtttgaggcagcttctagcggaagcatcttttgggaaaagctgcagctgggacaagctcccccaaacaggattgcatcattcactattcagatatagccattggctgtgtttgcaaccccacgttcccaacccctctcgctcatttttcacgcgcacacttttcaaactactaaacggtgtattttttgcaaaaattttctatatgaaagttgctttaaaaaatcaaattaatccatttttaaaaaaaatagccaatatttaattaatcatgtgttaaaaggctgctccgttttgcgtgcaggagggatgggccatcttgcacttgcgaacacaccatcgtcctccagccgacgccctcgccacccccgcttcgttctccaccgagttcggcgacgtggcctcgtcctccactgagcccgaccgccgctaccatgttctccctcgagctagcccctgccacctcgttctccaccgagcccggtccccgccaggtagtttccaccgagcctcaagtcaatgtgccacgtgggtgcctttagcttaaaccgtcatccaaaaccatcttgggactatatttgcactggttttaataaatgagggatgcattatacccagttttgtggttgagggatgagatccaatctcgagacttagacgagagggacctcaagtggacttattccttgtgcagatgattacctatcctggactgctgggctagacatggtaacttcatatggaccggttacttgggccaccactcatcacagcggattgttgtaatccagcaactttcactaacgtgtaatccaatttatgcgcgcacgttttctcctaaccagcgatcaattaccagtcgtccgatgcacacatatatgttgcttccggaaatctaacttaattagtgcacagtccatcaagcaagcaaaatatatatttctaccacctaagcttcaaaaaaaaatttctcttaacctacttatctaatctacgatccgattacatcattgtgttagctacaggtaatttttaataacaaaatttagatgattatattttaatcaaagattagagattacttttataatatatttaaattactttttttgacatataaaagtaaattcaataaagtctaaaagtaatttagatatataataaaaataacttaaaacaaaatgagagtacattcttacggtatttaaagtaaatctattgtgggggctaaaaacatgtatctaaaacttaaatttaattaacaaattgtattacttaccaataaagtaaactattcacaacattatcaatgtcgaaaaagtaatttaatcaaataaaaaagtaatattttgtttcttttattagaatataatcatgttatatctttttataaagacttatttatactgaatatgatgatgtaattggattgttcatttgataagtaattcatggacattttgcttgaaatcctaggtgttaagaatcttttccttattatatgaatgtatactctcacttaggaatgtaagaacgagatacatgttaactttattatatatcaattgttaggatagtagttggttaacactaattagtgcacatacaacctgtcacttcactaatgaattaattaccaatctaagtaaaagcaaaaaaggagaaggagaaattgcaaaatactcacttgtaatttgatattctatcccataagtcattttgttgcaaatactcgctagtccctactctgttttgttgttaaaaaaaacatcctagtgcgcgcgtgcttaactgaataagctcggtgtcactgagatagaataggctaagctaaccaagtcaatcttatcgaagtacttgtattagatttattcttcatgtttcgttgaactttttttttggatatagcgaaactcagtttgacagcatttaagctctcgtcagcatttatatgtgagtaatctcttaaaaagtggcaagactatgttgcagaagtattaaatttttacaaagaacatattgactgctcataacttatgaaaacatgttgatggtttttgcacaaaatgaaataggtgggtgggcatttgtaataaaattacttatgggtgaaataccaaactttaagtgacttatgggatgattttttgcaatttttacaaacgagaaagaaaaagaaaagaaaagagcatgcaaatcatgcgggcaatgaaaattaaccttcggaggggccaccacgagcaatttgcacggcatattttgccgactgcgcaggacagaattaggacagccgtacaggtgcaattaagcatctttatcgctgtccattttaccgtacctcgtacaattttaatgccaaattatgtatacctgcccacgacctaaaagctgatacaactgatgcttcttgttaacaagaaaatctagcgattgcatcagtgagcaagaaaaactatacttgcttcttgttcaagatctgtaagcattggtgtatccctcttttattttttttcctttagttttggggaaaaaggaagccgtctaattaagcggttatacaagagtacatattaaaaagaccaagagaataaaagaggaaaagataaagaggaattagaggagttcgaagaaccacttggacagaagctgaaattaataaggggatatatatttcatccttgacaagtataaaacttcctccgtttcataatgtaagtcattctagtatttcgtatattcatattgatattaatgaatctagatagatatatatgtagattcattaacatcaatataaatgtggaaaatgctagaatgacttacattgtaaaacggagggagtagcaaattctccctgaaattacacctccaaggatcaccatgtggctgatgaatatactaatatgaaattaagagccctgcttccaaataacgccaggaagttattaagaagattttcctaaaccgtttcactttggatcttattttttgtaggtcgcttttgatcttcttttttattaagtttggtattctttcgctaaataaagatataagaggtgtttttttatgctatcacaaaataggcacacgcatgcacacgactacacacccactcacactcgcgcacccgcaaatgcacctacaacacacactcaaaaacagattggaaatagtgtgatttaattactctggtggcatgttgtgatactatatacaagatgtgagctgaacatctggtgaattctttcactgtaggattgcttaaagagaattcatattgttggacaatcgccatcatatagtatgctagttaaccatagctaagggaatgtcatgtgtacttttcccacagcactattagcaggcaccaatagtgcaactgtaattactccaaattaaaggccatgtgctaagtacaacggtacaaggtcctccgtaagttaaacgagatccgacatgctagaatcactgaattgaatcgtgtctgtcgctcgacaaaattgctatgcaaccatcagctgctttatgatcaatgtgtatcgtacagtcctctaagtatttagattttacaataaaaattttacctcaggtatccgaaggtaccaagttttacactatactcttggtatatctgtattttctaaaggatggcaaaattacctatttgattaactgaaaattgtattgacaaaatcaaatcaaaggagttatcaggctgttacagtgcaagactaatcacttaggacttgttcggattataagataggaaaaacatacgatatgaaaaatataggaataggaaaggaatctagatgtaaaatagaggaatgaaaaacaaaggaatacaaaaattgagagcatttggatcacagaaaattgattgccaaggatttacatacaggaagtgaaaaaaagagcttgaggtggatggatttttcctgtgaaatcagtatcaaaggaaactttcctttggatttcctatgaaaactaaacaaaggaatacaaaaattgagatggatttcctatgaaaactaaacaaagaaatacaaaaattgagagcattcggatcacgggaaattgattgccaaagatttgcatgcagaaagtgaaaaaaagagcttgaggtggatggatttttcctgtacttttcctgtgaaatcagtatcaaaggaaactttcctttggatttcctataaccagttttcatgatccgaatgacaggaaatgaaaaaattcctatgcacagtattcctccaaaaatcctatgaagatcctctaatccgaataagcccttaatttcgttattaatacatcattgacatcgttgaacacagtttattttgatgaacccccaaaaggaccaactatgattgtccatctctctgattgttatatatgcaaatccatttggcatctactgatataaaaaagaaaaaaaactgattttgtaatacaaccatttctcgtttcatctcggttgagggatcaataaaagttactttgacacagcattatctttacatgtgacaaaaatgatcatacaaactatgacatgcaaatattgtttgactcaacatgaggccaggatgaagaaattcatttcatcttcttattttttaacaaggaagaaactcattctacttcttaacaagtaagggccccacattatcacccgttgctttgttgtgcttcacatggcttccatcacaaaggggaaatgtgcctgatctccagcacctgtaacgtgacaacaaaatcaatctatatcagtaattcagtataataccagttggaacttggaactgaaatgcaaatgaagttcctcagactcaagagaaatataaggtttgtattctgaatcactatcgccatgcagaattttcacaaatgcataaagcatgcatccacagaaagagcattgcaaagtgttctctctatcactctgtgtatgtgaaaccataaacagggcaaaactcatacattcataatagtacgattcagtaaaactattggtacgcgtgattatggttgctggcagttacaaactccaagggaaacatcatgatctgaggttcttaccatcctaagatcgaaaggatcattcatatgaatgcaataattcctttagagatctaaggccttctcggctggctgtgctgtggctgcacccctaacataccagagcatagaaatgtcttgtactatactggcggaaaaaaataacacctcatacagtcacagattcacagtagatgaagtgacaaaaaaagatggtctactttactttactttgattattataacttctataagatataaacgtatatacatagaagatggccaatgtatttcttgcagagaaaaagtgttgggacttgtgagtgaaagtaaaactagaaatatctctaatataacaaataagagtatcatacatgagtacatgactatcttctgaatctgtttttttagaaaaaggtttttttttacccggcctctacatccaatcgagatatatgcagccattttaaattagcaacttagccatcaaataacccaatctaaaattcgctcctatggagatttaaactcaggaccttagatgctactcagattactacaaccactaggctacatgctctttcactaatctgtttatttttaagggtcaatctcaaagtaaactgaaacaaaaaaattgcttctgttttatcctaaaaataaagctatctatgttcgagtactgggatcgcactcggttcaagtcgcactgaaaacaaacgcctacaaactctgattatcttacgagccagcaatttgctacgagtaccctctatctttgaattctcgattaatttaccaagcgcgctgatttagtcattttaaagaggtaaaaagcagagcttagagattagattatacaactggctcatgttgaatggttggtgattttaacgagagcgaaatcactccgatcgacgaactgaaattcaccgaacccttcccgattggtgcaccaaagagagcgaggagggtggggtggggagggccgtaccggcagtacggggtgagcggcttggagagctcgccggcgaggacagtgtcgaccaccttctcctcctccttccggatggacgggtttatcccgccgacccccgcctccgcgcgcaccgccaccaccaggccacgccgggcgagggcgcgggcgcggccgggcgccgacggcgccgcgttgggcggggagatggagaggcggcacgcggcggcgcagaacggggtcgccatggttgttgggtttggctcgcgcaggggggtttcttggggttggtggatggatggagtgatcggtggggggagacgaaacgtggatgggttttgtgagtaggcgtggccgcgcggaggatttggggtgtgtggcgagcacgggccgcgggagaggcacagagccagatgggatggattggcgtcggcttcgtctccgatcacca

SEQ ID NO: 21320 - DNA, 42615 bp, Oryza sativa
  unsure (1)..(42615): unsure at all n locations
tattctgttaagaacatgtaacggtgttaactgaagctcaaccacaaaatgtctctttatgcccttgcttttttaaccctattatacgtgggacccacccgtcacttctctattctctcttctcttctcttctcttctattctccactccactccactcgcccgagcaccgccgccactcctcgtcgccgcttgccacagcccgagcaccgccaccactcatcgttgtcacctgccacagcccgagcaccgttgccgatgaggaagccatcgtctgtcacgcccagaaatttagcccaaatttccagactattttgtgtattaaatctctgtccaggaccagccagggtacacaaaacgacaagtaatacacagttccaaacgtaaataaagcgtaaaatacttacagaagaggcacttagtcctcacaccgaaacaaaagcagcagcagcggaaaaaaaacgatcctagcgggccttcagctccactccacaggcaaaactcaactggggtctgagccttggtcctctaactccatcttcagctcagaagcactacacttctgaaaagggggaataatagcaaggctgagtacaaccaccgtactcagcaagccacaccaatgatgcagacgtgcaaagggatacaaggatggtttgtggctatttgcataaaggcggttgtaaaacattttatttagcaaacagtaaaactgttgaataattaaagtaacattaaaatctccactgatcaacgctacaccacgttgaacaggcccaaccaacccacctgtactacagtgcattgggtcgatttattaagtgtgagactaatcacggtgaatctggtcgatcgcccataaccacgggcacggctattcgaatagttttactctggccagaggtgcacaactgtacccataagacacaacccaccaacatgtcaccgcgtcatcatgtgcccatgatgcacacgtcaccgtgtcgagtgattgtgatgagacccttcgcataaccctcccctaaccatccacaccacgctaaggtttcacccccacccctcaaaaggcagtgggcggtcccctcttgcgccgcggtgaatccggcagctggacaaccggacaccccggccgacccaactccatcacgcccaccctcgccaccggtgcctaggaaagggtcgagctatacttcagatcaagcagttacccactcccgcttgtggcaagcgctgtaagtcttccagggtttcccgtgaaccggtccttaattgccatgggtgcgactcacaaaaccatgcacccacagcccaccattcagtcgcattttagttggataattacgaccataaaacatggccagatgtctcgagcacgcggctcaacaagatactagaatgtctaatactgcaattatcccatcgactgagctagtggtaattaagcatggctaagcatatagttctagctaggtcacataagtaacacgagctagtcaatttattacccaaggttgacaaagaacagatatcaagtaaacatggcacaagcgagcagataggtaaaccctgaccccgtgtaattagcaaaacatgcatatttatttgtaaacggtaaaacatttataaattgggatcaacatgctcaaggagaatgtgtgacttgccttgcttcttcactttgatcttctaaactcttttcctcgcgaccgcggacttccgaaacgacggaaactacacgctggcacgcaaaacgaggaaaaactctaataaaaaccaagaaaacagtacataaaaagtaaacaaacatgtagagcttaattttagatgaattttgcaagttgaatggctcaatttggagttcgaatgaattagatatgaattttagaaggttttgagccattttaatgaatttctagaattattaccgatttattgcgcaatttaaatcaattatgacgtcatccgacgggggagaggtggcgccggcaagtgggccccacctgtcggtgactcacgggtggcgggcgcaccgtggaccgagtccacgcacgcgctggtccgcgggcgcaccacgtggcagacacgtggcggccacgacggacggctagcggaggtggcgccgacgtggcgccacagaggcaccgacgcgggcggcacgggaaggccacgtggacggcccagatcgccccgaaggaggatcgggcggccacgggcgagctggagccggctcaccggtcggccggccgggagcgacggcgcacggcccgatggtcgccggcgacgaccaccggcgcgaaggcacgcgcgggaggcggcgaaaagagggaaaagggagaggagacggagggggtcctcaccgaggagcgccggcgacgggacgaccatggggaggcgaccggcggcggaaaggatggcggcggccggcacgggaggcgacgggaacggcgttccgacgacgcccgaccatggcggagccgcggccgagggccagcaagacctggggaaattattagagcagttagggagggaaataggcgaccggagcggcgagaatacctcgccggagaggagaggaatggtggggctcaccggcgaccgagagataccacgttccggtgggtttccggcgatgaacaatggtgaccgaggtgctgcacggcgctgcaaggcgagaggtgaagacggagcgacgcggcggcggctaaggcgacggtggcacacggctggaggcggcgtatggtggaggtggctcgggatgcacggtggaagggtggttgcggtggtggaatggggaaacggagcggaggccggggtagatcttggcacggcgttgccgacggcgcaagcggcgaggtgcggcgacgactaacgcggcggcagcggccggctgaaggcggtgtgtggcggtagtggctcggcctcgtgatgggaaggtggttccggcggtggaggagggagatggagtggatgccggggtgcggcgaggcgctgtgatgctattggtggcggcggcgcagcgcggcagcgacgggagcggcggtggcgggcggctggagatcgccggcgagcggcggcgaaggggatcggcgtggagagctcggtagagagcgtgggggactcgggaaaacggggaaaaaggaagaggagtccacggggattgattctatagctcaagggggcgatgatagggccggggagcggcggatttcgaggggaagcggggcggcgtcgcgggggagagagacgcgggaggcggcgacgtggccggattttgcggggagagtggggggaaacggcgcggacgtgggcggcgaggtcccacggacaaacgcgcgcgcgcggggtggaggaggtgggcggaaacggcggcgacgttggacggctcgggcggccatggcggttgctggcccgggccggaggttgggggtgaccccgacaggtggggcccacctgtctgcggctcggggagaggagggaggatgagggaggcgaagcggacttgcgcgaaggagggggcaagccgggccgacggcccaaagagaagggagtaggggaaaaggagggcggccgggcccgagaggatggagagggagaagatcttgagccgaaagcggcccaaagacaaagaggggaaattttatttgttttctttttattttaattgatgcaatgatctttgtgctattaaaactatttctcgagctccgaaaattcacggaaaattccggagagtacattagggcacaaagaatattacaaaatattcccggccaatgatttttaagggaaaattttaattctcccaataattcacttgattaaattgcttaactttttttatttatattctaggaaatgcattatttaatgatttttaaacccgaacgaaaatcggggcgttacattgtcgccccttccccatcagatccagtggtcctagctcgagctctaccgccgagcccaccgccgcagttcctcctcatcgtcgctgagctgtcatcgccccttccccgccggatccagccgtcctagctcgatctccaccgacgggcccatcgccaccgctccttgtcgtcgctgaaccgccgtcgcccctccttcaccggatccaccggtcgcagcccgagctccgcccgggcctgccactgccgctcctcctcctcgtcactaagacgtcgtcgaccctccctcccccgccgcctcacgaacccgagcctcggccccactctccctccctccaagccctaccgccgccaccctacctccacgagccagcgctggcgcagatcccctcaatccgggccctaccaccgtcgccgctccctccacgagccgccactggcgccggatccactcccttcgcgccccccgcgacggcccctccttccacatgccggtgcaccttgttctcctccatgcgccgccgccgctggtacgagagagagagggagagagaaacgggagtacggaactattctgatagggttagacagggatagggttttctcgagggtattttggtctttacgaataataattgtatttctttattatttttaattcaaaccataacgatgaaatggaaacagggtcagacggtaggttcgttttagaaaagcagggtcaaaaacgcaaagtacaaaaagaagggtcagattgaaagaagggtcagattggtataggcatcgaaacggagtcaaataagcaattgtcccatactaaaaatgtttgtaggatagtaaagaaaaaagaaaaaaaactcgaatctataaaaaacatggtttcacaagtggtagtatactgcttggaagtggacgtagctcaactggttaggtttcttattgtggaatcggttcatccaggtttaagctctagattttatacatatactcgtatttacgattattattctttcagtggtagatagtgaggcatctgttgtgactttgttagtctcgagatatgtcggtccagtctatgtgttcatagcagtgactgtgtgcatgttatgaacgtctactttgtactccctccgcccctaaaaaatcaatctattatcaaacgtgacacattctagtactaagaatatggacatatctttgtccaaatttgttacagaaaccaagttaaacttgtatttttgagttttatctatactaaagtaaaaaacagagccgtcatcctcctctcctccctaaccatcacactttccccacactacaaacataaataactggaagggtcaattaggcctggagtagggtgaattggtgattaattccgaaaatcagagataaagaaaaaacataaagtcaactagatatagctaggcactagtaaagtaggaatgcacaaacagagtctacaagcggtagaagggagaaaagctagaggagtaagagaaggatttcaccgagattgttgcaagaccatgtgttcccgaatttcgaatccttgaggggattctactattcattgaggatctcacaaagagtagggccttctccaaccttttcctagaggttgcacaaatgcattcctcttccactactcgtatcccttttcctttcggagatgagatccggcctttacaaacttctgtgaccaaccacaagtagatcggtggctcaaaggcaacacctagccatctaggagtcctcaacctccaagagtaaaagatgaagcaaagatctcgtcgagatgaatcaagtgcttaacaaatcttcatgaagtcaataccaagcactcacacaatctctgatgatgctctctctcgtggcccgatcttctggtgagggggataactcttgctttgattgagtgcgacgtttgcgacatggctaccaaccagaacaagtccaggacgtcgtgcaatcgctacaccacaaatgatgtcgtaccaaccgtgacgcgcggttgatgatccctgcaatgcaaacgagagaacactgcaagaacaagataagatgcaatctaaatattgtgaataggtgattaagtacaaagaaatagttgcgattgaagtgatagatctaatcgacccagcaaatcaacacaccaactattggggactctgaatcaatagtcgctgactaatcaagcgaggactagagacaaagtgaatggcacttggcaaaattcaactaaacaaaacccaattgtttttgatgatgtacaaagctatttatagaggaaaataaagctagggtttagtgctaattcgtggaggtgggagacacttccgagatgggcctagtctattacaaggcccaaggcccaagatcggtttcaacaacagcactgtcttgttttggagattcccgttgactcgagatgaatttggacatgagaccagatgcgtttgaaaggtagcgagacaagctttccatgaagtccaagatcacccaaatcggagtttgcatgaaagcgctaggtccatttaaagttagtgctgtctccggaggccgaactggacttggacttggaattatcattggaacgtgtgaagttatgagtgtatccgacgaagtgatgtcctcatcaatctcaaatcaatcactctctctctctctctctctcacacacacacacaaaaccaaaatgagaaaacaaggctcaaaatgaatctcaaagcaaagcaagccaagggaaaaaagttttcaacggagcaataaccctagcttggaggtggagggggctatttataaaccgtaccctcgtatctgcctattttgaaggggggagtgattccctttttagaaattccgaacaatataaagtcacaaaacctagacaaatcaacattgcgaaagttccaaaaatattttcggaagatttgaaaatcaccagaagcaaaactgcactttcgaaaattacgaaatgaattttccatttgaaaaatcaccggagagcaagttgttggccacgacactttcagaaattccaaaacaaacttccaaaaatcaccaaagagcgaattcggagcttttgaaaatcacttttggaattttcaaaaattaccagaagcaaaatttcaagaatgagaaatacttcaacaaaggttttgagcaccaaactcattcatagacatcaaggcaacatccctcttaataatacgactttgctattgattgtatgaaaaaaaattatattttaccatttgaatctttgccttttttcatatccttgcaacacaaacagttatggccttgaacatcgactcatagaggactcctctgtaattgcttcacatatacttaaataaaaagttagtcattactaatcgcattgtcattaaccaccaaaatgattaggaacctaggtgcactttcaataaccaatctaccaagaaaactggtgatcctagtaaaaatcgatccaccgaaaaatttggatagaaaaaatgaacacccttaagatcatttattcatctttcccccgaccccattgttacacacgaaaaattgaacacccttaagatcacttgttcgtctttcctccgactccgttgttacacacatgcatggcactagggatgaaaaacagatggaaaaacagctctctaccattttcgtttcatttttttaatcagaatagttatcaagaaccccggataaaggttggaatcaactattatcgaatacagatacgaagcgaatgcaataaagattatttattggaacataactctaactggccttctcaaatcaacgatgagatgtagctcttttttttaaaaaataatatatcaacatttctattttttttatcaattcatgatacaactagttgtacatttcactttacataagaactacaataagcaagaattatattcataagtatggcctggctaattaaaaaaaagtcaatgcgtaaaagaaaaacatattaaagcaccggattagaaaaaaatatttccattcaactaaccacctcaatactcactacagttcgaaaactttccgaaccattttcatccctacatggcactagtttttatactacatatatcccaaaataattataattctaggttatttagcatatattgaggtttgaaagaaaagaaaagactatggtgccactcataaaatggtgtataggtaagaatagaagggtaattgagggtaaaatcaaaataaatttgaaggagaagtggttgttggggtaattagtagtctagtgtgacaactgttttggaataaatttaaattctagaaatataattattatcagagtaaggtagtaatggattagaagcgtcttgggtctgctactttgtaactccagaactagagcatgccattccacccttttttttatgaatattccttccataaaaaaagaatctagggctaaatgcgacacgttgtagtataacgtatgtctagattcgtagtactagaatatgccacatacaatactagattggtttttttagagacggatgaagtaggtatatacaccctttatgccaattgggttttatttatcaaaaaattagcgaaatgatgtccatattatctcctgtccttagttgtttagtccgcgactatattcaaagcatccaatagtgtatactgatttgtagggttaattagatgtaaatttcaatatccattattatcctcatgtttaattagctatttgcggtattgagattttatctgacctatggtttatacgatattgcttatggtgtggcattgtataacgtgctatacttgttctgtccacttcgtcgacgccgaattcgatagagcaaaagttatcccctcatgaaaggttaaggccacgtctgtttcaaattattataatctaaatcattaaaaataatatgaaataaataggtaaattattatgatagattattataatatataagctggattagtataatctggtaatatattctaaacgtgtgttttttcagattattgggtggctaagtacccaccacccttaaaaattttatgtaaattaccaaccaccgctatgaacccaacagatgaagcgtatctacttcctctctcccttggccgtgcgtgcatccgcttcccctctctctctagtcgtgcgttaatccttccccaagcccccaccctgtgcgtgaatccttccccaagccccacattgcgccccggcttcttccccaagccgtgtgccaccgtcgtcgtcgcgtcgtctcatcctcctcccactccgcaatagccgcgggcatccaaaatagctaagagcattaggacatcaccaatatatatagcaaaagtggtctatatagattggacccacataaatgaactttaactatgtcaatcctcacaatgtatatggatacaaagtaatattagaagaagagagaaatatagatagataatattatttatttcatatgggtagtccatatgcatatgggtacctttagttattttctttatatggactagttaaacaatgttattaggtaactgaatgaaatagtttatttcctatggactacttgtgtgctatattgtggatgcccttataaatattagacttttaaaccaaataatctatgcctcccacaatttagagaaacgaataactcgtaacttattctactgtagcttattacaatctagtttatagtaagctgacttaataatttagattataatagtcttaagttggaacaaagtgggcctaagccacaacagtgagcgcgtcatcgctaaaaaggagaacgagagggcttgagccggactagcttttgctgaattttactattgttgtttgatctgtatttgtaggtgtttccagcgctgcccgtccatgtgtatacttacagcgttggtagacgtgcgtgtcgagaaaaagaaaaccaaaagcagtagtactacattacagcgttggtggctttggtgcaccgctctctcaggccgtttgcgccactctccaaaccgctcagcagaggcaccgatcgagcgagcaaagtcgacacgtacaactcctcctcgggctcgcctagctgttgatgcgaatcacaggcgtcacggacgctaacggagagcctctctgcccgtgcccgtgccgctcagcgtgggcgccccacaccatcaacaggaaggcgcaccgggcctccaccagtggatcgccaggcacgggcgacgcccccgcgcgcagggcaaccggcaaccaattaaccagacgcgcggcctgggcggacgtggtggtggtactgtggtggtggactgactggcaacggggcgctgcagcgtgcgcgtggcttggctgacggcgcggaccccgttgcgcagcgagacagcctggctgcctggcagcttgcctcggtcgcgtcgcagcaggtggcgtttcccgcgccctagaaatgcgtcgccacacgtgtgtcactggcaggtcggctctgttgaccggacctcttcctccttcagggcaagttttttagttgggtggctatcacatctaataaacatctatgtgagatacgaggtaatatatataatacatcacatccacactacctctagcatactaacccaaatgatttttttatttgtttgtccaatcaactcttcccttcatctctttttttttgggatttgtgtagaggttgccccttacatgaggggtggctcacattctctttcctcacttatttcttccacctcaccatcaaatcctatgtggcatatttaggggcaacatatctatcattatagtacttaccctgactagacggacacgtacacgaattcgttaggagtttattcctactttcttgatgaatgatgatgggaaaagtttaaattaaacccctaaattattgggtgagtacgagttacccctaaatccgaaaaccaaacatgtttcacccttttcaccattaactgtcaacaccggatgccccccacagccaccacatagctttgcaagcggttttggtcctatatggcagtccaatcagcaattcttttattaaaaaacgatgggggttcacatgtcagatctctcttctctctatctctttcctctctcaccctcccccctcatgcgtcagatgccgaggatgagtcgtgcgccacgcaccggcgaaagccgaggacaagccgtgcgtcggtggaagccaaggacaagccgtgcatcgacagctacaagcgtcgtcgagcggctgtggaggaggggcgtgcaccggcagaggccgaggaggagctgtctccgccgctcgccgtccccactatgcggcaccacctccgtcgctcgccgtccgaaccgattgacagaaggggacggaaaagagagggggcgcctccgcctccgttgcttgccatgagatggaggtgccgctgcttgtcccgagctccgccttccgcccatccccttcgccgccccgagctccgcccaccgccatcctcgactccccctccgccgctgcttctcggtgacagagagatggatgtgccgctgcttgtctcgagctccgcctgccgcccatcccctctgccggccaccgtccttgacagagagatggaggtgaaggagggagaggagagagagagagagagaggattttggaagaaagagatagagaggtgaggggaaagagggagggtgagagacggataggtggggcccgctgattaaaaaagaattgatgactggactgctacgtagtaccaaaaccactccggattgagttagggggggtaattcgttcagtattaatagttgagggtgaaagatatctggtttttgggtttaggaaggtaattcatattcacttaatagtttgggtgtaattcagatcttttttttccaatgatgattgatgaatgcgttaagaaacaagcacagagtacagattggaccaaatcctacgattatagcgtcatcttctaccgagcacaattactactgcataatcctatatttgtaattgatcatctgtaacggctcgggtagcatccttcatgacgaatgtcataatttgatggttcgaaccgacaactacaaaatctaacctattttgttttttttatggcaaaatgatatcaaacccacgtacaattcagtatgtgagcatatggcgtataccatatatgggttatgtatgtgtgaagcatggcatggcatatagcgccggtattggaaatatgaacgtgcgctaagaggaggcatgttcctgaacatttgcttatatgtctatatgcctatgcaggtaagtttgaccggcagagacgttaggttctttgataggattatgtgacatcatgacctaattagggtgtgacctataagtgatgtgtgcattttattagtaccacattactagttgagtaagagtaaaccaacttatataatgtcttatccctccaatcatatcattttttttgttaaccttcttacacaaagcgaaaacaaaagtataagtatgttgttatgtgtcagtggatctaaatgttagatgggttggactgtgtggtactgaattgcgggctattacaatccatgtctaacaacccaagaatcaggggggccttgggattcataatttggaaatacaaaataaatgtcttttgagtaagtggttgtataagttaataaatgaggaaggggtttggcaggacttattgaagaggaagtatctttataataagtctataacccaagttgataagaaacaaggtgatttccattttttatcggggctcatcaaagtcaaaagtactttcttaaatatgggttcttggattgtgaatgatgggggacaaataagatttttggaagataaatggctagataacttggctttcaaggataaatatccatctttatatgctatattccgaaggaaatcatcctctattgccactatcatgggatctgttccgcttaatgtttcttttagaagaggtttagttggtcagaatcttgtatactggcatgaattgtgtacttctattgtacatattcaattgaatctttcttctgattgttttagatggaattatcattagaatggtaggttctcagtaaagtgtcaatgtatctagctttaattaataatggttatgttgagaagaataagtgtatttggaagcttaaggtgccgcttaagattaaaatctttatgtggtacttgcttaaggggttgtgttaattaagaataatttggcgagacggaattggaatggtagcttgaggtgttatttttgtttgaaaaatgagtctatccaacatctctttatggattgtcattatgcaaagttcatatggagagcagttcagttttcttttggttttaaccttccaactagtatatctcatatttttttatgggtgacttttgcgggttgacaagaaaaagagtaaactgatacttgttggagcttctgccatttattgggctctatggttgagtagaaatgatatggtttttgacaaatcaccatctatttcctatatgcaggtaattttcagggcaacacactggctttggttttaggcacaactacaaaggtgtgatgatgatggggagattctaaaagttgtatgtcgcaagttagagacgatggtcatgtaactttttgtcaattatggatggaggttcacaaatagacttgaataaatgtgttctccttattttggcttggtttcctctgctttttgtttggtgtgttctattttatctgaactacgcttttttctggagtgttactttataataattggttgtagctctttttaagtaaaggccgggatattatattacattatctaaaaaaatgtctaacaattcataatttctgaaccgttatatggtcttaaaccattatagacgactgactggccaactgttataggcttttcactgcaacccaactaacctggatatgctaccacaaccaaaaccaaatatttcgttgcagtcatcatacattttgatgttagtacgtcagtcacaatgtttatggtaaactacttgtcaaaacacacatataattgcacatttaaatgtaaccgggtgtctaaatagtatcgcatcgatattgtaatcacacgtggctgagtttgaatcagtttttcgatttgactactatctcattatccgtaagcatgtttttcgaaccatgaaacgatacgccttttacaaaaactttttacatataaaattagtttaaaaattaaataattttttaagtttgtaactgttattactcaattaatatatgttaatgactcttaaagtttcttctagttttgcatgccatcggaaagatcggcccaatcccctaattgaacacagccaagatcatgaccctgcattgcaaaatattcttagagtatagtatatgataagcctagctcggttgatgattacttaaccctatatgaataacagagatgagagaaaaggaagtaagcttgtatgagcgtctaggcacacaaaaggcaaaggcttgcccatgtaccgatctatggcaaggtaaggtgaaggacagagagtgagagagattctgtgaaatgacataagatactagcaagggaagagaaatgttgccaatctgaatatgctaaaatgaacatcaccataaaccaatagtgaaggagaaaaaggtggtgatgataaatggggtgcgagaaacaatggtagagagagtgtgtgacaatgatggtcaaaatagggaagagggatgatgtggcagctgatgaggggaaatggcatggcaactaattgacgtgtgtaaagagggggatacgacattagccgaagaatctcctttctccttcatttccgttgtctctagttgtcgatggggaaggagggttgaaaaagcagccgtgttggtcccatggtcgggttaatcccgatgttcctcaccatctttgttaatcccaattcttgtgcagatcaaagtagtggttgtcatccatgatctttgtcctagcggtgcctggttgtcacaatggagtagctagaggcccttttgcacatatcaaccagctggaggtctccggatctaccaacgcaagccaacctttatagatttttggtcaatgatgtggagccccattgcctctccccctcttcatgccagcttaacctcggagcaaccatcaccattgtggctgctcatgccactttcctcatgtcgctttcacgtcgtacctccctctcatcacggcagcttgatatctaagcagccatcgcttttgtggccgctccatgttgtgattgtcacgtagcttttcctgttgcccctccccttcttcatgctggctcgagctcatagcagacggatccgacaggcccaaactcagcaccaacagttcttcggagaaggaaggtgaggcaagacaatgtggcaggatggcttgggccttggggatgccatatgcttcagctgctttgctgcatggatgatgatgatgaaggcagaaacaattgagagaagaaagaggcggacatggccacccgatccgctgcctcggcgcccgttcatcacctctgcgtgtatcttcattgtggcaagcgtgggagggggaggagaaagggatggtgacgctcaatgctggtctctgaggatcaagaagactagggctatgggagagacagaggtaaaaggagttgggggacatcaaatgagatgaagaggtagtaatactatgtggatattatttataacgattaaaagtaaaagatatggaaccagatatctataacaactcataacaaagaactgttgcaaataaccttctatatacagtgactcttcgttatgagctgttatagatgaatagctccatatttgtaacagctccacacattaagagccatcacagatgtgtggtcatcactaatgagtattagcgcctaccattatcttcagcattcagtatatgcatccgttgcagattagttaagtaatatgtaacaagttttattgatccgttacagataaagggatctatagtagtgactggtttagacatcaactatccaactatatggatattatcagatgatagtttaaaaaatggcgggaagataatactcaccatttgatcgctaacttgagcataacagtatgctaaatgtttataataagagagtaacttgggacacaacgcctactacacaactttatcccatgagaggtactccctccgtcccacaatgtaagagattttgagtttttgtttgcaacgtttgaccactcgtcttattcaaattctttttgtaaatataaaaaatgaaaagttgtgcttaaagtactatagataataaagtaagtcacaaataaaataaataataatttcaaaaaaaatcgagtaagacgagtggtcaaacgttgcaagaaaaactcaaaatcccttatattatgggacagaggaagtatattaaggaggttggtacacacactcgtaactcatcgtgtttgttgattattaaccgcaaaaataaattaaattttaaagcttaatggcagagttgttttgggtctttttttcatcatattctatttttccgtattagcttttaaataatgcataaccgtatacaaaagttttaacataaaatatttttgttattcattcatgtttttaccgcttatcaaccgtagcttaactagtcaaacagaaaatgaacacgtgtagcctcttaaggctgtgttcgttccttcatgttcccaactcactctccctcgtttcccgcacgcacactttccaaattgttaaacaatgtgttttttaaaaattctgtacatgaaagttgcttttaaaaaaatcatactaatccattttttttaaaaaaaagttaatacttaattaattatgtgctaataggtcaccccgttttatatgcactgcacgttagtcctaactaagaagaatgaatacggcctaaaatggcatacctatgtgcagcctttactcttggaatggcatacctagccagtagccatccggctatgcacctgccatcttaccaaatactacctcccttctaaaatacaaaggatttggattaatttatattttgagatggaagtcatatttgtttgtaataaaatatttaaaatattgcatgacatgtagtaaaaaaatatacaccagggctaatgcaggccctaattaattttgttgagctcagtgtagaatttagaaacaattgtgtaactagaaaaagaacaggaactagtacaatctctgaaaggtagggcggggcaccgggcaccggttgttgctttctctccttttctttatcgggttcggggctggccatgaatgtgtgttgctaaggctgacatgtgaggccaaaattcgcagagacccaaccaaagctctataaaaacagttcgagtttgactacgctcacaccgagtagctaggaggggaaagggatgtcactcttgtgaaatcaaacctaactttgcttgtcctaaaaaaaagacctaactttggtagcttctgatcacggatgttttcagtttatgataacagaacattcactaaaagtacttctttttagatggtttgactgatcctagctatatagaactagaactgtagtagtttctttttttttctttctttgaaaaatctgaagtcactctaaaattcaacatggattgtagttttgttctgcaactgtcttgtaggtgtaggcatcatcactctaaaagtcctataaggttttctttgataatttatgtactatatagattaccaaaaagatgcaaagtagaaattgcttatgtcagcataccatattgacaaaaggatggtttatgtatgtatctttcatggtttgatttgatctacagattccccacacacaaacattagatagaatagcggtgcatcggccgaaccattgacaatctagccagtggcgaagctaggatttgaggttaggggggtgtggtggaggaagccataagaccgattaaccaatatggatactaaatgagccaaatagtcactaccgacaataatcaatgtgtatataaatatagcttcgttgtagctagattacaaaaccatcatatgttatgtttttttaaaaaaaggttcaaatgttcaatataacaaggcatcatatgttatgcctaaaaaacttgaattcagttctttaataatattattgaaagtttagaactagtccgtgttgctaaattctttcaatgtaaactaccaaatagtctcataaataagcattttctgttttactttgaaaagatgaaaattataagactaagtactaagagtatgactataatctaacgtgctaatggcctaacagtggatgctgcctaattgcctaaccatgtaatatactactagcagccaccgagggggggggggggtgttcgggatagggggggtgctgaccccctccggcacccccggtagcttcgccactgaatctagccaaaaagcattatgaaaggcttgaacttacaataaagcagcataatgaatcaagcagtagtctccattattaacgtcacagtaggtgcgagatgatatatgtaatacaaaccatcgcatgcatgacgtacacgatgccagtattaagattgtctacttgtctgccctaaggtgtaatattttcatgatatttatcgacaatactaattcttttaaaaattataacataattaacatctccctagaattcgacgtgagctactgtattactttgttctttatcattatgttgtaggtatgatttttcttattatctttatttttttatatatgaccccctatagggttcgtttgagaaattacatattactccctctgtcctaaaaagaatcaaattctggctatgaacctggataaatacttgtctaggttcatatagctaggatttgagtttttttaggacggagggagtatatgatacttccttcgttttatattataagttgttttaatttttctttaagtcaaactttttcaagtttgactaagtctatagaaaaatatagcaacaattacaataccaaattagtttcagtaaatctaatattggctatacttttaatagtataatagtatatttgtagtgtcgaaatattgctacgtttatttataaacttagtcaaaacttatagaagttttacttaagaaaaagtcaaaatgaactataatatgaaatgaagggggtataatttaacacccccacccctcccccaataaagtaatccagttctagcttacatcaacataccatattgaacaaatgatttatatatgttttttaatcaccagattctcagtatgcaaacattagatataatagcaacgcatcgttctgataatcagacaaatattcgaaaagcattctaaaaagcttgagactactataaagcaacataatcagttaagcggtagtctcccatattgatgtcatggtaggtggcagacgttgcatgttttgatatgtaacgcaaccacttgcatgagtgtacgcgtggtgcaatgctacgttttgtcttctctaaggtgtcaaatagagctagttttgcaaaaaaatttatctacatacgtaaatcttgaaagaactaagaaaatgtaacaattaaaattgatgatgtttgttagttttattagcactatctgatctgaagcaaaaatattgagtactaaatagaaatgagaatccttcaccatatataatacaattttagctaagtaatactcttatatcacttgtgagtgaaatataaaaaattaaacaaaacttactataaaaaaatcttacataattatacaacacaatatcaaaacaattttctaaatcacatgaaaagaatattaaaatttacacgggtccttaagcaaaacacatgattgattttatggagcttcacgccatatatgtgtcatcaatactatcttatttttactctcacactccggatataataataaaaaaagtgttttaagtactactaaacacgataccgcgccgatctattttatcctgaaacacattattacatataaaccatgcctaaaacctaccatattcaaaacacacatactaccaattagaccggctcacaccaaccattaaaagaggacattcaatataatcccacaaaaatattcctccatcccctctcccaaaagtagcaacttctaaaccctggtgtcaagtgtcaaccaaagcacaaccccccatcaacccccaaatccagcacctcctatatacacacaccccccaccccagggggggggggttgtgcacataccaatttcgcctgcacccacacctgatgccacaccaccactccccccatcttttttttttggttcctcttttggcccccaaaaaaaaccaccacgctcttcgcctcctccctccctcccccacccccgtcaaagcgagagctcggtatcaccgccctctttcccttcccttcccctccgatccaatccccccttctcctcctcggggcgctcgctgagcatgtcggcggagggggaggccaaaaaggacagcgccagcaaccctcccggggtagaagtcgacggaggtggagggnagnagnagtagaatagcagcctggctgtcggggagccggcggtcggggtggccgaggctggtgtaggaggaggagaagggtagaaggcggatctataggagcaggagggaaaggagaatgtgtaggagggcggcgtgtgtaaggatctggtgctcgtcgagaacgccgtccccgtcgaggatccggaggaaggtacccgcgccttgcgcttctgctctcctctttgcgggatttcttggtcgcggtcgggaaaatctcgcggaaaatcgagtgaactagtattggtctttcatcttgtgtgacgtcgtggagcaggaaatagttgcagtacaagcagaatagcagcagaagcaggaggaggggggagggtttggtttggttgatgctagggttggtgctagcttttgttcttgcgaattaattgtgcgaatgcgtttttttttccctctcgcgaggctgaagaaaaaactgtctgttctgcagtgcgagtgctgttttgttagctacagatttataagtgtacttcggagtccactagtatggggggatttaggcatttagtgattctttttttgttcgttaatactagcttttttttccctgctgctaaatgctaacgagtcattcaaagattgtggatactgtctatccaaaataaaagatttggggatcctgtcagtccacatatcagttttggagcaagtcttttttgaactttttctcctttgttaactgtggttgacttgtaatcctggaagacaccaaattgaaaccaaatgtctcctctctcttttttctgcctttaccttttgttgttttgctaatttttattaatacttgccatgcaaaaaggagtagatttggactttgtttttttttctatcttaattttgtcagtacttgcaatgtcaagctgctttactattcattagaattaagtactcatgcctgcatctacttatttcagggcttatgcttgattgactgtgcaaagttcttagctgaaaaaagtttgtgtttgtttggttcacagccgcagcaactgcagcacttcaggaagaaatgaaagcgctcgttgaatccgtcccagttggtgctggggcggcattcaccgcgatgcaactacaggagcttgagcagcaatctcgtgtctaccagtatatggctgcccgtgtgcctgtgcctactcatctcgtcttcccaatatggaagagtgttactggtgcatcttctgaaggcgcccagaagtacccgacatgtaggctcttctaacttgtacaataatctatgttccttttgcaaaaactcagatacatttttttttgtatgttcaaccatgcatttctcagtaaatatgctagctatgtgcagtttttagggcgagtttttaatgtaatttcaagcccgtgattttacagcagaaatttaattttatacatgcagtaatattaaggtattaaagaacttattgaagcagacctttacaacgtcatgttagatgcatataagattcaaattcttccatgtgctgtttagagttatttgaggcatttctaattgatttacaatgctgaattgagcagtgatggggttggcaacactctgcttggactttggaaagaacccagaaccagaacctgggaggtgccggcgaactgatggaaagaagtggcggtgctggagaaatgcaattgcaaatgagaaatattgcgaacgccatatgcaccgtggccgcaagcgtcctgtacagcttgttgtcgaggatgacgagcctgattctacctcagggtcgaaaccagcatctggcaaggccaccgaaggtggcaagaagactgatgacaagagctcaagtagcaagaagcttgcagtggcagcaccagctgctgtggagtctacatgattgatgcagcatttaggagctgcataaagagcataactgtgctggcaattagagttcgcttcttattgtaatcctgaaaagactgtagtctggtctagctataacctcatcaagcaagaaaagtgtctgtggaaagaagccacaaaaactttcatttagctgtcactgaaattttcagtttaggtgtatagtttgatttagctttgccgtgccctctgccttcaggcagatgagcggcattattggataaatcctctctgactgacaatatcgcattgtgactcaagaagccgatggaaggatctgcgagactagatacgaagctatttgttgtgtatcattttatatggcctgcacaattgtgtgattttgtcagttgcataacatgtggaagatccataattttatgcactatggagattcaattaccttcctgaatgtctgagcttcgacatgttattggttattgtaacttaaaagcaacctgagattcaatgtgaaagggttttagattccagcttctgaggtgtgatttcactttatgttgatctcattcttagatgagtagtgcttcaacagtttcaggtatgatatttccagtgtttgatctccatatatgatatgattgattggtgtgtgagatccatcatggttactggatgaaattctgaaaatcaaaccaattaaggtcgaatcatttggatttcactccccatgattggatcctcttggatgcatttgctcatacaacaaacacaaatgtctccattgagcatttattttgttagttctgtactggaatcgagttcaatgcttttggttgcatgggattctaaggtcactcttgaatagtagattgtttgcagacaagtcagttaatttggcagaggaagtctggtgcttttgcagcatcatttaccactgtggctgccaaagtgaaacctgtaatttgctttgtttggagaggtactacagaatcaatggaagcaagggagatttatttctgtacctggtacttgttttcttggaggttaatggtgcctgatttcaaataataataataactgatccacacataggacgctaataagctgcctagaatggatgaattttgtcagggaactgacgtccaatctgtttggatttttgaagaaaaacaacggccaggattgagtaagatggctatgtatttaagtgttataatcaattgtttcttgataatggaaatcaaataaagcctctacattttcttttaaaaaaaacaatgctctacatagaaattgtatccggccaaaggttttttttttttagaagccaaggatgttatagtcattgcgaactccatatctattgacttccttcacctttaaaacattgagatgacacttgaaatcaaggccaatggcgcttgatgattgcttcattgatccgaagttcagttttgagattttgtactccatgtttaaagcacccgtcacaaaacaagaacagtagggtaaattattgcaaaagtttagtcgtagccagtaacttgattttgaattgaacttattccttttataatggtagtgtaaattttgctgtctacagtctacaccaaccaaaaatgtacaacttggtatggattcatgcgtccaaaactctatcaccacattccagacagaacttgaaagacttcaaacctaccttgagatttgattagtcatttcacttctttacttacctaaagatgccgatgtggcagtccataaatttaattgggtagttaattacatgaaatgcattttatgacattctactacgagatgccattgcccctgcctcctgaatcacaatgccagagcggaagaactagggttatgttccactactacctaaaactaggagggcaagttgcattgcacccttggcctacttgcgatttgcattagtagaagtcctatcaccaaagttaataaatcagttatttgccactaaaaaagctaaattattcataatgtgtactccctacgtcctaaaaaaagacaaaccctgggtttccgtgtctaactttaactgtctgtcttatatgaaatttttttataattcgtattttcattgttgttagatgataaaatatgattagtattttatccgtgacttgtctttttaatttttttcataatttttttaaataagacggacggtcaaacgttggccacggaaacaagggtttgtctttttttgagacgaagggagtaggtatcgatgatatttcccttcacccttcttcctcatggctggaatgtcagatcaatgcgcatttccactcattttggtgaaagatcagggaagaaattgcagcacatctgtctttgctgtatctagtgcttgttgcctgctgctaacattattcatttattatttatggtgtccgttctgagtgcctgaatttatgtttgcacttctgagcagttcacaagtactgcacagcgaggagtaaaccaaaaatgaagtgacagctacttgtcctgcaatatcctcatttgattttactcgtgagacatggaaataccagactgtcatttcgaccaagtgatcctgataagaacatatggatgcattaagagccatgttggcaacttggatcacgtattgaacagtatgcaaggagatgctgcctgtcaatattgatgctagtactttcttctgataagtgcattttctgttctgatgaggatcacaatcaagaaacagagtggatgaagttacattacacggaccacggttcaataaattgatggaagttgatagttgtagcagcgttatctacaaacatttatgttctaattaggatcacaatcaagaaacagtaacagatgtttccactcgagaaagcagcagattacgaatttacattgcaccacagaccacggttcaatacattgatgaaattgatagttgtggcagcactttctctacaagttaaaaacaaaaacaaaaagagaaaaaaaaaagggggagtgtttttctggttctctattttctctttacagttgttgcagtaccctctctcagatcaaatgtagtcaggtagcagacactagaaaccagattagtagcacctctgtatatatatagtacattttaaggaaaaactagcaccaaggtctgatccggagtaggatctcctgtgctcatcaagagtcaacacagctcatcatctgcttggagtttttgaagtgctttcttcgcataaatagttattgcagcggtagaaactgcagcaactgagaagccaaggccgttgtaaattatctgatctaccgacaagaatgaaccttgggtagtagctacggctaggctttggagaagtttcccactgttatcacaaaattgaacaggttaacactagataataattcagtaataattaacaaagtgcgtcatatctgaataacagaacagggtgcaatgcaagaggtacaaacctgtatattgcaaggaaggtttcatgtaccgttccagccattgaaccagcaatatatggcccatacttgacatttgtagccacagaggcatagttaaaaactagatatggaaatggagagatcctaagtaaggcaactgctctaaattgatggaaccaatccccttcaccagcaagtctaacaaaagctgctttcttcggccacttctccaaccacctctgcagaacaaataccattacaattttgtagaaaaaaagaaactcttgaacttatatgtgtaaaatgtgaaggaggttaagatactcacgtgtattttagaatggaatgcggaccctataaagaatggcaacgacatgcctatgctcattgctgctgtaattatcaaaaagccatagaaatatccaaaggacatccccgccatccacataaaaggagaagaaggtagcaacacacttgggaaaaaagcgattgcgccgaaacatatcagagcaatgactggcctgctgaaagttcttgactcccattcaataaccggagcaatcacctgccaacgacagcaacatgcagaacaaggtcagcaagacaacaataggagacttgcaaaataaatatcacagcatcacaatcaacataagcataagtaacaaggcaatcataagagttcaaatattcattggattggacctagtaaaaatgataggcctttctggtttccagtcagatcatgcaacaatatcttgataacataatatcaagaaccagcagcaatttcagactattcctatcagttccactttcagcgaaagcacacagagcatcaaccaacacagaccacttgttagcccatgtcaaaatgccatccacaagcaccgactggcatttaactgaacatcttggctcattctgcccatttaacagacatcgccatccaacatcctgatattcctttctgctacgagtgatatccttgaatacaaatgaatagttatctaacgagccagctatatcaccaaacagaaaactcgtcatccagcaccagtgcgatatataggagccataaaatacatctcatttactctcctcctcctacaatagccaaaaacatgaccatggaaacagaccaggggaaatattttccttgtaactacttctgggcaacaggctggccccaagagattgctttcaagtaacaccaacctgcgggtccagcccccaaacaccagcacatactgaacttgcttgttgtgtccattccatgtgctcttgtaggtatgcttttggaagaggtgggctgatataatttccatgttattgagactaacgaacagttcacttcctgacagccaaaaatatcaggaaccaattgctttgtgatattattcctacccatccacctagtagtgaaagctccctaggccaccaaagcaccaaaagcttgcagaccccacatatagagccactgtgcaggcccagcataccaattgacaggctctggccagtattagctgattgatatttgatacctccgttccttgcaaagaatatttactatatattacgcatggcacagtgtatataatccatatccccaattgcgacgttcccatttgatccagccgtccccataactttatgagaaaatctatgaacattccatattccactagtaataattcagatcctgcaggccgctataacttatttacttttgtaaaactatgtggaactaatcgtccagcaccaccaccattaatcacttcctccaatccatacggtggtaaaattgaattaaacatctataaattattcatttcgaactagacagaactgggctaggataacaatccaggcaaaaaaaaaacagaatcaatcctaaagtagttcaaggaaagaatagcgcgaaatcaacaaaacatgtgcaaacatcaacgagcgagaagcaaagtaaactaggaggggggtaaatttgcgaacgttttgctagcacaaatcaaatcgattctacagcaaacatcctgagcagaatttgaagaatagaggagagatctgaaacatcggtgaagaacccctctagtcggcaaggaacctttccccaaccaaaaggggaaggaaggaaggggggaggggagaaggcggaaaaggcaagctcgcacgcacctttttaatgacgaggggtccgaggaagacgacggcggcggcggccgcaccggcgaggaggatcccgagggcggcgacctgcgcccaccaccggatcgcgcgccaccgcagcacggcggggcactccccctccccctcccccttccccgcctccttccccaacccggcctccacgtcctccgggatcctgatgtactcgccggcgccgcagccattggtggcccccgacatccccatcgtcggctcgtcggtgcggacaaggtgagccgatcaggcggcggcggcgacgaccatgccccggaggaaaaaaaaacgcgcagctcgctccccgccgccggatccccgctgccccgccggtgtgggtgggtggggaggcgaatccggctcgagctggcggattccgatggggctgggaggctagggtttgggtcgcggaggcgagggcgaggcgaggctcgcacgcgcttatgagggggagggggagggggaggagagaggcaacggcattggagcggagtcggagaaagaatacagtacagcctttttttttctttatttgttttcttttatttcttctgtggatattttaatggcgtttcggttggaaattcggaaaggggaaggggaaggggaaagggcaagggattagagctctggattgaccagtttgccctttaggtgttgtatttctacccgtgttcgtcccaaattaaaggggaaattctaaaaaaatcaaaataccattgtgagtttgagattctgactcgtatgactcctaaatttagtttcagaaattggatctggagtaaagttgtggagtagtctaaactcagctgcatatctctagtttattttgaaagcgatccacccagctccgctcctattttacatggagctgaaactgtttggctgggctccagctccaggagagatagatttagagttggagctacaagcccctaattcatcttggcttgagatttctttgtatttggtgttgctcgtgtattttttttcctttgttccgcatgtgttatatgaattagtatatctcttgatggacatgactctaaacacatctgacccatgtgaccatggctactcgccaattagtatccacacgatccatgtgtggggtttgtagctccgagaatagccgagcaacggtaattgagagaatctcaaataaagattaattagaaggggctatttgcaacaaatactcttgtaaagaagaatctcaaactcatgataacactcaaggtggttttgtaattttctccaaataaatcttttttaagtttaaactttgtttcaaaatttatttcccacctaattatttttgaaagagggagtatgtccgaggtccattcgaatttaataaatattttactcgattatacagataaattaaatattactaatattataaaccaaacaaataacttagataagtgtctaaacaatgtaatataggaaagatcttttgagaaaatatatatttgtaatacatttgagcaaaggtatactaatgctcaaatgtattataaatggtccattacttttacaaatgttttacagatatatatcgtcaaatttgtgtgggaaaagatgagaaaaacacttatataaatattctatatatgttgatgtgttacaatgggattgactcttattttcttatatatatatatatatatagcttccaccaaatcaaatcaaacggctaaaaagtatatatttcttagtatgagttttgtactaatgttttaattacgtagaacactgctttattcgtcgctagatattgttcatccttgaatttgatcactttctttgattattacttcccctgtttcacaatataagtcattctaacatttcccacatttcatatttatgttaatgaatctagacatttcccacatttcccacagtcagtctagattcattaacatcaatatgaatataggatatggtagaatgacttacattgtgaaacggagggagttctaagtttatattgttgaggtgatatgtttcgaatttttaccgtctaactcaagttgtgtgagttgtgacacaaaatatctatatattgtgttaggtagtatccctccgtttttttatatttgacaccgttttttctttacaaaagtttgtctaattattattattattattatgatttgttttatcattacaattactttaaccctgacttatatttccacacatctgtatgattttttttaactaaaacgaatgatcaaatgtaaatttaaagagtcaacaatgtcaaaaaaaaaacatgggggaatgtatgttttgatgcgaaagagaaacataaagataaatacagatctgccaacctaatttacctatcgaataaaagcctagctcatttttggaattgtcacacgtgtatagtgcaaaccccacgagtacttatatagtttagttcgtggtgaccgttccattgacacagccagggtgccagcatgaagtttgcatgacttgcacacatgagttatggacgtcacatgctttttttttccaggtgaaaatacagggcagacttgaccaagaaaaggccatggccagttccgtaatttcgcacgattaattaccagccattttcccattaattaaacaatcaccatatatcctactactactaccactgactgggaacgccccccggtcatgaggtgggcccacgagtccagcgacgaggacctcctacccgtgggcccacctgtcagtggcggtgggcagctgtccgcccgcgtgaacgaagctcgtttggcccggtcggccgaaagcgaccgcccacgagccgcgccgggttggtcacggaggcggactggcggagtcaggctcagaccacccatccgttggctattttcacttggagtctagcgctgagtggatgacatgtgggtccggatagggcgggcccgctgttgtcagtggcgctgggtcgttgcgttgcgttgcgttacctcgcgggatacggcgcggtcaaaagtcggattcgtttcacttcgccggctcgctcgtgcggccgtccaaaaaagtgaatgaaacaaaatatatttaaatttttctcattaatttcactcggtttttttttcttctttacttttgagattcgattctatggcggtagggtagaagccaacacgaaatgcaccgccgcgatacacacggctggtttattttatcgcaaaatctaaaccgagaagcctctcggtttagtcttacagcgcgacaccgctgaagctattactctactcaaaatatattagtccatcaagcaaatagtaataatctatgcttcaaataaaattttctcttaaactactcatccgatctacgatccgattacaccattgtgttcgtaacaattaaatatttataacaagatctcacatgattatattttgatgaaaaaacttgctctaatatggcatctcttcttccttttctcctgcaagcaaatggtgataacttttgtactcccgtgcccctatgaattgtatgaatagaaaaaatagaggaatagaaaaaatataagatttttaacataaatataagtgtaaaatagaggattacaaaacacaaaaaaatactaaatgatcgtttgattgaaccgtatgataaagaaaaaaaatgaggagagataaaaactcaaaggaaatatttcatgaggttctgcctcatgaaatatcctccgaaacttacctggaatgagacatttcataggatgtcatatgatttattcctagtaaaaaaataaaatcctccaaaattcgggacatttaacttattgccacttttaagatgtggcaattaattatttatcactcgctgtctataacatgtggaccctcatgtgtctatgatatgtgggtccagtggcaaataatttagcaccgctcgtaagagtggcaaatagttaattattccccgaaattcctataatttttctttgaatcgaagggggcctaaaaggaaactttccttgagattttacctcgtgttaaatttctctcaaaacttacatggaaagaggcatcatagaaaattcataggattacatacagttattcctttgattcaatggttttatagaaaaaatttctataagaataaaatcctctaaaattttagcctaaaggtacgaagcactgtgcacatcaagtgcaggctgtgcacacaatttttccacaagtccttttcaagctaagaatcaatgtcaaactccacctgataaaactccaccaaaagcatcgggtacatccttgcttggaagcaagataatttcgtctttaaaaagaaggaagcaatcggatttcatattgaaaaaaaagaagcgacctaattaattctgatccactttttcgctggatctgaaactgaaacggatggttggaacctaatttcctctgcgcctaactcgtttttttttttatttttcctaccagttgaagcagcaagtgccaactccatcaggctacgtgtgatgtgagatggcatggcttaaaactacaggaaaatttgggtcctgaaaaaaaaatgtaatactaataatgaaaagggacgacaccaaatcatgccctggctgatcaattgattgaacgtgctacagatcattgtttcagtcttcatgacgccaatccattgttaatttatttattgatcaatatcctctcatataaaaagggacagtattcattgtacaacctagtttcgatgatgacaccatgtggcttccaatgatatggaactaacaaaaagaatgttggctttcatggcaaaataatgaccgaactgaacttgaggactgagcttaattacttgcaacttgactagttatatgaattagaatttcagtcatcaagtgcaactccctttgtaaatatttaacatgtaagacaaaaaatagaaaaaaaagttaaaactcttctcaaacgattagttaaaaaagaacatatatacacatttatcttaaaatactaggtgaaaccccgcgcattgctgcgggaatttagtatgataacaataaaaaaataacgtgtaagatagctagataacatcaaattaagtaaattaatgtggtttatgataattcaaatttaaatagtatgtagaatggtgattcaaacgtaaaaagtaaggtgttatgactttatggaagaagaaaagtagagagatagtttggaccgtagattaatcatctaaaggctaaaaacaattgatgtgatatgacttaattagaggaaaaaaggaaaaagataattcggaccatagattaatcatttaagcactaactaagtgaggatgaactatataagtatataggatatcataaaacataataaagatatacattgaaaaattatgtgaattatgttggatgataatttaatttaacatgtttgtatttgaaaagctcttaaattataaaaactataaatatatagcatgtttgcatgatgtttaaatatgatgattgttagtggatgatgatgtggcatcttgttaattagtggatgatgatgtggcatcttgttagtggatgataatgtgacatctttacatgttaagtttaaggagttagtgggggataactttacagtaaaataggattctatcaggataacataaatttatctcaataatcaacttatattttttttattaaccatcttggttggtttgtaattgttttctgtgtatttgagcgattctgattctttcgctgttagctcatacttaaggcctcatttgatttgcatgaaaattatagaagcatatagtagtagaaattatttgggccaatggtttgtatagatacatcagtattttgctaatttattgttaggggtaattttattttctttaatcatactgttaacaaccaaatttgatacctagattcgagatatgaaaacattgctaaaatttacaaaggaccgggtttcctttatgaagccagtctaaccgccgcctatgggctgatctgaccgatgatatgggtctagtttgactgtcggtatgtggccgatctgaccggctaagtctgaggccaagttgaattttgtcgggtctcaggttttcttgcttttgaaggtatttttcgagttataattggtctctaccccgagtttaacatggaggagatcctgtaggagacaagaccaacctcttttataaaggctatggacggttcaattggacacacaatctactttcaacacaattagccaattgaatcgttttttcaatatcacatctacttttgcctagttctagcgtagtttcattcatctttatcgatttacaccgtaaatcgtccgccttcgctacgagagtgcgaaatccttttgtagctttgtcccgtaaaccttgtttatccttgtttatccctgtccgcccacgaaactggtgtttatccttgtttcatctaaattggctttgctagccggtttagttttaaaaagccatcttgatttagtttttgttagattgaggtgattggcggctccatattatcgcaagacgtttaggtgttccgattatgattgtcaacttgccaaaaaagttaccaacacgtaacgtaagtcacccgtatagcagcgatggcgactcttcattctcacgtcgcctcctccatccgtcgctgccattgctgttgccatttgatctccctgtctagacgacccgagcgcccaatccctgcataggaaccatgactggcgtcttcgtatggcttaagtttggatttgcatgcttaagtagttttgccctgttggtccatcccaaattcgtgatggcttcatgttagggttgtggtcaatttcaggtagcacatctacaatttggttcatctctcaaacttgtttgcactcatgtgatctgttaatcttctaaatggttgaaaaaaaatgttatttctatcttagcccttgtctaaagtctgaacttgttttagaacaaatcatattgtttctaaggcttctgcatgggttttgctctagtatgacttaatttggcctttgttgatgattctatacctatatgtggcactataaattgcttcaccattaccgccatagattggcgttataaagggggcagtaattcaggattaacgtcttgttaagatggttgctgcaacactacttaatttcatgctcaaagtcagagataaatgagacgctaacttctttggaaagtacggcctaacttagggtttccaactgaactaagacatgtaaaatcactttacccctccaagtcagcatttctacgggtgattctatcctcctatgtttctatcagcattaattaaggtagtagtataaatggatctgaaactttcgataagaaatgatcaacggcttagatttaacttataataccagtagagagcaccgtagcaggcttttgaaataaataattgaatcctatctatttatttaaatatttatggaatgtataatcctataaaaattttgagagaaaattagcaagagcttagatctctttaaaaaaaatcttttgagtatctcttaaaaaaatttctttgcgtccatttctctctatcatattctgtatttttttatgtgggctaatcaaacaattatttctgtaatttttttcgtggtttgtaattcattgttttacacattctatgtttttttatatatttgtttttaatcttgtgtttggaaggagctgcccttgaaggaaattccggtgatcccagtagtgcgagcatagcggatttcccaggttgcaacgggtcaacggcaccacaaagtggacactggacagtgacacagtggagatctgtcagcatacgtgcataaccattactacgtccattctgtacggtgatcgatcgagaatgtacagtacaccggacagcgagccacatgatcgagcagatgtagcgtacaatccacgtaccgtcatatccggctccaggtcccctgggcctccgttacagttggcgatcaaaggaagttttccacttaaaaaagaaaagaaaaggaaagaaaacgatcagacaaggaatcactcatcggcaaccaaaaccagacgcaaacgccaaccccggccacaacgaacgagcgagcgagacagctgctatcttcgtcaatctcgtcatacgcctggtgagtgcgcgtcgttgccgtttttgccccccaaaatccgcacgcaagcaagcaaagcaaagcaaagctagcgtgcgtgacgtcggggctcggctgaacggccaccacgagcacgagcgaaggtggcaaggcaagagagcacgatcgcgtgggcaacttggccgcgccggcgccgtagccgcaggacgcatgattggtttgcgcgtttcgttcctcctcgtcaagccaggctgtggccgcgccgtaggttggcgaggccgcgagatccaccggggctcgtgtcgtcctggcgtggttggttggggggttccggtgccggtttgtgacccaccgacagggacgcgttgccgatccaatggcatatcccccgcccccggtgcggttttagggaccactcggatgctatactaaatttgtcaccattcaccatacttttatgccacacttatcaccttagctactaaaataggattatgccacactctattgagttgatgacatgtggggccataatagatgggtagaaatcttaccacaaatatggctatgaaccaaacaatatgctaacttggtcaaacttgcataacatgaggtgtggtaatctttgtcaaacttagggagcaaaccaaacaaccccttagaccggtctaccatctcatgtatagtacgacgatcaaccgggccgggtcggtctgtctgcttcgcacatgtaaggagcgtgctactccatccgtcctagaactggatgtgacacattctactataacaaatcttgacatatgtatattcaaattcatagtactaggaattgtcacatctaggactaggttgattttttatgcgacggacagagtactagtatagtacataaaatgggccatgattgattgaaacacggtacaaacataggcgttcacgatacgtgtacgctcacctctataaacgtatatacgtacaccctatctctgcgggtagttgtagtatgcaactgttacatttactttgctaggccaaatgatgaagcaaggtatatatgttctgaaatgaacaaaagcacgtgtgttagatgctcgagggagagcggtcaaaggtatcaacgcgagattaaaagccaaaatttttggcgccggacaaattcattttgtaaatgcagttaacgtttctcaaatttggtgaatacctctgtattaacattcgtccgagtctactgaagcatatcactaatttacgactcaatgttaaacctcgtaatagctactaaatctgtagaggctgctggagggattgtcgacaggtcaggcaatgtgcacatctcaaaaggtccttggtgcagtcatcgttgtatttgccctggttccccatgatttcatcctccagtaatgtgttatcaaaattgcatgtttgtgttctttatatatctttaattacatcaagatcaatcctaatgagatgtgtaccggggaatttcgattcctcctatatatacattgtgctcaacctttaatattcttgaaaataagttccactatcctttagaatttttcacacttcatgttttatccattgcttatgtattctttgtggtagaatgaaagtactcaagatcgtggtgtttttttgtacttgatagtaaaatagaagggatttcccatactacttaatttaaaaatttactgctaagagatgagtggacagagtagaaaagtcactcatttttcatgtgtacgtgtttgaagcctttaggcccccggtgttaattttggtaattaatgacaagcactaattgtggactaaccgttgtctttgagctatacattttaagttaggtccacgtcatatgtgcgcatggatgattatcgatggattaaaattgacggcgcaaagcaaaggggaagaagacggtaaaactagcgctttaatttagaattgatcgaggtgtagggcgatcaaatttgctagtttaattttagtttcgccgtactattaagaggggtaatgacctagcaaagagatgattttaattgccacattaggtcattgcattttcatttgtgctctctttttcattacacacatattcacttgcaaattcactgggttcggcctgaccaggggcggtcagaccggccacatagtggcggtctgaccggcgtgccctgcccggtcagaccggctacatagtggcggtctgaccggcggcactttcccggtcagaccggccccctagaggccgagatggtgctgctcgggatggccgatacagagccgatggagccgtattcggtcagactgagccgaggccggtctgaccggccaccccatgccggtctgaccggccaggccgatggggccctctgacagggctacaacggctagttttctagccgttgcaaagtagcacggtctgatcggccacatacctccggttagaccggcagagcacagagttgggggatttcgcccccaacggctagttttggtgggtgggagtataaatactcccccaccagcagcaagggggctctcttggcacccaattcaattgcatacaccccttgcacctctctcacactcacttgagctttgtgttcatccatctagtgtgttagagagttgtttagccaagagtcaagtgcatttgtttccattgtagagctagtgtggcacttaatcatctccacaccgggtcattgcttgttactcttggaggttgccgcctcctagacggcttgtggaggagttgcccagtgacctctacgagaagattatggaggaggcccggcgccggtttgtgagtggtttggagttcaccaccttcggagtgaaggaagaactaccccgagtgattgaggcttgggtagtcctctccgtgggccggctcccaccttgcccaccccttgacgaagggggcgtgcggtggcttcgtggttgagcggtggagttgggctcgcctcaacggggagtaggaaaccggcgagtttctgaacctcggtgaaaaatctcttgtctcattgtctcatttgattgtcgcatttacatttgtgcaatttacatttctagagacacacttgagatcatatcaccctaggattgcaaaacattgacatatgagcgtgatttactttcctagagatataattgagccactatcaccctaggtttgcaaaacataacttagttgcttagttagagttcaccctcaccaagcccagcaaattaggttagatttgattaggtgttatttagttttaaatcgcctattcacccccccctctagtcgacatctcaatcctacagtgttccaaactactaaacggtaccatttgcaaaaaaattttataagaaacttcttttaaaaatcatattaatctaatttttcatacacaatcaatcatacactaatagtatatatatctcgttttacgtatcttctcgatcttctttttcccactcctatcaaacttagccttagggcctctttgattcgtatgaaaaatcatagaaatcttctaggattcaaatcctataggaaaatttcctatgaaagcattgtaaaatcaaaggtgtttttaattattattctgtgatgaacaattgggcattgaagattattggttttgttatttggaatttatttacgaagtggttttggagaagattggatttcacaggtgaatcacaggtttgttatttcatatgaccggtcagaccgggcagtgtgtgccggtcaaaccggcggtgatcgagcggtcggaccggccgacgctgagtcggtttcggtttcgggttgtttgtttggatatccgtgattatttcatgattatggcttctagatggatactatacgtatgtaatactgttgtttgctactaataagtcaagttggagatagcttggtctcggaatatggtttctttgtttatttcatgtgtaggtgactcgatgcctcaggagagtatttgcggtgatggaccgggagtcggcttggggataagatgacgtccgtagtggtcagagatcatgcgggatacttaggctagagttgatgcacgtggttgatggagatttcatatggcatacgatggaggtattgtgtgcgtatgggatgcggagtcgattttggaaggagtccaaatttggtacgattggttatgtaaagtttctttcttgtactagagagtttcctaaggtgtttaggactcttagtatgagtttggttcgtggttttaggctgcctacctcatgtataaatagagggggagcgtgaggcttcccagtattgcttttgagagcaatagagttgagttttgagttagggtttcaagtttagtcaaaatttttgtaaggagttctgttggtgcactttgtaaacacagagagaatcaataaagttgtcatccactttaagagttcttcgatttgtgtttcaccgggtttcggcgatctaaccagcaactcaccggcggtcagaccggcggcaagcggcggtcagaccggcggcggcttcaggcgcggcaggcgacatcggcggtcagaccggtggcatccacacggtcagaccggcagatcaatctcggtcagaccgatctctgtcgatttcaagggtaacttttatttccgctaaaagttttcggtttttgggtataccaaccattcacccccctctggttggcttagttattgtgattcgatcctacaattggtatcagaaccttgttttcttctttggatttttatcgatctagagtttttgccatggctactcttgctaggttttcaactaagcctcatgttttcgatggaacggatttttctcattggtgtagtaggatgcattcttacattatggctgaagattatgatatttggagaaaagtttctcatctttatgtgattgctgaagctattaatactgctgctgaaaaaactgcttttgaacaaaattgcaaagctcgcaacattcttttgagtggtatttctcgttctgattatgattgtgttgcgcactttcgaactgctcatgaaatttggaatgctttgagtaactttcatcaaggaacaaataacattaaagaacttcgatgtgatattttcaaaaaggagtacattaaatttgagatgaaacctgtagaagctttggatgactatctttctaggtttaataaaattttgagtgatactagatctgttgattctttttatgatactaattatccacaatctaagatttctcgtcactttttgaatggtcttgatatgtctatttgggagatgaaaggtacatctattcaggagtctgttttaacatgtctactttgactttggattcactttatacaaaattgaaaacacatgagatgaatgttctttctcgaaaagttgattctaagtcgagtgctttggtttcttcttcttcttctttggatgttgatgcttcttcatctaagccttcttttcttgttgtttttaatgccacatccgatgatcaactcgaacagatcgaggaggaggatttggctttggttgctaacagaattgctcgagctatgaataatgccaggaacaggaaaagaggtggtccaaatcgttactttgaatgtggttcaattgatcatcttcgttcacattgttctaagcttagaagaggcaaaagagaagacaaagatggtgagaagaccaacaataacaagccaaagggttcatcccaaggaaggaagctagacaatctcaggaaggcttttcaacaagtttgcgccgccttcgagccactaagtgatgtagatggtgaaagtggagatgatgataagggaaagaacatcaccgatgtttgcttcatggcgcgtggtgaatctgacatagagtatgaagataatgaggctttggtggcaaggaaggagaatgtgtggatcgtggattccggttgttcgcggcacatgaccggtgataaaaattggttctcctcactcaaaaaggcatccaagactgaatcgattatctttggtgatgcttctacaagtgccgttcttgctacatgttttgttaaggtaaatgaaaaatttgaattgaagaatgtagctttggttgaggacttaaagtacaatttgctttcagtttcacaaattgttgatgaaaattttgagattcactttaagaaaactgcaagtaaagtttttgattcttgtggtgattctatattgaatatttctcgctatggaagagtgtttaaagctgattttgaaaatcatgtttcacctgtgataacatgtttggttgctaagtttgataaagatgtgatgttttggcatcgtagacttggacatgttggttttgatc

SEQ ID NO: 21321 - DNA, 672 bp, Oryza sativa
gatgccgcacgggatatcagtgccgatatcaccgcagtccaagtgaggttgaacagaggtttgcacttgactgacgttgagcagagggtgaccttcgaccggatgcaggagaagatgcgtgcggtcatgcgcgtcttctcctgtcgcagcgccgtggacgtcgtacctccagctggtccggtacaaccacggcctcgcgcgcctaccgtcggagcaggacctcgacctacggcacctatttcgcacggtactgctcagcccagaggtttcttaagttttgtttatgtttttgtacgaaaacatcaccccgtcgtaacttgatgttccatcctcgcaggacctcgtttgccttcgagcgcccctagcttcagagcagtgcgacctacagcaccggtttcgcacggtacagttcaacccagagattagttcatttttttttcagcttttgcacgaatatgtcaccatgttttaactgcacgtttcctcatcgcaggacctcgtctgccttcgagcgcgttcgcaggcacgaccggcgcttccgcgagctccgcaggggcgttcgccacctcttcgggcgcgttcggcagctctttctcttacggagcgtcgatccctcgcccacacggtactttactttttattaatactattaaaatacatgtatgaaactga

SEQ ID NO: 21322 - DNA, 698 bp, Oryza sativa
cttatgaatagtaggatcactaggattgctgaatatatgctttgttgtacataattctttaagaaagtgtgtataaatttcatttctttgtgggacactaagcagcatttgtttttttttaagcaaatctgcgtttgcttattatgagttaattcgtacttcttctcaactgcaagtttcagataactatgacttggtactattttgcagatctatattcttttgtacaaggaagtttctcttgcattgaaaattaacagcatgtacagcaaacagaggcttttaaacattcatgagaatgttaaagttctgcgataccctgatcatttctcaactggcatatacttatggtacggtgagaactttacactcatttacactatttctgcagttaattagatccttatggttggctattgccttgaaggtcacatcatgagaaaatcgttattgttgataatcaagtatgctatattggaggccttgatttatgctttggtcgttatgatactcctgagcataaagttgtggatgttcctccttcaatatggccaggaaaagattactacaatcctaggtaatgttttgtgctctcatcatatttttatctcaagatttataggatagtgtttcctaatttaccgaacacgattaatgtttcctaatgattctaaaacctttttttttgcctatctaat

SEQ ID NO: 21323 - DNA, 7516 bp, Oryza sativa
atcaaaggcgcataacttagtgcactattaagactgcaaattcatagaagaaacagacaaagctctttgtatatgaccccatttttctaacatatggattgcatgtatcagtgtcactcttgaaacaggccaaaaccaaaatcttttattttcataatgtggtatctaccaaaagtgcatcctcactaatcaacccataattccaacatgtgaattccattatatcattataaatcataaaagaggtgaatatctattatttttatcatgtagagactatcaaaggtgcatccactccatcataattctaaaggatcatgtgaactatactataaaatagctccatactaagcttaactaagtacatgccatgccgagtacctgagggaggggtagaacagcaaagacatcaatcagaaaatatgttgacaagtatcgctttgctattgcatatctatcctcaaccaagacaccccgatcaaaagttgtaggagaagacgcgatatagcctgtcctgaactgaaatatgatatggagtatatagaagatatctgtgaaaaagcgcaggacacttgctgtgatttccaactttttatccaaataccagcatgtattgttttcattgataaccgggatatagaagaacaatggatccacagaaactgcaaagatacatgacaaaacaaatatcttgttccagctttgcagaaatggtccctgaggatgaagagttccagttgtcaacttcatttcatgcagcaccgatctctctaaggtttcagaatgcacaaggtttcctaggaatgcaaaaattccagcagttctttccttaagtgaacttaaagcattatgcctcgcagtgacataacagactgcttggatctccagtcctcaaatctgcatacatggttaaaaaaatacagaataattattacatcgagttttcagtagttgttttcaatatttactcaaaactttaatggatcccaggactttaatattcattgatcaggtccctagagacccaaactttttttctctcttctctcttctctcttacttcaactacgatatttttaccagcagtcttcattatttactcaaaaatttaatcagatactggtgctgtcatttccatacatttatatgtcagacttcttgctgatcttgaaccgaagctagatttctattttggaaaaattggagagaaattattgcattcatgtttatatgctgcaaaagacaaggaaatgagcagtagcaatcgttccaacaagtcaatccatgccagggtctctcagaggccaaaatgtccaaaaccatcatgtgatgaaagtagaagcactgatttttttttttcgaacacgcaagagatatgcatatcatttcattaagagagagaaagaaatgcaagggatgcaagatttaaacaaaccctgacacccacccaccgaaagtcttacagaacacaacacacacccactcaaaaactgaagaaactcaagccgacctctctaggacgcaagaactacttagacaacagcttttggagtttcaaagctcccgccaaagaccaaactaccaaagtgtggcctcattattgacagcttggatcacatccaccacactagtgtagaaccaccgaattaccattgctctttagaaatcatcaaactctctccatgtttcatgtcctaaacttgttactataagttttgacacaaaacatttgacaagcctttattctttgtaaactaaagaaattctaaatcaagcctccctgaagattaacccacccagttataaccagggttcaaaattccggaatttcggtcaattcggaccctcccgatacgatacgaaaatattttgaccgaaatttctaaattttttatgaatttggtaatattttgttcaaatttaaccaacatttgttcaaaattttggaaatttcggtgacctccgatagaatcggccaaaccgaaaatttgaaccctggttataaccatggctttgcctgaaaggcagaaaactccgcagccgcaaaccgaacccccaaacctgctgacgccgcgctacctattctagagtctagacacacgagaccacaaaatgagaaagcaagcagggcatcgtagcgattagcgaagaatcagtaacaaattaatagcggcctaaggcggcgccttgcccgctcggctggctgtggagggagaacccgaggccggagcaggggagcgcagaggcttacctcggaggtggtgcgcgcagatttgacggaggggtgggggaggaatttggtcctcctccgcgtcgcggctgggattgggaagccggcggcgtccgcacggcggaggtggaggtggtggtggacgtacgtggtggtactggtagtgcggtggaggtggagatggaaagcggaggacggaaaggtgtgccaacggtcccccgctttgcttcacggctaggtcctaatcgtgggttcatttatatttttagtaaatttcaaagtaactacaacttgattgaccaacctatcaaatctcttctctaatattataaaaattaaagatatttttgtcggtactttgctacatcatctgtgtatgaaaaatgttttcgttggtactttggtacgccatccgcagtttttaaattcgtttgcttttgaaaatacatgtctgtatttgagtcggtttttaaattcattcttttttgaaatacagaagaagccgtataatgaatctctttaaaaaaactcgcatgctaatttgagatgatcaagctcctaaccacagcttataactttcacccgttgcaacgcgcagatattcttctagtagtaaaaaactagaaaatctgcatttgacgcgccgatatatgtataatcttatttagagctcatatggaatatataaaatttacgtacctcttattttagattatttatcactctaccaaatttcgtgtcagatgaggggatgcggcaaattaccttatcatgctcatttagtacattctaatagtagttatgttaactttgattactggatatatgtggcattgatgaaaggtggagataggggatcatgatctaaaaattgaaatgtgggaatgaccagtaagttggaactgatgaagtaatatatgtttacacgagttagtttaacacccttaaaaaaatctttcaaaagaatggaatttaattttgtgtttgtcccagacgaatggaatttaatttaatgtttgtcccagataaatgaggaaaaccaaagtatcatgtaattagtgtatgcaactaattagacaaatgattagagatgctattagaaaaaaacttaatgtttcctcaaaattgtggcaattttattaaccaaaaaattgtgcatacggtatccataataaaatgcacattcgaagaatattatttcttagtattgcaaattttcattcaatctttcaccatatttctattatttagtttttttattatttattttgtagaaatataggatatcaatatgactcaattttcggttttaaccataatgtattttattttttcagataaattttgcaaaattattcatatttttctctttgttatttctttacttctgtttatcctatttatgcttggttctgtgtgcccattagcttgagaaggcaatttcttgtgttgtagcaacggcgccagatcaccaggtcccagggcaggcatgggtgactgggctgtacacgccaatgcaccttttctttctgttctttttttcatttcacggggaaacgtctaggctgtttcctctaaatggacacgtggcagattcctggagggggcattgccaaatttaaagagatccacctggcccaataggaagctagagtttggtccctgaaatcgattttacagatagtttcaacttctagaaggttcatggtgttttatgggcttacgaataattggacatgggacaaaatcttcatgggcctagatgataaagctgcagtgccgctgtttcttttaatcacgttcacgaaaaaagaataaattcaccagccgacccacaaaatttacgtcgagtttgtataacatccctaatctctaatacaaaaatcttcaccctaaactatataaaaccgtgcactttcagtcctacactaatatgaatctctagttttgctgacatagtatcctagtcagcaaaataaaaaataaaaaaattatggcacccacatgtaagtgaaaaaaaaaagtgggaccctcatattttctttattgtcaattcttctctcctctttcttatcctcttctcttcccttctcttctcttctcttcagttattctagggccggtggcgatagagagggaagaggcagccaacgagcccagccgagctccgccgccgcctcgccgccagcagggagaaacacaatgaccgggattcccgcggcgactcagtacgccgagagtgcggcggaggtgtccctcgtggatgcgcaccagacgtcagcgatgggacggaagagcagcgcatggcataggggttgttggggtcgccattgggagctagagggaacggcgcgtaccatgcagagaagggcacgatgccgtgtagcctccttgcagatgttctcatcggccgcgcgacggtgcttgatggcggcattgtcggtggcgcagcgaatgcgatgtgcggcggggcaggcagcgcggagggggaagtggagtgggggtgggagaggaggaaggagagagagtcggcgtgcgcggtggctgccatggtggtggggaaagttagggcggcggcggcgtgagcgtggcgaattgtaaatggacaatgctgcaaataacatctccaattatcaacagccatcataatggccaaaattatttttcataaatagagagtttctgattcgttgggcctaaagtcttgttgtaataagccacaggatgaccatgctgactcaaaacagccccaatgccataagcaagcatcagtctcaagcacaaagggacgactaaaatctggtaatgccaacacaggggtagtggtcatagcttgtttcagttggtcaaaagccagctgtgctgcatcagtccaaacaaaagcttttttcttcaacaaggttgtcaagggtcgaacaaaaatactataattcttcataaacttcctataataaccagtcagtccaagaaacccctcaaagcaataagagaagttggaacaggccaagccaccattgttgcagttttctcaagatcagtgcccacccctttaacagaaatgatatggcccaaatattccagctgagagcaagcaaaggagcatttagattgtttagcatacaatttgtgttgcctcagcaccaagaagacttgctgcaaatgagctaaatgagtctacaaatctgggctatagactaagatgtcgtccatgaaaacaagaacaaacttcctaatgaaaggggtaaaaactgagttcattaagcactgaaaagttgatggagcattagtaagaccaaaaggcataacacgaaactgaaactggtcgtgatgtgtcttaaaggcaattttaggctcatccacttccaccattctgatatgatgatccagccttaaggttcaacttagaaaaattattgtgtaccagcaagtttatccaacaactcatccacaatgggcatagggaacttgctctcaatggtaatagcattcagtttgcggtaatcaacgcaaaagcaccaagtcccatctttcttgttaaccaccgacacaggtgaagcaaaagggctcatgctcggtgtcaccaagcaagaatcaatcatttctttcacttgtctttcaatctcatctttctagagaggagaatacctgtaaggcttgctgttaaccggtccagcatcaggcaacaaggagatgcaatggtaatacactttgtgtggaggcaatacagttggttcctaaaaaatgtcatgaaattccaagagtacctgattaacagaagaggaaagtggatgtgcaagactagcagaagagtgctgcaacattgcagcagcccatatatcacaacctttctgccacttcagaatctgaaggagagaaactgactggagttcagttgtgattgcagaatctaccacaccctgcaatgaaatctagctaccttgataatgaaatttcaaagtcttccaagcccaattacaagtcatatcaccaagtcatgcccaaaatagcatcatgaccacccaattcaaccactctcatatcaaaaacaaaagtgtgtccttgaatccaccaagtaaagttaggtacaatatattgacaagtgagaaaatccccattagctactctgaccatagaaggagatacagattacaaaggtaatcccaactgctgagcaaagtgcagatccaaaaagctatgataactaccagaatcaaccaacattaacaacactttgctatgcgccaaagctctcaatcgaaatggctcgaggatgatgagcacctgacagtgcattcagcaaaacatgacattcatccacttgatcagattcttcctcagcaatcactgcattcagcaaagcatcttgaatgatttcagtaatctgcattgctttgatttggcccagcacagcacacttgtgctcagatgagtacttttcaccacacttaaaaaaaacataacccattatccttgcgaaaatcactcaattgccaagccttccacggttcagcttgttcaggcttcagccccaaagtctcagtcccaactagccgttccacttttggcacaaatttcttagcaggcaagcgcttcatagaaggggaagaatccagtagcagcccttcctgagtcaaagccaccgcagtagcttgttgaatagtttgtgacagctgaagcaaaaccgcattgcgaacttcctgcttaagccccaaaacgaaacgagatactaacatcatgcctcccactgaaggatcaaacagtctgacctgataaacaagtgaatcaatttgttgcttatattcagccactgtaccagtttgagtcaacaaccgcagagctaaagttttctctcggtgcgtgttgccctcaaactcatgaatgactacataacggaaatgagcccaatcactgacatcctccaccagtttaacagactgataccactgcgctgcattgccatacatatgcaaaatagtagcagacacccaaaaagtagcagaaatttggtacatcttaaaataagtctcacacatatcaatccaaatatgcacatccggcccctcaaaacgcagaaaatccattttcggcaaatacgacttagcccgccccccatcctgagctcgatggccctcgccgtcaacccaatagtgtgcgtgggaaccaaatcgaggaggtggtggtggtggcggtagtggtggtgttggtggtgcaccagcgcccgaacgcgagaccccagaagaagaaccaagaatactcacaagatcgcctgagcccaaggatgatgac

SEQ ID NO: 21324 - DNA, 1916 bp, Oryza sativa
atcaggcggcgtgtcgcctgacaccccctgtcacgtcgtgatgatgagaggctgcttagcctcttatcacaaccggagacgacttgcctaacccggtcagggtagggttcccgtttcccggcgcaggtgaggacccgaaagtcttcactcattatgacgtgcgtgtcccccgtgtcagccggacagatttggcaagccccacgctgcagcaaggcgtgcaagagacttccaaggcaagtaacaagacatgcatttaatgtggttatcctccctgaataggctaggtgggcccatgtggtatcccttgagatataaaaggagttccaggcctacttaggaaggagatgggcccttttcactagaggagtctcctgcccctcaccatcaacaccttctactccaactaggagattttgtaattcctcactcaatcagctaagcacgggagtaaggtattacgcttttcaacagcccaaacctgtataaaccccttttgtctcatcattcttgaggggcccgaccccctctacaccgcctttctcaccgagtcctcgaatctcacccacttttcccggccaaaccaataagggggacctcactgccctccacttgcggagttcaccctccgacacggcctcacccaagggtagccgtcaaccggaacacagggattttaccagccggatcgagagaatatgagaacaatgcaaccacgaacagcctgaatctgataccactgtaacaagtcgccgccgccttcgcctctgatttaccagattcgatccagattgagaaatgaggaagagagtttggggaagaagacagcacgagacagaggtagaagaagaagacagaaatagagtagttgaggaagagacgtattcttgatttcagctattcgataacgtttacaatactccttcccacattatagtctctcttagatgggctcacaggccagactttcatgggctcgcaggcccagcacatcgacaacctcttgcgctcactgtaacccgtcacacaggcgtgacaagttctacagtagctacctactatggataaaacccaccgtatggaaaacgcatggtacacgttgataactgattaataaagtacaaaggggtatcaagacaaggataccaggcttccagcggctagaacatgcattgctttatgacttcacacaaggaaaccagcagtgcacgctagactgtgccggaataaaacagggacactttcttttttttttcttttgtctaaaatgagtggttgacaaatctttaacaatccattaattctatatcatgtcaatatatgtgagttaaaacaagtgtctccgttacaatgtgatcttgctccgtgcctggacttcaagagcctgatgggaacacgggatggaatgctcactacactactataaacacaatttgtatataaacacctgatgaataataattacacgtatcacctattatcatacacgaacacatatacagatcttacagaaagatacagacacctattgcgattttttcctctccttaatttgtaggtctagtgtcaactgaaagcaaaaacatcagcaagtaaaaaatgcacaagccatgcacaaaaaattccttacgcattcgtggtaaacagaactactgctcttctgcagcaaagttgggttctgctggtttttgtaacaaccttgcaggcacactttccttcaaccgagccttgcgggtggcatttctcctcaagatccgcatcatgttgccagcgaaacgcgaagcatatatcgctgccctgaagctgagagttgtagcaccgtcattaacgattgcgaactgcaacctcttctccttctcgcgtagagagtcttcgatcttctttctgcagtacctatgccaggctgcttgtatgaaaca

SEQ ID NO: 21325 - DNA, 2979 bp, Oryza sativa
acggggggagatggtttatgtccatccatagcagggagataaatgatctacattcacacacaaaagatattaacacaacggttactgctgcaacagattcaaggtttccctggaacatgtccccaaagaacctccctagattatggctccgtttggcattgttgtcctgtttaatttactcctagttagttagaagagttatttactaattccagtacgattttgccattaatgctccaacaaaattttatacatccaaaaaaaagaaataaacacgtgaccttcaaagccacagccaaactgatgacttgctatggtgctactaaatccaatgctgtgaaaaaagatgcctataagcgtaaatgaagagcatttcagatgcatagaaactacagaagttggatgatggagctgatttccgattcaccatgtaaaccccagtgaccctcgtcctttacacccttcccactgcttcccagtttagtaatgctttctgatgtctgaacccagaaccttaaaatgtgaaaagatgacccataactagtacgccaatggttttacattacttaattttccagtttctacgtgagtacctcaaacacatttcatgcactgaaaatttcatgctagattactggtgtgcacctaaagcacgcgactattggaagacctacatcaccactttagaggtaattggcttaggttcagagcaagaaacaatgacaccttgcaacacataagcaactctacaactattgaaaagaaggtaaaagaagccttaagctttcatttatgtgccttttggaacatggtctttgtcattcttgaacaaccaggatacttttatgtcatcagcaattgtgaggaagatgcaattccggttttaaacaatatagcatgatgagctgcatggactgaaaatattatgctacaataagtagaaaacaaatggtgctcagccaaatctcagatcatatttcttgggtctgctactgtaactagatttggctgagctacgtgaaaatggccaaattatttacttaaccaacatattttctgcaattggataagacacaaaaataagactactacagcaggttactctgcaaaagaagcttgtgagaacataccctcataagaagtgataagcaaagatgccgttttatagccctcctaagatccttggggaggttcataagcaagagttcttcatcaaccccgctcgtctggtgccatctatatttttcatgacgacgtattcgttccttgagattctcaggaagcagtcgatatgacatccattgatctgtatcacggcttttcactctcatttcttcttctctcagatgggctgactgcaaataggtctgtagaagtcacaaaaaatggaaggatgagttagctacccaaattacgcatttatcattacgcagcaaaaacacctaatttcattcaatgtcagggatcctgtgaaacattctttgtagtacaagacctgaaccattttgtacaaagactactgttgcaaataaggactgatgatcttattcctaccaagattatgctagtcttatctccaaatggtattggaatgaacactcgaaacctagcacaaggttccatatctttagtttcatatccctaggagataaaataagttggactcatttttctcagaattaatttgatttattatttttaagttttccataattcactcataaaaatattctctgttgttctggggtatatctttagcagcagtatatagcattcatgttctcttcaattgattatgtaggcattagacacataacacacttaaaattttagcatatttctgatttgcaatgcaagttctattatgaaaagcttgaataataacataaatcaagaaaatgacttgtaaaattaatagccaatgaagctaaatatgcgtacctgcacattaccaattagcagtgcaaacagaaccaagcctgatattgagacaaaaactgcaaacagattctcccatgcataagtgcttgtcttaaggttttggcccagagagctgcattaaatagaccaacacataaatataggtggcatagagaagtttattggttcaagcagaaaatactttaaatgtttctgttttgcacaaacctaagattttgcagaccccaccaaacacaatagaatagttttgccaaaaaattagttgattgcgagacattatttagagctggcacataaattccaaagttcggatctatatcgtttgagtcgattggaaggcaagcagtccgtaagatcgagttttccttatccccacagtacaaatatgcctgattacagactgtactattattactacacatgtctctccagcaggcatctttgcgttcaatggaaagcaagtaccagagtgctccaaggacctgcagcagttcaaagatttgtcataaatatataaggtgcatggaaatatttaattatatccaatttagtggcactgcagttgcaaaagtatcccacttatgaatgaagtcaactagatggttgcatgggccactaatattttaattatttgccaatttagtagtatgaagtcaagtttcataggccattctttggttgtgattgtccatgacattccaatttatccacccagtcctccaagttttccgactatgggtcatgattgtccttactcctttgaaccagttgaagcactacaaggacatgcatatcaaacgaattggccaagccaagagatcaagggtcaacaccgattagtcctgtacaggcgctgctcccggtggatccaattttaatttttaatgaggaaaatttgaggacacacacacatctggatgatacatcagagcccaacaggagcctcaagcaaaacttgagagaccaaagtgttgttacccataaggatattatagccattttttttacagaaaacaaaatccatgcatattattttct

SEQ ID NO: 21326 - DNA, 6686 bp, Oryza sativa
tttgctgatgaaaaccacaaaacaagaggtgtttatggctctggtttggcaaaaaataaaaaaaaatgagactacacagtgctattccacccataccacacatcaaccaggttagccgaatttattttgatcaataataaattcatgtaatctttacaggaaattgatcatgttttcagctttccactattgcagttaaatattgctctagcaaaggacagttgatttggcattgttgactatccagagttattgaatagaatacttacatgactggcgagcaagtaaattaaaaggttcaaaacagcaccagcccatggtgtctctgtaattaccccagcagaccttgtgatttggagatacagtggccttattcggatcagccgaggcacatattggcatataactataaacatcaagatatttttggcttttgtaacctctgagcctccaagattaggtagcacaaccaaaataaccacctggtaacaaaattgaccatgcttacaagcttgactgagaaatcaaaggcgcataacttagtgcactattaagactgcaaagtcatagaagaaacagacagagctctttgtatatgaccccatttttctaacatgtgaattgcatgtatcagagtaaaatcaaaatcttttatttttctgatgtggtatctaccaaaagtgcatccttactaatcatcccatgataccaatatgtgaattccattatatcattataaatcataaaagaggtgaatatctattatttttctcatgtagggactatcaaaggtgcatccactaatcataatttatatgtatatcaccaacataccatcataattctaaagaatcatgtgaactatactatgaaatagttccatactgagcttaactaagtacatggtatgcggagtacctgagggaggggtagaacagcaaagacatcgatcagaaaatatgttgacaagtatcgctttgctattgcatatctatcctcaaccaagacaccccgaccaaaagttgtaagagaagacgcaatataacctgtcctgaactgaaatatgatatggagtatatagaagatatctgtgaaaaagcgcaggacacttgctgtgatttccaactttttatccaaataccagcatgtgttgttgtcattgataaccggaatatagaagaacaatgggtccacagaaactgcaaagatacatgacaaaacaaatatcttgttccagctttgcagaaatggtccctgaggatgaagagttctagttgtcaacttcctttcatgcagcaccaatctctttaaggtttcagaatgcacaaggtttcctaggaatgcaaaaactccagcagttctttctttaagtgaacttaaagcattatgcctccgtggtgacataactgactgctcagatctccagtcctcaaatctgcatacatggttaaaaaaaatacagaataattattacatcgagttttcagtagttgttttcaatatttactcaaaactttaatgggtcccaggactttaatattcattgatcaggtccctagagacccaaactttttttctctcttctctcttctctcttacttcaactacgttatttttaccagcagtcttcattatttactcaaaaatttaatcagatactggtgttgtcatttccatacatttatatgtcagacttcttgatgatcttgaaccgaagctagatttctattttggaaaaattggagagaaattattgcattcatgtttatatgctgcaaaagacaaggaaatgagcagtaacaatcgttccaacaagtcaatccatgccagggtctctcagaggccaaaatgtccaaaaccatcatgtgatgaaagtagaagcatcgatttttttttcgaacacgcaggagatatgcgtatcatttcattaagagagaaagaaatgcgagggatgcaagatttaaacaaaccctgacacccacccatcgaaagtcttacagaacacaacacacacccactctaaaaccgaagaaactcaagccgacctccctagggtgcaagaactactgccttagacaacagcttttggagtttcgaagctcccgccaaacaccaaagtgtggcctcattattgacagcttggatcacatccaccacactagtgtagaaccaccaaattaccattgctctttagaaatcaccaaaccctctccatgtttcatgtcctaaacttgttactataagttatgacacaagacatttgacaagcctttattctttgtaaactatttcaaacaactggtgatggaggaaactgacctcacatatttgtcctctcttcccatcatcattttccaaaaatccaccaaaccaaaggttagctgctagaacagctttattgattctacaagggtggcgacatttgcatacatggagttccctgatgattatcaagcataattgagtaagggaagtaacgcgtatgcacatgaatatggacacagaacaaagaacagcaacataatcaaatggaaacagtaaatttaactttgttatgtcacaacagtcagcttagattttgtgcatggacaatcactcatcacacctgacaggaaatgtccatttgattgttgaatattgaatgattgcatttagctaactggacaatagatagaatgctgaagtggtgatttggtgtttccctcgtgtaggcaggctccatttggtattgcggcggactgtgtttcatttagggcaacagctttttgggtattccagtgtttggtaaaatgcttgtatttaaatcaaaagttaattttgagtttcaaattatgactattttttaattcagatagagcttattacttctttttagtaatcatgttaaaatcagcttcccactataatacaaagatgttctaaatgataatattattatgttgtgaaaatatgaaataattaggagagacatgaaagttggatgatatattttatcaaactataatttgattgatcccataaaataaactaaacagctatagcttataagaatcatttccacagcaaacctagcctagcctagccttaacatatataactctgtatttctatccctctctgttatttcggagggagtcgccatcaaatacatggtggttaaactttgcaaagcatagataaggtatggctgccgagtatctcaactcccaaagtgtcacaccaatttcaccccgatgaacagataagcaggaaagtgacagttagtatatgaaacatcaattaccaccagtgcccatagtcgttccgattaacaaatgattagaattaccaattgtgacctatttgttccctgtgatgataggtaaaagcaaccgatcaagcaactaaaaaaattctaacccacccagttataaccatggcttggcctgaaaggctgaaaactccgcagccgcaaaccaaacccccaaaacctgctgacgccgcgctacctattctagacacacgagaccacaaaaattcgctaagagaaagcaagcagggcatcgtagcgaagaagcagtaacaaattaagtccggcctgaggcggcgccttgcccccctcaggcggcctccctccctctgcctcgcatgacgccaccgcccccctcggctggctgtggagggagaacccgccgcgcgacggagcagggggagcgcagaggctttacctcggaggtggtgcgcgcggattggacggaggggtgggggggaattcggtcctcctccgcgtcgcggccgggaagccggcggcgtccgcacggcggttggtggtggtggtggtggtagtgcggtggaggtggagggagcgatggaaagcggaggacgaaaacgggtgccttggtttcgttcgtgcggttgggtgtgggtggagttggactccacggcatggcggcgacgactaggccaacggtccacgctttgctggcctgtacagttttgtcctaatcgtggattcatttttaaaggatattttttgtgaaaattaattaggtttagatttttaaaaaaagtaaatttcaagtaactacaactctattgtctaaactataaaatagtatgaaattttactacatagctacaatgttaatgaatacaattatcccaaaaatacaatcttgttacagtgttaccttctaatgttactaacatcatagacctaactatcatacaaatagaatttggctagagcgaaactggacaacttgttgatagtcaccgcggtaacacatcctattgtagtagtatgttacgtcatacaaacgcgagcgtcgccttggtcataacttggtaaaaggaggaggcatcacttctcccgagtcatggccatagtgagatgtcaaggaagagaatatggaaggaaaggaagaagtatcactacctccttccattcccttcaaccgtatattgaattaaacgagggaaacatagtcgaatggcacgtgtggagtttactcctctctctactggttagttgctattgttgtgttgcaatggcggacccaacattttaaacttgtgtattcgaaataggaaggggtaaaaaaaatttgttcgtacacctagaaatataataatttgcttgtatagcatcacacactaataattatataacataaagagaatatagcatacaattgaatataagttcacacattgatataattcaccatcagttgaaattgtttaacatataaaaatactagttggtgaatgtatcgaagtgccaacctaaataatacataaagactagaaaattataaattggtaagaaatcttacaattttgagatcaactttttgatgtttgatattttaaaaataagtgataatgtccttatccttaactttcaagaagaaatccctttcaatcaatgtaactaaacaatcattcaaatattaagagattttgggattttgctagccggttaggggaggggaaatggactgagttagtaagttgcggcccaaagtggcaaagcaagtgcgggctaagagcctgagagagaggaaagggggacgaaagtgggaaatttaggcccaatagtggaggaagggtgaaacaaggcccaagataagtagtttaaggctttttctttatttttttaatgcatatacaaagtatatatatatatatatatataattatatatatatatttatttattatctaaaaatcttggatatacatctgaatatccttgaatctataatacgcccaccctaatgtgttgttcttttttctcttctctctcgatgtctaagcatgttatctcacaaactttattctcctgtccaattatattttgtatttgtaccaatttagcatgtaaaatattatatatcatcctgaacttaaattagatagaaaagtgtgatgtaggatatgacatgatcattatctgcctgaacttttatttcatgctattttgagattaaaaattcattaatattttctatgtgaaactacttgggttaaagatatccatattttcattccataagacagacaaggtttcttcttattcgtgtggaatataaagaaacgaattattcctttactctgatatcgaggaaacctatttcaccacttcaatgttttatgcagtacgactattggtattttttttattattgtaaggccctgtttctttcagctttggattattataatctagattattgagccagattactatagctagattattataatctgtagtagaataagcggttagttgtttctttcctaaattattagggcctagattattgggtttgcaagtctaaagagggagtggggtggcatggtggttaattttttacccaataatctgaaaaaagctcacctaaatgagcttattagattataatactctggagactatactaagctattttaataagttgttcgtctctttcaggttactttcaataatgtagattataataatgctaaactgaaaaaaaaacagggccactactaatatttcagttgcataaaatggatcgaactattcaatacctaattcacgcgtgtcaattgggtgcatattagttagggtcattggccacacattaaagtatgataaagctgcatacgaaatatgcatacatggatattctttactggcaggattttcgctaatattcagctcatgagtaacaaatatccaatgacatttatttccaaataaagattgtggatcaaaccaaacacaaccaatatcaatctgtatcacaaatttctaattaaaccgacgaatcattttccagtaagaaagtgtaacgtttagtaatatcttcttccttcaatctgttcattacaatctctctctctctctctctctctctcgaattcgcgaacacgcgacgcgacgtcattttctcccctgcaccggataaacaacgccaaaaagtttgttttatgtccccgcccaggcctccgtcgccgccgactcaccgctgcgccgcccgcgaaggccgaagcggcggagggggcctcgccggagcgctgctcaggaggatggcgcgcgccgccggcctgcgggctctggtcggcattgaggcggcggggcgtgggcgccgcgtcgccgactgcccctcccccggcggaactccagcggcctcccgcgggctccccggctggcc

SEQ ID NO: 21327 - DNA, 3824 bp, Oryza sativa
accggcggctccgcgaggtaataatcactaaccaaggtccaattattgttcaggattattcgctgattacgtgcgctgttagcagcgcgatgccgtcgctggtgatgctcgtggagaatgatgttccatgagtaatagtgattgccttgatgcttacgggggaatatataacttggttgttgtcgaaacatgaattcggcaataataaaatgggtagcgcacgagacctaaaagtggatggatgcggagacaaagtatttagacaggttcaggccctctcaatgagaggtaataccctactcctgtttggggatttgaatccgccgagtgtgtattgatctgacgatcaggttgtctcatgcccctagaggggctccctgcccgccttatataggttggggggcagggttacaagatagaaaccttaaccaatacggtatcggtttcctaaatctactttacaatcttatcaaaccaggactttaggccgttccataatatacagggaaacgtaatacccaagtcatgatctgttacatattttatatatataagttatcccctataactagtcggataaccatgccgtgtgggtatggggtacccataatctccacagtagcccctgagaccttcacagtcagaaagataatcttctctcgaactagattactccaaagccgagtgcttcaatcatcctcgccatgatctcccgagtacttttaccaaatatgaagactgtggagggctgaaaaaataaagtcagatgcatcgactagatgcacctaataggtgtaacccccgactatgtggtttaattgaacaaaccaaacatataatcaaggaataaataatctaaccaaccgagtggtttcgataattgtagtcaaccaagcgacttaatattaatatgtagcatatgcggtgtgaatccctgaataatatgatgatccaagtgatataccgactgctttgtaaaatatgatgagtgtaacctaaagttgacaacatctttgaaaattcacatagcaaaacagctataaagaagcttatatgctgtgaataaagaaatttccaaagtattgggcacacaccatgcgcacactgctttaacagatgtgcttaagtccctaaaagacacatggtttcaccacacccggaaatatatggcatatgtggtgtaaaatccgagtaaataaacttataaaggatttaccaaccgcctggaaaatgaccataatatataatcagcctaagcaataatattggtcaataaaaatacacacttacgtggcaaaaagcaatgatattgtatccaatcaattgcttaaaaacccaaacagcaccttgacttatataaaaaagtcagcgggacagctatataaagctttactgtttgacaccttttaagatgcattgtaccaactcctaaaaagttgagtaactgcggtataaaaggattttaaggtattgggcacttgatcacgcgcactttggcctaagcaaaaagtgcctaagtccctaaaagaacgtgacaggccacacctgaaaatatgggctgcagacatattaggcctaggccaaaaaatatgccttcgacaccctttaaaggatgacgcatataacatgctcccgagtaataaatcttccgggtaatatagaccaagcgtagctcatatgaatagcttctgatctgagtgattatcccttatgggatactccaaaatagatgtaacaattgaatcccgactggcgcaagtattcagttgataacccttacggggaataataaatagtccagtctttgagcatataaaatagacccatgatcatgaattcatgttgcatatatccggagcaagtccaaattgaagatataatacttgtatttgagctagtaagcccctgagcacgtagtcacaattgttcattgatggtagctgacgcagttggcatagagacaagacgaccaatatagagataatattgcccaacagaggtggcaaaaatattggtggtagtgaagatagtgataccaatcaaaagtgatgaagttgcacagccgtggaggcgaagaaaccagtcggcaacagtcaggtcagccatcaatgaagatgaaggcgcccagcgataaagttgtgtagccatggcagcgaaataatcagtcggtgacagacgaggcagatcaaaggcgatgacgaaatccaccaatcatgaagatgaggaaaatagtcggcgacgacaaacgtaaccgacagtaatgatgataagcatcaacagagatgatcaaatatgatgacgaagttgcctatcaatagcagtagagtaagctatgataaagaggtttgacaggatgttgatgaagatgacgatgtcggtgatccagtcaatagcggtgtaatagccgatgataatgacgaagacgctcatcagcgtttgcatagtaggtcaaccgtgaaggcggaatagcaagttggcgaagtcttagtcatccattagcaacggcggaatgtcagagccgatgaagcagatgtgctggtgatgatgtcagtgacaataatccatcaaactgttgtagatgcttcacttggaggaaagtatatgctgttgttcaactcattgaatctgatatgagttgattggttgatgactccaaactcccagacatgtaaatttaatcttgacctactgctctgaagcgaagacaaaattgatgactcccagagttgacttgttggctgattaattgattgcttcatcttgacataaagcttgtcaaattttgagccatgtatttgtgtagcccccgactctttgattagttgggaaacaactgaacatagagtcgagaattatagcttcttgttgtcgagtagtcatcacttgattgaagatatgtgttgaagatgtccaagtagaaatcctgaatattggagagccacttgttgtagtaaaataacatggcattgcatgccgagatgtcgaggttcacaaagacgtcgtggttggtgaaatagtaaaacttgcgaagtagcaacaatagagtttgccggtgccgaagataataaagatgaagtcgctccaccatgatgacaaagttgtattgccgtaatgaagtgaacacaagtcggcggcaacagaagcaaaccggtagtgaagacgcgcagttgtgaagataaaagcaccagtcggcggcggcataatcagtcggcgacggaagatgatgatgtccatcagtagtggtagctgtataaaccagacgtagaggcgagggcactagtcagcagcagacgagacgaccagcgatgaagatggtaaggccaatcaacactggcagaatcatgcagccatggaagtgaagaaaccagtcggcagccatgacaaacgtaggcagcttgtgttgaagatactgatgcctattagtagtgacagcgatgtagccagccgtgaagaagatagcatcagttggcgttataacaggccagccgtgcaggcggtgacaccagtcagcggcggatgcggcggccggtcggtgaagacgtagacgcccaacaacggcagcataataggccagccgtgcaggcggaaacaccagtcggcggcggtcgaggcggccggtcggtgaagacgtagacgcccaacaacggcggcataaaggccagccgtgcaggcggaaacaccagtcggcagcggacgaggcggccggtcggtgaagacgtatacgcccaacaacggcagcataataggccagccgtgcaggcggaaacaccagtcggcggcggtcgaggcggccggtcggtgaagacgtatacgcccaacaacgg

SEQ ID NO: 21328 - DNA, 15316 bp, Oryza sativa
ccggtcggtgaagacgtagacgcccaacaacggcggcataaaggccagccgtgcaggcggaaacaccagtcggcggcggcgaaggcaagccggtcggtgaagacgtagacgcccaacaacggcggcataataggccagccgtgcaggcggaaacaccagtcggcggcggcgaaggcaagccggtcggtgaagacgtagacgcccaacaacggcggcataataggccagccgtgcacaagccggtcggtgaagacgtagacgcccaacaacggcggcataataggccagccgtgcaggcggaaacaccagtcggcggcggcgaaggcaagccggtcggtgaagacgtagacgcccaacaacggcggcataaaggccagccgtgcaggcggaaacaccagtcggcggcggcgaaggcaagccggtcggtgaagacgtagacgcccaacaacggcggcataataggccagccgtgcaggcggaaacaccagtcggcggcggtcgaggcgagccggtggtgatgttctgactgatccattcctggagcgtaagagataagcttaaagccatgaatcccttttatgcatatctggatctggatcctgcagaacaaacatataggatgagtagtatctgatataaatataatactcgagaaaaaatcaagtattttaaaatatttataaatatgtatttctcctcttgtcaattttgatttccccgagcagatgactctgtacgtttaaacactctgtccgactagtcatagcccccaagcatcgggagtcgacctaggcatttcccaaacatgcatatgagtgatatgagttcgtcattaatggaacaaagtttcacggattagaatttactactcaggtacttttgcaattattaagagcagaaaataaatttatctcatctctatgcttttgatttattccgaataatacttagcaccttgcgttactcggtccatccaacgagcccccaggtgctaggaatcggcccaaaggcaaccatccattggcaaaccaaacggaaagcataggaagatagaactccataactcgataggtacttttgtactcagattatgtcgcaagcaatcaagataaatattatgaaaattgtttaaaaaatacgatataacatctatagcccccgactcactagtcaacggcgaaccagttgatgtagtgaggcaaaggaaaagacaaaatatcatataaagaataaaataaatgatgacttagctttgtcgtattccctcgatgacagcagaagtagccgatgtgggaataaagcagtccatcaatggtgacaaaaataccagtcggcgccagtggaaccaagccagtggtgtagatgatgaagcccattaacagcggcggagtccgccaaccgtataggcaaaaacaccagtcagcggcggcagaggcaggccagcggtgaagtcgtagacgcccaacagcagcggcataataggctagccgtataggcagaaacaccagtcggcggcggcgaaggccagccggtcggcgaagacgtggacgcccatgaatggtggtgtgaccaaccaaccgtataggcgaggacaccagtcggcggcgacggaggcaggccggcggtgaagtcgtagacgcccaacagcggcggcataataggccagccgtgtaggcggaggcaccagtcggcggcgacggaggcaggccggcggtgaagtcgtagacgcccaacagcggcggcataataggccagccgtgtaggcggaggcaccactcggcggcgacggaggcaagccggcggtgaagtcgtagacgcccaacagcggcggcataataggccagccgtgtaggcggaggcaccaatcggcggcgacggaggcaggccggcggtgaagacgtagacgcccaacaacggtggtgtgaccaaccaaccatataggcgaagacaccagtcggcggcgacggaggcaggccggcggtgaagtcgtagacgcccaacagcggcggcataataggccagccgtgtaggcggaggcaccagtcggcgatggtgaaggcaagccagcagtgatgatgaagatgcccatcaacggtggaggtgacgtacccgacgacaaataaaacgggtcctctgcgttgaactatggtaggtgcaggtcattgccgtggccgtgtatatcatccgcacggctcaacctcaatccaaccaatatatgcaaacacagaaacaccaggaagagttgattagcgatcaaaaatataaatgcttaatatctcatatgcatggcatgattagatgaattgtgcacgttgatccatgcacgtgttttgatggcatgattttgctagccacgggagctgataaggccgtgtcaattgcttgtcgatcaaatgctggtgctttttctttgcccgagtcacagcaaggctgaaagcttgacgatacatgatcggactcgccaacaatcgacattaaacagaagacaaaggaaagtcaggcattaacccgtgattagtcatcaagaataaaatattgataatcaatatagaccagaaggattaaattaaccagggaagggaaaaacagactcggactaatccggtcagtatatccatccggtggcttacgcggccttcaacatcagacacccggtgggtgaggttcgcacgacatctgcccagctagttggctcggtttcgccgactcgacctcccggtgacatgtctatgtgaattaaatcccggtcgccggcagtcccgagtgcaatcagcaacaattgatccgatgttctggttgctggtcgtctcgatctcagccggtgtataaaaacaagagattaacagtagattaatccacaattaaaaaatcaatctaatgaaagttagattggaacgacaaaccaggtcagagatttgagtcattgaaattgatctcagtgcttctctttgaaattgattccatcgcgctcgtcgacgaggtactcggcgctgcccctacctggcgcgccaactgtcgaaacatgaattcggcaataataaaagggggtagcgcacgagacctaaaagtggatggatgcggagacaaagtatttagacaggttcaggccctctcaatgagaggtaataccctactcctgtttggggatttgaatccgccgagtgtgtattgatctgacgatcaggttgtctcatgcccctagaggggctccctgcccgccttatataggttggggggcagggttacaagatagaaaccttaaccaatacggtatcggtttcctaaatctactttacaatcttatcaaaccaggactttaggccgttccataatatacagggaaacgtaatacccaagtcatgatctgttacatattttatatatataagttatcccctataactagtcggataaccatgccgtgtgggtatggggtacccataatctccacagttgtgttcagtctatgatggggactgcgcctaatgctgccttttctgaacttgtggttgacatgtagttcgattctgtttcagaagctgtactaaacatcttacatattttagttttctttatttatatgattgtaatatggacctcaacgcgatattatgtatgtatttacttgctggcattcgaagttgcttgtccgtgcaatttcagaatttcttgaacttcctgtagttgtggtccttttactagatatttgagacggcacatggattaacataatgtcaatgacctttttggtagtgaggatggtagacttagctgggattattcaagtttcaaggggaggaggccttctatggaggatcggtttagcataaagatgactacgatcaacgaacagacagtcagcctatttggtgtatttgatggtactgtccttgaattttctttcattaagttattttcattccctaatatgtctttgttcctaacatttcatacattaggtcatggaggatcacttgctgctgaatatcttaaggaacatttgtttgaaaaccttgtgaatcaccctgagctccttagagacacaaagcttgctataagtaatgttctccctcttgctccagctgtacttcttccgaacattcaggtccagtgctacagtactgatgttatcattttcttgaatgcttttgcaaaatacaggccaaacgttcctgaaaactgatgctgatttcctagagtcagtgtcttctaatccttttagggatgatggttcaacagctgtgactgctattttggttggcaaccacctatatgttggtaatgttggtgattcacgtgttgtcgctctaaaagctggcaaaggtaatatttgattggttgtgtttctttgttagtgatgacacttcacttcagatttccatataactataaacggttgctatccagtatgccctgaaacctttctgtcaactgaaaaatatcaaaatatgacgcactaccggattctaactttcaaatgactatttctatttttcctgagttacaaaggattatgtcacatgtagattttatcaatgacactgaggaattgagcactaacttttgatatgttgctatataccactttaataagttacagcatgccaaataatctagaaactgtgaaatgacatttattctcttgtttgtttttccgttaaaatctcgtttctttccatgcttttttagctgtcccactgtcagaagatcataaacctaacagaaaagatgagcagaagagaattgaggatgccggaggtattgttgttttcgatggtaagccctttaatcatgaaaatcctcctgatgtatttggccagctttagcttaatctaataggaagtatgaatgaaaacttgagaagtttgatcatgtcgaagcagatacatggagggttaatggacttttggcaatgtcccgtgcatttggcaaccgtgcattgaagcactatgtgaaagcagaaccagatattcaggtatctttttaaagtttagttttttgcactggatccccgccccttgcatgtttacatttttatgtggacaaggaccagcttttctgtactggttttgtcttactaaaccataatacccatttcatatgcacttgggtatcatgaaatagtctgtacacatcatcaacctgaatgaaatggatctgctgcaatgctaaacagcctgcaagtgcagtctatctgggaaatgttgatgttcctgattgatcactttaatctcacctgtgatctgggaatgtcgatgttcctgattggtcatgagaaaacccatgtaattcagcatttcaaattctcctgctacatgttcctcctttgcatatgatcctatccttctacttaattgttcacgcactgattccttatatgccacaaaacctgttaatggaaaagcctattgaacatcacctatgaatcttttgtgatgttttactgtaaatatgcaggaaaaagtggtcgatgaaagcttggaatacctgattcttgctactgatggcctttgggatgttatgcgaaatgaggtatcatttgttgaatccctgtttgttgattatgcgacctagaaaaaaacagcagaaatatctgcttacatgaaaaccaatgaatgacatccactatgttcacccctgacacacagctttgccctcgtgcgagcgcgtatctcattcggtccaatgctaactagcattttacatcttttgtcaacaaggatgctgtttctcttttgaaagcgcaagatggacccaaagcagcagccatgaagctgacagaagtcgcccactctcggcttaccttagacaacatcacatgcatcgtgctgcagtttcaccatggaaaatcaaccaacagcaactgatgttaacaaagttttgtcaccagatatcttgaaacgagagttggtcccctgatccgcggttctacaagattattactagattggttgagtcgtttttttcgtcatgtaggaagcttttaaatctgacgtgcacagtttactagcgaaacgtcttatggttgtttgatttcggtttcggatctcttgctattaggggtagccggccctgaaatattaagttatctatagcataagaaatgttctaaattttttaggtggctaatgatttaatgtctgtgcctatatacttcattagttattgtttgccaaatcccggcgtcgctaatagggatgaaaaccgtatataattttttctatcataccaatatcatttttgcaaaaaaaataatattatttcttctgtaattttttttaatttctctatacgtcatattaaaattatcactaaatatttaattttattaatataaaaactaaattcctgaccgttaccttttttaaaaactaataaaaaataatatcgttttcgatttttcatgcctatttgctagcagcagcagcaagcatcgcaagcttataatcacgattgcgaagctctttcttcttcaaaactcatgtttcacatgaagaacctttattttgaaaggaaaaaaatcaatatttattttgaaaggaaaaatcaatatttattttgaaaagaaaaaaatcatctcttttgcacttctgcttatgtaagtagggtatatgtcctgtgaaaacacgtgaaagttgaacataaaaagttttataatttcatgaaaaaatactagagataggtattgatatgaatacattctcaccaaacctcaaacttatactattaacctgattttttattctttagaataaagttgagcttagacttaagatttggtgggaattatttcatattatactgatctctgtagtattttttttattaaattaatttttttattaatttagagaacttctaggtctggtttttacgggttttactttttttaatggtaagtatgttcgtaacggcttacactgcccaagcaatttaagctgctctaaatcaagactctttcttttgttttgaactttgcttcaacgatatgataatgcaaaatatccaaaatgatttattaaaaaaaatcaaaaaaggactatctaaaaactaccacaagttttttgagtgaaaaaaaatcaaatctaactatagtatgatgtaatttcaccataactatatattataataagataagttgtataaaaaaatatatgtagctttatacctaagttatacagaggggaaaatataattaaaatatagttgtagggtaattatattataactacaatttagttacaatttaattaaaatatatgttgtataattatattacagtaaacaccataactgtagtttctattctactgatcagcacacaaacagatgaacacagagctgtagaccacagaaattataagcgagtgaaagccttatttcttttgaaattgattacaatctacataaggagagtcgaggtgctccaaagagatctatctcgccttaaccttgagggtcctatttataggcggagaaagctgatgatttacggtgtaagctgggttctcctaaaagctaactttttggcttccactacaagttgctggcttacgctgcaagcttccttccgtgataagatatcttttggtttcttctggcgtaagcttctttctatagtaagttttccactcatacttactggttctacttgatcttatttatctttttattctatttatggaatcgtccaaccaaaaacaaaaaagagtctctaccgccatgataaagacgcacggaagaactttgatatatgactagcgtagcacgtggaggatccattcgttgagagtgtccattgtctcagtaggaaacatcgtccacaataaaatatgtttcataatagttatatttttaatttttttttaaaaaaagttctaaaactcccaaaaaaaaattttgaagggaacttttgcgacagttgtttagcggttgcaaaaagaaaaatcgttaaaaacctaaacccagggccgctgtctccgcctccgcctccgccatgcggcgccaccacctcctcggcctcctccgccgcgccgcggcttcgtcgacgtccgccgcctccagccgcgcgggcccacaccccagtctccatgcccctggcccgctgcggaatggcggctccgccccccgcttcttctcctcgcgcggcggcgccggagctgcttcgaagggcctgggcgacgacgaggtcgagctctactcgctcctcctcggcgtcagcatcggcgacgaaggcgaggcatcctcacgcggaccggctgcctcgaggggaggccggagggggcggaactcgaagcggcagccgccgaggtcgagatttgacggcgatggagttggctgtaggtgtgtattttacctgctgcccagttgaaattggcttatctgtgcaatttcagaattccttcgaatttctctacttataatccttctattagagatttgagaattgagaggacatgatatcaaatacttttttttttggcagtaaggatggtaaattgagctggggatattcaagtttccaggggaggaggccttctatggaggatcgcttgagcataaagtcaaccacggtcaacggagaaacagtcagcttatttggtgtatttgatggtagtgtattcaatcttttctttcattaagttgcactagtaattttgttccctatcatatctttgtctgaagattgcatacattaggtcatggaggaccacgtgctgctgaatatctgaagaaacatctatttaaaaacctcgtgaagcatcctaagttcctgaaagacacaaagctcgctataagtaatgttttttccccttcatttcggctgtacctcttctgtatgttctgattcagagccagaaagtaataatgttctcatttcgttaactgcttttgcaaaatgcagaccaaacgtttctgaaaactgacgctgatttcctacagtcgatatcttctgatcgttatagggatgatggttcaacagcagtggctgccattttgattggcaaccgcctatatgtagctaatgttggtgattcacgtgccgttgctctaaaagccggaaaaggtaatattttattggttgtgtttctttgttagtgaagaaactcccattcaagttgccatattgttgtagctataaatggttacttttcagtatgccctgaaacctctttgtcaactgaaaattaagtgtttcttttttttcctgtgttgcgaaggatcttgtctctagtagtttttatcaaattgcaccaattttgatatgtttctataccattttcagaaattggcacgttccaaatactctagatactgtggaattctcttttttgttcttacatttcaatcttgtttatttccatgctttttagctgtcccactgtctgaagatcacaaacctaacaaaaaagatgagcgaaagagaattgaggatgctggaggcattgttgtttcagatggtaagcacttttaactatcagaatactcctaatgtatttagccagctttaatttaatcgaatacgagtaagaatgaaaacctgaaaagtttgatcatgtcacaacagatatatggagggttgatggaattctggcagtgtcccgtgcatttggcaatcgtttaatgaagcgctatgttaaagcagaaccaaacattcaggtatcttattgaagttcagtttgcagaggttccctgccccttacatgttaatagttcagtacttcagttttgtattggttttgtcttacccaccgtttcttatgcacttgggatcatgaaatagccagtatagatatcatcaacctggatgaaatgggtctgctgcagtgcttaacagcctgcaaatgcagtctatgtgcgaaatgttgacttccctgattaatcactttaatcacacctgtgatctggaccactgatcgctgaatcaaacagttaaaaattagtaacatgttgtaacctatgagactcctgaaaacttatgtaatccagcatttaaaattcacatgctatgtgtttctcccttgcatatgattttacccttctgaaaagttgttcacagtactgatttcttatgagccacaaaacttgttcatggaaaagcctgttgaacattgtttatgaatcttttgtgatattctactatgaatatgcaggaaaaagtggtcgatgaaggcttggaatacctggttcttgctactgatgggctttgggatgtcatgcgaaatgaggtatcacctgttgaatcgtaattgttgattatgcgacaaagaatacgacatcacttaagtaatactattgtgctctctactagagccatatgaatatttgcacttacataaaaagaaagaatttccattcactatgttcactctcacacgcccacctgcccgggtgagtgcacgcacgcacacacagttcacgaaagctcgcatattggttgtatctcatttggtccaatgctaactagcgtttacatcttttgtcaacaaggacgctgtttctcttttgaaagcacaagatggtcctaaagcggcagccatgaagctcacggaagtcgcccgctctcggcttaccttagataatgtcacatgcattgtgctgcagtttcaccatggaaaatcaaccaacagcaagtgatgttaacaaagtttgccatcagatatcttctaacgagagttgctcccccagatcctcagttctacaagaattttcagcaagcacgaattattagattgattaactctttttttcttattattatgtataaagcctttacatgtgacgtgcctgtttaaattgcatctttcacgagctataaacggctgatgtttgttttaatcggcgctgtaaattttggggaggcttatgatatatttctgtgcctatatatatactactacttcagttattttgtttccaaatcccggcggttgccacaagctgtaaccgttggaagcttataccaaattcatatgttgcattaagaactcaattatttcttaaccttccatcaaggatatgacaatgcacatgaccaaaatgattcccatggatatggttgtaaacaggtaccgaaggttattcggcccatttctttacatgtcgacaccgttgttgattgcttccgtgcttagccctttcattgttcacaatcgtcttctctcacttcaaactagtctgagagagagctcgaggtaaactcacttcatagccacgttggatgagtactacctggctgatatggtctaccgtaaatccacgtcaaaataaatgggtcaaatctcaaaactagtgaccattgaaatggtttatgctgttttaccaaattgttcatttcacttatctctttaatgaaattaaggaatacattgctaccacgtgtggcgtgaatcaaaggggccaataagaaaaaactttgtacatagttgaattctccaaaatttctatgccaattgtcaattcctatgactggctggaagttcatgtaaaatactgccaaaccacagacttacataaaatccaaggacgtgaaagtgcatgtgtactagttattcttaactggctgccattctaacctaccataaaaatagcatgcatctctttcccacgtgggagtatgcatggaaaatatattcctaaaatttacttttgaattacttatccgacctacaaccgaattatactattatattcgttgtaatttgttgtaattcaatctttataacaagattttacatgattatattctgataaaaattactttaattagatatataaattactttcaaatttgatttatttaataattagttattatgaaaataaattcaataaagcttaaagtaattatcataaatcataattacttctattttttcttatttttttgggaaaattgtttcttattttaaaattatcttgcagtgtaggtattttgtcgaatgtttagtcctaactctaagaaaatattactacctccgttttaggttataagaatttctagtattgtccatattcatatagatgttaatgaatctaggcacacagattcattaacatctatatgaatgtgggtaatgctagaaagtcttataatattaaacggaggaagtaatattttctagagctacttttccctagtagtgtactacttacttataataacttctatattctcttataattacttcatatatgaagataaatttgcttttctaaaaaaagacatagtgatacattaaaataacaaattaaattgtatttactcgtgaatcttctctacattttactttgcataatgccttatttcaacaccatccactacatttactttcaatgctatgcagagttacttccattataaaacctaattatttccacaatttaagtaaattacttttgaatgtttgaatacaatcaatattggactcgttctgttacatattttgtgtggagtacgatggttcaaatggatcttaaaaataatacaaggtttaaagaatatttatcgccaaagattccatacccaaaagaaaatagactagtgtaataaggattcaattgttaattggttggtgttgacctccgcatgtaaatatgtgccacgtcaactagatagcgccgatcggactttgcatgtatctcgcgataaacctaaatagtgtataactagaatttacaaaaatttcaaataaaatctttaaaaaagaaacgatcaaatctgaagagtcgagtactaaatctgaaaagaaacgatctttaaacctgaagtgaagtgacttggataatttgatacagtactagatctgaaattctgaaccgtcgcggctcacaatcggacggttgctagatctgaaattgatagatctatcaaatcggacggctcacaagctctccccatttcctctcaaaaacccccaattcctcagcccgctgtcctgtgttaaaccctaaacccagcccaccgtccatcctccgccgccgccatgcggcgccaccaccacctcctcggcctcctccgccgcgccacggcctcgccgacgcccgcctcccgccgcgcgggcccaccactccccggcctcctccaggacccgctgcggaatggcgccgccgccgctggcccccgcttcttctcctcgcgcgccggccccggcgccggagctgccgcgaagagcctgatcgaggacgaggccgagctcagcgactggatcagcgacctcaagaccgactcgttccacctcggcctcagcagcggcgacgaaggcgaggcctccacgcgcgggccggctgcctcgagggaaggccggagggggcgggcctcgaggggcccgccgccgaggtcgagattcggtggcggtgatttcggcggcgataggcgtgggtttgagaggagggggaggatggtgagtaataatgagctgggtgacgacgatgatgatgaggatgaggtcgggtttggtcccgcgaggggaaggcgggatcggggagggagacagtcagaattttcacatagaggaaggaggggaaatgatcggggagggagacagtcagaattttcgtatggagggaggagggcaaacgattttgatgatgatggtggtgggtttcggtctacaagggggcagcgcggccgaggtgggaggttggcaaatgtgtcgcggaggggatatgattttgatgatgagcctgggtttcaatctccaaagggacagcgcggccagggcgggaggtacagtgatttggatgatgatgaaggtgggtttgggtctctgaggggaagacgcggtcgcggtggaaggatgtctggtgtatcgcggagaggtgggaggggaagtgatttagatgacagtgaggatgatgaatactcaagaggttcgtctccaaggggaagacgtggtcgtggtggaaggatgtctggtgtgtcacggaaaggtgggaggggaagtgatttagatgacagtgaggatgatgaaaacgattctattgactctagaggcagaaggcgcgaccatggcacgagaggcaggaatgtgggaagtttgggaccacagagaggtgggagagggggcgatgcagattttagcgataggcggtcgaggggtggtaaaatgtttgattttggcttgtcagaagatgacagtgagctgggggaagttgatgaggatgatggtccatcaggcttcgaggatgatctctttgatgacgagggtggtgagaagaatctggtggagagtccagctaaaaattcagctccttttgagtcaattaaaggagagccaattgatcaggagggtgttgtgcacaccagagagagtggaggtggcgattcgtatttgagccagacgaggtagctccacctttaaatgttttctgatgcaatgttgcctgttttctttgattcagctctgaaaaaaacttactatctccatcccaaaatatagcaacctttctagttcggaaggagtagatcagtagtctataatcatctaggtttttatggttgggctaaaagcttacatcattagtggattgccacttatttgatgaagcaacaaattatgcatttctaatttgtccgatccttgttactggggctgctacagtctgcagcttttccttaacgcaaattgatgcttccacagtttgatgtcctacttgatgaaaaatgttataaattattgaatccaaagtaagttattgctatgcttgtctcagtgtatttgtgaataatatggctatgatctatgattggcattgtgcatagatcatctgctatttctctgaatagttgcaagcatgtactgaaaatttgaaacactgggtacaactgatgattatgcacgtattaatgttggtccttttggatgttctcacattttacatgataggtttgatgaatgctccctgtctcccttgacactaaaaggtgttaaagctgctgggtatgaacggatgactgcagtgcaggaggccactcttcctattatacttaaaggttgatcttagtagttcttctttgttatgtgctcaacattgtagttttatctatagtatttcacattttcttttgcaaacttgtctcaagagtttataaatctatcagactcgtattcactaacttccttcacatttttaatttcgaatctgctatcttcacatatttattgaacttcaaattcatgtttatgtttgttaatttacaaacatcatgtgtgaagacaacgtattagttcccatcctgtgcatttgcacccagtaccacacaagcagatcacacaaacttgacctactgagctggcatagaaaaggaaaccac

SEQ ID NO: 21329 - DNA, 31999 bp, Oryza sativa
aaaatcatgtaatataaactgttcatattttctaagatatttctcatgattgcagcttgaattgcaacttttctagcccataccatgtactaacaagccttatatatataggtaaggatgttcttgcaaaagcaaaaactgggactggaaaaactgtagcattcttggtaactaccctgcttgactactgaatttttcttgctcttttgttgttctaaagtctgaacctgcaaaatggtaatttgtatttgtgaatgttgtatgtgtagcttcctgccattgaagttgtctccaaattgccccctattgattgtgataaaaaaaggcctcccatcagtgttgttgttgtgtgccctacacgtgagctggctgatcaggctgctgcagaagctaacaagctcctgaaatttcatccatcaattggagtgcaacttgtaataggtggcactagaatggctctagagcagaagcgaatgcatactaacccttgccaggtgattggaagtaacttactgaattatcctggatatttctacatttggattgtgtgatgtaaaaatgctgctgatgtgcagattctagtagctacaccaggaaggcttaaggatcatatggagaacactccagggtttgctactagattgatgggtgtcaaagtccttattcttgatgaagcggatcgcttattagatatgggattccggactgatatcgagagaatagtggctgcactcccaaagcagcgtcaaacacttctattttctgcaactgttcctgatgaggtattgccactgctataggtcaacacttctgtttggtcgaaatataatcaatttctactctcttttctaggtacgccaagtatgccacattgccatgaaaagagatcttgaatttgtgaacaccgttgaagaaggaagtgaggaaacacactcacaggtattttttaaagcatatgcatgctgactgtttttccagattccaagtttctataaattttgatcagacatgttaccttttgttaccatgtttttgagcaatcttttgttaccatattcaggtgaagcaaatgcatgtagttgcaccactagacaaacagttttctatcctgtatggtcttctaactgatcatatttcagaaaatgttgactacaaggtaagtgaattggcatattttaagtgtctcctgtaaatatgcgtacttacaatgagaaaaatgcaggtgatcgtgttttgtacaactgcaaaggtaacaagtcttgttgctgaacttctgtctgaattgaagttgaatgtacgcgagattcactccagaaagccacaaagttacagaaccagaatatccaaagaatttaaggaatcaaaaggtcttattcttgttagctccaatgtatctgctaggggcgttgattatcccaatgtcacactagtcgtccaggtaacgaacttctttatggtagttattgagctgtttatttgttgttgcctatcttctttgctatttgatatacaaatatgtaaaaactccagatcgtccagcactggaagattttctttttctatattccgcttgtaaacgttttgttgaaacaaatacgagcatgtgcatattcttttcttttatcatatcctgcttatataccaatgtcagctgattatcgtcgttattgcagatgggagtgcctactgacagagaacaatatattcatcgacttggtagaactggccgcagaggaaacgaggggagtggaatcttattattggcaccgtgggaagaatacttcttgagaagtatcaaagatctgcctattacagaggcaacattacctttaattgatctggacactaaaagaaaggtaattaagcttatttactagttcagatatgatagttggtgcctgtttaaggtaatcaagcgtacatgcaatagtaacgatcatattgttactatttgaaaacttttttgttaaaattctgaatttcgtcatgcctgagaattgggcagttggttctaattgatgtctgaataatataatctttcgactatctaactaatttccattcaaataagtatttaaaatccacaaaccacagatgcaatgtccgccccaatcttgaggtgtgttgacttgtagattgtgcaaattggttggttcacactattttttaaatgctggttcatcagcacttgtttacctagcatataaaatctgcatcatgaagagaaaatacttccaaatatgctattccaccagttagaattttggtattgtcactattatgcatgactagtgtttggatttcatggtgaaattgagcttgacaccatggcttcgttgtatgcatttatgcccttcagatgatctgagtcttacaatgttgctacttgcagtaatatttgcttaataggccagccaaactatgcaaatttcctcttaatgctcttctgttcatgttagaagggatattgtttgacacaaatatatcaactgcaattctgatttttttttggtttacaaggcatagttagtgagtggtacatatatgtgtgcttgattctgtttccagtaatagatggtgatgataaagccagtttttgctgggaagcatcaccaggattcaaaccccatgtttacacacccgcaggtggactttagtaggaattttgtgaggctcatgaatttatccctggtctacccttcatctgtttgagcttgtgttcaaggggcatactcacgggtctttgtgcatgtatgtgttcttataattgcagaaaaaaagaagtaaaaaaaaatcactgagcaaggcatgatattctatattgtgggataattcttttgtacgtattgttgtttaaccatcaaaaggctatgcttctgtaatgatatgtgtttgtcagtggttctttgaccaaagatattttttaacaacaaaacatgataattgactgagggctcatttgcgattgttgcatcgggctgtggagctagtgaagggagtcataccaaatactccctccgtcccaaattatagggcgcccactttttaaggaaaattaaactcggtagtttttgactaataatcatactaactatatctatactaagtatgatgcatgttatatcactagattcatattttgaagtactttcatgtgatgctaatttcatatttgttgggatcatagaataaaataaaatactggtcaaagtatgttatggaagaccgtgtaaaaaaaatatgggccttataatttgggagggagtaacaattatactaaaaagaactgttttgcacctaaaactaaggctgataattgattattgtatccaaattcaagaatagcgaaatgaatgtgatttgaaaaagcaaccgcaatatcaaatgtgaccccatgcgggttggctgtaggtttactgagttaatgatgtgtgtattgtcctatgtctggtgattgttcttgcttagcttcatcatgcactgactgttatactttgtatgccatttcccgttcaaaatactaagaatgatatcctagttgttggtatttggcataatgctcagtattgcattttcttattgtttgtaggttgaaaaggctcttgcacatgtggaggttaaggataaggaacttgcctaccaagcatggctcggttactataattctaacaagttcattgggcgtgacaaataccagcttgtatcacttgccaatgaattcagcagaagtctgggcttgaataaccctcctgcggtgcctaagcttgtccttagaaagatgggactgaacaatatcccaggtctgcgatcaaaatagtcttcctcgaaccaaagttttcttgaatacacataccacaatattatcgtgcttcacagtggtatgagttttggagcagtctagctggtaaactaataaacagctatgattaaaggtcataatgggctactgggagcacaactaaagcttcagtctcaatttttttctcctgcaacatggaaaatatgccttatgaaggtgaatctgtacacaagcgatatgtagttttgcatgcccagtactgtgatgtttaaagcctgaccatgcatgatcaggctgatgtaaacatctgagttggtggcacacggaattttactttctttccatttttgtgtgcccgtgtatctattggatagaagcacaatacccctgtgcatgcgctatcgtatttattggacaataccattgtgcatccgctatctggaagattgtgcaagagctctgttctccatttggcctataaatatggtatttgtgtaatgttgatcaccaaattgaacatataatctctgttagtctaccttttttgacaggatagggctacgtagcctgtgaacaaatatttgttagttttgtagcatgcattggctacgtgtcgtttttgtctttttgtagtgtatgctacaactcttggcactttatacaaggtgaaggtgagaaggcaaaacatgcaagaggctctctcgatacattatctatgagttgtttgtcagcctatcccatgatttgaatatttgagttacttcttctggcttgtgcctcaggacatgagtgtccttgcgctaaaaaatataggcaatcttagcatccgttaaaataaaaaaactatttttgagttagtttttcatcatatatgctagagccaatttttttttctaacgctctaacactaaaccttagttttgttccaaacctaacaaaaaaaagacctatgtttgcaatggttaaattcaattctgagaggaaaaaaaaatctaacaaagaacaggttaggaatataataatattattggaattttcttttaagaaatgtttttttaaaaggcaatgggcattattaaatcgtaagaaataatttaaccagcggaggtgttgcaatcaaacaaaattcttgcatccaaaattgtaacaaacctgaatttgtaaaatcatggcaaattagagtaatcaaaatttccaatttatatttattgtggtgaaacctttgtttttggatttctcatgcatcatatgtttcattttgcgtacattgatttatcttcgaaaatagaacaacaaatctctatgttcagcccaatggaaaactcggtgcactgcatgttctaagcctttgcatgcattagtacaaattgcaagaggagatacatttcctgtagttttatgcaattgatttataaaccaggtccagttatcactagtttcagcatcaatgaaaccaaaagcatcaatgaaaccattagggcagttgagtctatactgaggtatggcctacatccaattagaagtccaataatgcatgcacaaaagaatctgtgaaaataaacattcccatcaacttcctttgtgtcaatttcaataacactaccaggagacctctccatgattgcaaccctccacctatacaacaaatggaaattatcttcccaactgccatgcaactagatcatagccaaagtcccacccttagccacagtatcataattgattttgtatttctgatcctcttccaacttggtttgcagttcttcagggcccatacttgaatccttcctaaggatatgcatggccttggaagcaacctagtcgctggttggtgtggtagtcttccttctgccgccagatgtacacgtgtggttgttaataaactttgttacttgcaaaaacaaatcaaataaaacatggcattagagaaattttttttaaataacatacaaacaaaaatattaatgacatccgctaaaaagtaccattgtggtccactcgtcagcctgtttacgcccattaacatgccaaggacaatcaattgcccctttgcatcctcctacaaatctagtacgatctctcgcctttacccaaagtttgaactccccattgatggcaaactgtctaaccgccaacgtaaagaccttcatgttgggatacatagtacctttcaccaaggatgagttattcacgtcatacaccatcatcctttctcccgcaaccttggagtatcaaccacaccctcattttcatcatcattagcatttttagcaccattggcatcggtacctctagcctgatcatcattttcagttgtagcctgagccaccgctcgtgcatactcggcggcttcatcctcatccctcaaacccaaaaatcacgtgcaacaggtccccatccacgatttttaatcttcctacgacatctagtgattcatcgatatgtaggttttcccaatcaacaatcggtggttgtggttgtggttgtggttctgggtgtagttatcctccttgagtaggaggagaactactacccctagcaggttcataaacaggggattgtacaactactaaacgactctcaggctcctcgagcctagagaaaacaaaacaaatgattgcaaatagtcagatctgtatatcccttactcccatgacatgagagagagagagagagagagagagagagagaagtgcataccttccaacaaaatctagccaagtggagtcatccatggagccaaaccctaaccacacaaacaaattcagtgagtgccaaatgggcactgaggtcggttatagatgaatgggggatgctaacctggggcctggggtaccactatttgccagctccattgcatccgcagatgtcgacacagattgtcgccgtttgggttgagtgggcacctgataaaccctgagtttcactcgatacgctcaaggttgttgttttgtccgatctttcggtgagttgagataactacgatttagaagaaacgttgatgatccgattacaaccgtactagacgttgttgtgttgcgtcttagcgatcgatgcacctctccgtgggttgttgatcttcccaatgcaaatcaaccttattcctgcaagcaaatcgaagaaacaagcaagaataagataaaagtaatctgaattgcaaataggaattcaatacaaatgataagttggggttccgaagaacaagcagacgggcggtctagctgacacgcgcactgcaagcaaatagcaatggctaaactttaatctaatagaacccgagaaaccctgaaggtgtacctaattatttaaggaggtgggaggacgacctagggatctctagggtcgtgctccacctgtttggggcacaccccacatgggccccacttgggccggggtcccaaacgaagttttaggcccataggccgattataggtgacgcaacatcttgtttctatgattgcagccaaacgatatggaattcggagatgaggctggatcccttggaaagaggactctgagagctttctatcaagtactcacgggttgaaaacaaaggtcgtatacagatttggcggccatttgaagtcagcagtgtagcaggttgccgaatcggattccagcacttggaggacttgattttgatatcttcttgttcatccatgatgtgagcaacgattgtatccatagtagccatggtcacatcagcagcggtgacacgaatgaagggatggcagcggcatgaattgagggatggcggtgacgtggtaggtagaagtggaggcagattaggtggatgagggtcggtgccagtgccacggccggcacctgtgcaaaggaagggttgagtgggcagcggcggcatgaatagatggatggcagcagcgtgagtgaggtaggaagcggaggcgggagaggaaggaggcagagcaggtgggggaggggcaggggtcggcgccggagctgacgacggggtcgtgcctcccggaactggtgcgcaatttggagaagtgatttgctgggcgtgggaaaaaggataagaaagagaggggaaggggtattttggtctagagaaaaaaactaaaatagagcaaaaacatttgtattaaccaaaaagaataaaaatggcattttggtcaacaccctcagtttaggatggcattgtaatgaatcagtttgaagcgatgacattctagcgaaaccactttttttgcgatggtgtaatcccaaatttctccatgacagtggtggtgggtggtggcacattcaccactcaccacaaccattgggtttttttaaaggagtgtagataataattaattgcgcatgaattaattaactaataaatctattctggttgttatgaaattgaggaggatgccactgagagcgtctagggctgcgttcggcagccaaggttggcaactaatcacttctgcacgaaaaacagaacggtctattagcgcgtgattaattaagtattacctatttttttcaaaaatggatcaatatgattttttaagaaactttcgtatacattttttttaaaaacacaccgtttaatagtttgaaaagcgtgcatgtggaaaaaaaggggagtgagttgggaaccatgggtactgaactcagcctaggtatagccattgtaccaaacaatgtctagactaggactccgatcgatacaaaagaaaaacgatgtgccactgggtacatgttacaaacatctaatataaagtccgtattgatctttaccttttcagagaaagagaaataatgtcatatagcatgtgaagaaggtatagttcagttttgaatgtagcctgtactgactgcctccctacctagaattcaagtttgaagtgaagtgttgttcatccttgtgcagggcatgctagaacccttgacactttgtacaaggtgatagacaagagagggttggagcatattaaagaaaaaaggtaagtggttcctgtagtacttggcgctaaaaagtatgagcatgagatagactcgcatatatctctcaacctttgcaacccttaaaaaaaataaaagaaatacttctaagtttgcttttcgtcatgttagaggcaaaaaaatggttttctactttatgcttcaagcctccaaaatcttaaccttggattggattgaaacctaagaaaaaaaagaagtcccatatttgcaatggtcacacttgattcgaagtatatatataaaaaatcttatgttctcctatctcacatggctttaggtgcatataaaacagtaaaaattaatgaaatatttgacaagttagaatgcaacaaaaacaaaattggattttcatcgagaacaattataaactatgcatgattcttgcacaccatttcgatctagaaacaagttgttattaagaaggctctaggatgactgaactagttttgggctgttagcctgttatgctaagaaccagttaggaactcaataatttcattggaatttttttaacagacggtgggcattatatcagggaaattaatttaatcagacgaagtattgcaatgaaataaaattcttgttttcgaaatgctgttaataatatcaattttaccattttgagttttgagaccaaactaacaaaagatatggtcgtgtcctaggaaaaaaaaatcaaaatgattgcaataaacagcctgggatggcatgtgactgccaacagtttggtcaattatgtattttttttataacaaaagtgtgcaaaacatattcagtttttgtacacagacacatttggttaattaaatgccttgcacacttccatgaacccgtccgactagctttcttcccccaccgcctcacataagtacatcaccatggtcaagctcatgacattccagcagctatcgtggaggcttcaagacaagccatgccacagtttgcttcacacaatgacgaagcagatcaccgaaagggttatgttgcttgtcatatatataccacccttgtgcttgctcgcctgttccattccacctcaacagattggattcaagagctagcagtcatcatcttcccctccttcctagttggtgttgctgtgtttctactgcctaccggagatgaacggctgtactggtggtgctggaggagtggcagcagggaggctcccggcggtgagcctccagcaggcacagtggaagctagtagatgagcgatgtgagctccgggaggaggagatggagtacgtgcgatggttccaccgctatgagctcgttgcaaccggtgcaactccttcgttgccaaacacatcagggtgcccctctaaactgtaagtagtgataataataacaagcatcatctcgtttttttgatcatgtagttatatatatatatatatatatatatatatatatatattgattatgatatggaattaatgcatgccatgtgctatatgtggattttttcttcaatgattaggtttttaactattttgtatttttaattatattgggattggggttgcgctaccctaatagggatagggattctattgttaactattttgggtggtcgatatatgtgatttcattgcacgattcagtttaggagaataattatacttcacatatagtttgataatgcctgaattttagccttgtagattttgagtttgcggattaccatgctaaaatactatcttatgaaaattgtctatatgctccctcctgttacgaataagcgacctttgggatagtgacacggtcacgaccaagacaattgtatgattactaattactagtgtaatatgtatggaaaatgtaggaaggttataatattctgatactatttttaaagaatatcagtacataccaaatttaaaagttgaatttgaaatactcaaagtgatattgttggtataattctaaacatgttgattacaggcatttcagaacatcagctaattgtgactggtcggagtatatgtacttatattatgctaggataataaatatgtattgtaattagagttatataagattacatatggatataaacttttagttgttagcacctgtgtaagtgtatatcctatatacaacatatatttttttaaagtaatagtgttgatctaaaatgccaaccaaaaacaaatcatatttcatcttgattaagttgatgaatggttttcaatctgttgtccgcaacacacttccatacagaaatgttttagtccttcataatttggcgtagtgaatcttccatgtttgtctttatatataattcaaaataaagggatcctttaaaaaaaaccttaatgaattcaatgtggtaagtgcacaatgcagattgatgttcaaattgtatttataatgtcaatacacgtttaactgtattaatatatgcttgaattggtaccaataattgtttttagaattacataaagtattatcacttggcagtaggattggttctcaatacttctttcaaatatttaatatcatttcagagaacattatgtacatgtttatttcaataccccacactcgcacgtgcgtgcgcgcgcacacacacaaacatttggacatgcagcttgtgtgttgcatctaacatagactttggggttttccctccaaaaatgatttactttgaagctagctaattctcctttgccatacatgtgaaaaccactcaaactaatttttttttgcaacttctgtgaaaactaactgatgatactagttatgttttttttatactcttcaatctcatcattattatataggtttggtcaattgtgaggaggtttgatccgccacaacttttcaaaccttttgtgagaaattgtgtaatgtgaggaaacattgagaccaaaagtgttagggaggttggcgtcaaatagagagtagcttaaacggaactcgcacaagaggactgccctaataaaataacttaatactgttcaaagtgggctcccatccacaaggagaattgaaaggttagggttccctgatgataatgatcacaccctccgtgtcaagtttattggtggtgatcacatgctaaaggtacaattcaatatttatcaccattccaagattttcctgtgttttgttattgctatcaagccaataaatttgatacacaatatagatatttttatttgagataatggaaatatatagctttttatggataaataaataactgtaatattctatatgtgccttggcaccatatccttacttgccactagaaaaccgggtcataccatacttgtccataatgtctcactgaaatgtgggccttagacccgcatgttgtttagagaatggcatcaaataaggaaacatttcaactttaggggcaaaaataatgattttatcattttttatttttgcatgtattttgttgaagatctttatttgtagtggtcctgacagtcgatttttttgttattattccaggactactcatccaccttgattatccacttggaggtcatcgatggccagctagtaacactagtgattgagtcatttgtggtggacattctagaggggaacaccaaagatgaaataagctattttatcgagaacttgctcaagtttaacctaaggaccctccgtgtctgaggagagcctagccggtccttgatctcacattccttctttggtgattgttggattaatcgagatatcaaattggtagaacttgttaaaactccgagaaacaatgcagctctttgatcaacactgattactaaagcttcttctaaagaatttagttaccagtgcaatcatagcactcactttagtttactacatatacatatccaactttcatgtttatttcgctttggtgtttgaaatgttgaactaaaatgaaattacaatattttgaaggattgttgccggacttcatgtgcattcatgtgtcttacacttggctatttaaataatgtacccatagatgcatgtccctcttatcaccgagttccataacttctttgaattcaatataaacacttatttgatttattgtcttaaccatggcacaatatgtcaaaatgcaccacgcacattgtattaactaccaacactactttgtgcttagaagaaaaatagatcgtggcatcagatttcaagaacaaaaagaaaacttgaatataagcatgtagtacccgatagtgtggagatcttgtcctgtggacaccgaagaggacggtcctcatctacgtgctcgtcctacctctacctcttcatcaaagacccaacagtcagggtgctttccacaaagctagggcatccagtggcctctgcctcctcaccgtgagatctggcagtcccatgatgaggggcattacatgtgggtctcagaaccatcgccatcatgcaccatcactggtgatttttttttgggtttataataattaattacgcctgaattaaataactaataaatcagttgttatgaaattggggagggtgttgctgagagcgtctaggtatggacatgatagcaaactgggacactgatcggtatgaaagaaaaacgacgtgctacttggtacatgttgcaaacgtcccaatataaagtcaatattgatctttacctttttagagaaagagaaatgatctgataatgtcatgtagaatgagaagcaatttttcagttttgtacgtagcctgcactagctgcctgcacacctaggattcaagtttgaaccgaaatgtcgttcatccttgtgcaatgcacgctagaacccttgacactttatacaaggtgaagacaagagggggttggagcatatttaggaaaaaaagtaagtggttcctgtggtacttggtgctaaaaaggtatgagcatgaggtagattcacatatatcacgcaaccttttcaaccttaaaaataaaagaaatatttcttagtttgcttttcatcattttagaggcaaaaaagcttttctactttgtgctccaaacacccaacaactgaaccttggattggattcaaacctaacaaaaaagaagtcccatgtttgcaatggtcaaactcgattcgaagtagcaaaaaagtaatcttatgttctcctatctcacatggctttaggtgcatatcaaaactaatgaaatatttgaccagttggaatgcaagaaaaaacaacattggattttcaccgaggataattataaactatttttaactcttgcaagttcttattaaggaaggatctaggataatttaactcgtttttggctagttaaccctgttatgctaaaaaccagttaggaacatactaatttcattggaattttcttttagggatttttccttcaacatactaattgcattttattagacgcagtattgagttcaaatgaaattgttgcaatcaaaatggtgttaataataccaatttaaccgttgtaagtttttggagaccaaatgaacaaaagatatggtcgtatcctaggaaaaaaaactaccaatatgattacaacaagcagctcgggatggcatgggacagccaacagtttgatcaattatatattattttagaaaacaaaagcgtgcaagacacattcactttctacacacagacacatttggttaattacataccttgtacacttcaatgaacctggccggttagctttcttcccccgccacctcacgtaagtacatcaccatgatcaagctcatgactttccggttgctatcaccgaggcttcaagacaaggcaagcacatagtttgccttacacaatgacgaagcagatcactgaaaggtctatgctgctggtcattatatataccactcttgtgctttctcccctcttccattccacctcaacagacctgattaagagctagcagccaatctcttccccttctcttcgctggtgtcactgtgtttctactgcctaccggagatgaacagtggcgctggtggtgctgggggagcagcagtagggaggatgccggcggggagcctccagtgggcacagtggaggctagcggatgagcgatgtgaactccgggaggaggagatggagtacatgcgacggttccaccgccacgaaatcggtagcaaccagtgcaactccttcattgcgaagcacgttagggcgcccctccaaaatgtaagcagtgataataatagcaagcatcatctcgtttttcttgaaccattattaggtcattatctattttgtttttttaattatattgggattggggttgtactatccattgatggagttagattttattgttaattgttttagatggtcgatatatatgattttatcacttgattgaatttaggaaaataattataattcacatatggtttgataatgcctgaattttagccttgtagattttcagtttgcgggttagcatgccagaataccatcttttgagaattgttcatacgctctctcctgtaacaaataagccacctttgggatagtgacattgtcaccaagacaattgttttttttattgaaatgaacactactggatttaccctgcagttatgattctataaatagaagaaaaaaactttatgttacaaagtaaaatgagaaaaagaactatactgattgtaaccagtctaaaaagattacttttagcttcattcatcctgcaagtatttaagaaaacttcctttttaaaacttgctagctatctgcccatatttgcaggatttttctaaaaaaaaatctgggaattctactgcttccgaatatgccaactggctatgattaatatgtccatgaaccctttcatccggaactgtatccgtgcaagaaaattgtaggaaggtataatattatgaaactatttttaaagaatatctacccataccaaatttaaaagttgaattcaaaattctcaaagtgatgttgttggtcaaattttaaacgtgttgattacaggcattccagaacatcacttattttttaccagtgggagaacatcacttatttttgaccagtgggagtatgtaagattacatatggatgtaaatatttagttgttagcaccttagtaagtgtatatcctatatacaacatatatttgatttttaaaacagtaatgttgatctaaaatgccaaaaaaaaaaacaaatcataattcatcttgcttaagttgaattgttttctatatgttgtccacaacgcacttccaaaaaaaatgtccttcataaacagatgtagtgagtcttccatgtttctctttatatataatttgaaagaaagggatccatcaaacataccttaatgaattcaatgtggtaagtgtacaatgcacgttgatgttcaaattgtatatattacgttaatatacatataactgtatttcagctatgtttgaattgataccaaaagtaaagttgtttttggaatcgcatgaagtattatcacttagcattaggattggttttcaatatttatttcaattatttgacataattttagagcacattatgtacttgtttatttcaataccctacacacacgcacacacatgcacacacacaagcacacacaagcacacatacgcacacgcacacgcgcacacacatgcacacgcacgcatacagttttggatatgtagattatgtgttgcatctaacgtagactttgggtttttccctctgaaaagggtttactttgaagctaactaattctcctttgccatagatgtgaaaaccacgcactcatactaatcctgtcttactataaagttattccccactaactccttaagcttaacatgcaaagatgccacatcatcatccactaattaacaagatgtcacatcatcatccactaacaatcatcacatttaaacatcatgcaaacatgctatatctttatagtttttataatttaagaacttttcaaacacaaacatgttaaattatcatccaacataattcacataatgtttcaatgtatatcttcatgcaaagataccacatcatcatccactaattaacaagatgccatatcatcatccactaacaatcatcacatttaaacatcatgcaaacatgctatatctttatagtttttataatttaagaacttttcaaacacaaacatgttaaattatcatccaacataattcacataatgtttcaatgtatatcttcatactaaattcccgcaacaatgcgcggggtttcacctagtttctttgtaacttctgtgaaaactactgatatgatactagttacatttttatttgatacccttcaatctcttcattattatacaggtttggtcactggtgaggaggtttgatcagccacaaatttacaaaccttttgtgagaaagtgtgtaatgcgcggaaatgttgagaccggaagtgttagggagatcattgttcaaagtgggctcccagccacaaggagcattgaaaggttagagttccttgatgataatgaatacatcctccgtgtcaagtttattggtggcgatcatatgttgaaggtacaattcaatatttataatcattccaagattgtcctttgttttgttattgctatcaagccaatatgtgaaacacacaatatagacatttttcgagataatggaacaatatatgtacctaattatggagaaagaaataactgtaatattctataaataccttcgcaccatatccttactggccactagaaatccatgccataccttacttgtccctattgtctcacagaaatgtgggccttagacccacacgttgagggaatggaagcaaataagaaaacatgtcaactttggcagcagaatcaatgattttacaattttctcaaagttgcatgtatttccaaagatctttatttgtagtggtactaaccatcgttcttttttgttattatgccataactattcatccaccttgactatgcactctgaggtcatagacggccaaccaggaacagttgttattgagtcatttgtggtggacattccagaagagaataccaaagaagacatatgctatttcgtcaagaacttgctcaggtgtaacctaaggaccctcgctgatgtgtctgaggagagccttgccagtccttgttaaaactccaagaaacaatggagctccttgatcggcgctgattactaaagcttcttctaaagaatttagttatcagtacaatcatagggctcacttcagtttactacatatacatatccaactttctgatttagttcgctctagtgtttgaaaaatgttaaactgaaatgaatttataatattatgaaggattgtcgtcggacttcatgtgcattcatatgtcttactcttgtgtttccaaataatgtcccgatagatgcatgtccctctcattatcgtgttctattacttctttgaattcaagacaaacacttatcccatcttcttatatagttgatacccactacaacattaactcctataaagcaagcatcaggtgaagccacgtcatcagttctttacagctgtcggatcaacatttcaacaactaaccaagtgcaaattgctgtctactcctgctggtcaggcccagctcctcagcccaaattgctctttgtttagctgacctcggcccattctcatacggtgatggaaagcttccccgccgcctcgcatccgcatatgttcgacatccagagcactaacacaagtcgactgttcaaatccacggcaacacgaggaaggaaccgaagggacatggcagtggctccgtttccgcttcagcttttgcatccgattcatctttagattctgccataatagctgtcgggcaaagtaactgtgcaccagaaatcaccgccatgaatgggggagtctcaatacaaccatggttaatcctcctagcctttttcagttcaccttccaatcaaacgaaccctgactccctgagggacatgcacccagggagctggtttcagatcctcttggttcttgccatgttcacttgctcgaagggtagtgtcctacctccatcggagaaggtgaatgtctgagtgccgcgcggaagcaatagtgggcatgggcaggaagcagagcggaggtggcatgctatggtagtatggcatatgggcgactggcttctcaccactgccagaaaataacgaatcaagagcgagctttgtagcctttcaacaatctgactattgcagctttctaggtagaggagacatactatgggcgattctcttcggtcttgctccaactattgcagtcttgcagcctcggtgagctttccaggctttcaaagaagatctgaagtccaatatatttcttccattcttcgtgagtattcttctcccattcattttgttcatcttctatctgcatagtttgttgattgcaacaattatcattttacttggttaaataatagatctgttaatccctttatgtcttgaaccacattgaacaaaatgtaagctctgtttcaatgcatgatgccattcactgaaacaacaatgtggttcactgaagaaatagcactgagaagtaaacgtttcatgcgggaacaaattagcaagatcaaggtgagtgtttttcttaaatatttattttgatcatgaatggtttaacaaaccagttggtagaggcccagagatgccttgactcagcatcagtatggttgtgctatataaagatgttgtccgtattctctcatcttttgtataatccacttcttttagacatttggtggaggcaaatagattgcagcttaatatttccttctatttttagttatctactgacgtacgttctcaatcattcaatactgttggcacatctacaggcatggttctacatgagttagctaactcatgtagaaaatgaagaagagatttactgcattggaaagcataatttggtaccgaacgctttacgccatatgatgtccaataacaaaaggacaaagtctctactcattgttgtccaaccaggtacctatatttcccaaccggcacccaggaggcggcactgattacccagggtcaaaggtgctagttccaaaactggcacctttgaggcgtccatgagaaaaaaaaatcggctcaattcatcgagtcgatgcattgagccgtccagccgatcccatctaatacccaaataccaaaatttcctcaaatccatgaacacaaactagtcaataatcctcaaaaaaacaacacatcaacatcacattcatcaagagcacaacaagaacgaacacatcaagaatcggatggaggaggagggctccactgccttcaccaccactgccactgccgccactgatgtctccactgccaccaccgttgttggatggagaggaggagggcaccgctgccttctccaccgctgccgctaccgagggaagtcaccatcgccacctcctgggccgtcggaccattgccgcctcccctcctgccgctgagccgtcgccgggccgccgccgccacctcccctcctgctagatctagcggaggggagggcgccgccgtcgggccattggatcaccgctgtctcccctcccgccactgacccaccgccgccgcatccccttttgccgtcgggctatcgacgccacctcccctcccgccagatctggcagaggggagggcaccaccgccacctcccggtctgtcggaccactgccgcctcccctcctgccaccgagccgctgccgccgccgcatcccctcccaccgccgcacactgtagcggccactgcctccgggtcattgccgagagagagagagagagagagagagagggggaatggataagatgtggggaggagaggaggggataagatgtggagcagtggaggtcagttcggctcggctcggctcaaatttagggggtgtcagtttttaattaatcgacacattgaacatattaaatgtttgtcggttattatttagaaccggcacctataattgtttaaaggtgtcgttttttgcgatttcaacccgtggaggtggggaaaacgcctataggttccggttttagcacttccggcacctatagtgccgacatctatttgatgttttgtagtagtgattgtacaccacatagaacaagttgatcttctatcttccaaggcttgccccatacgcttctttttcaacaaagattgatccttattaacccatgacttcttatagcctcgattggtacgtcggtgttgtaccaagcacttactccttcaacactacattgagtcctcggtgccaaaactctgcttgtccttctcccatgcatgttccattgcgtcggcatgtattaccaacatgcttaccacatcacaacgaaacctcattgtatttcttcttctttatcatctcatcatcatcttcttcatcagactgatcccctatttatacactcaataagcacattagtcccctaatcgtttgtcatcaattagcaaaatccagtaggggcctaggtgctctttccatgcccttggtagatgttctcacgaaatcaaccaaccagctcgagatataaattgagctactcttccctgaatttaatcgttctttcaaactaaaaaggcttgaagatgacgacgatatagaagacatgactctcagactttgcaaaccatcggattgacatggtacattaatctcataatttttgtttatatttttttgaattgtattaaaactaatagtaatttaatttctaatgtgtagggtgaaacttctaaggtgctaacgaaaagctagcttgcaatacatcttacttcatgcgatgaatgagcttgggctacacattcactccacctaggcctatttggttcaacgacttcaaacgtactagtcctacatctattttgtgttcaaagcaacatctatactaatataaaaagaaggagttgcccccctctaatcctactagccaaatcatctcatctaatctcttccatccatccaccatctcatctcatctaattcgccaatcccacttattccacctcccatcatgcgagataactccgtcctggcgcacgcgatgactccgcccccgagagcgcaatgaccagtgttgtggaaaacggatagtacggccgttaatacgtccgttaattcagtaacggtgagcagtccgtcacgacatggtgatacggccttcattacttggtaaagaacgcgtaaaccccataattagcgactaatcggacgttttctgattaatcggccgtataatcaccgttattacatggcccagcccacaacaacccaacccattactgtgttctgtagtatgtagctgtatatttgcccttccgaatttcccgcaactcacagcaacatgttctttccatctaatcctctaccaaatgtaatacgatatccaagattttatgttaatcttttgtttaaatttcaaataggtctcaagaaaaaaaatctcaaatatatatgaagttaatgtattttcctctcctaaaaaggcaaactattatcaactaggtacatatatttgtacaaacgttaaatttccgttaaattccgattaatcgaccgtattccgattaatcgtttgacggtaccctctccgtccaacatccgcataccgtcttccacaacactagcaatgacaacgccacgccaatccccgtcgcctcctcgctcttcctctcagccgcgcaaatccccgccccctcactcgctccgcttgattccccccgcggccgccacagtccacagtcctcagcggtgtggcgcagcggtatccggcgaagtccaatagacgtgcaggcgccgccgctcgtttctgactgaggcgatgcgaatcggcgagcgagctctccggctcgacgtggtcacgaactcacgaagacagcagcggctctcgatctggcaacatgcagcaacggcgctctaccgtccgttggcttgaacagcggcggatgcactcgccggcgcattgcatcgacgacaacggcagtccaagctgtggggatctcacatgcatcttgctgtttcattctcctgtgttccctttcttgctctgctactccgttaaggtgtaggtcaattttccccaattttgaagtttaaattcaaattttgcttgaaaatttcgtacgaaatttctgaaaaaaaatccgaaatttcggtaatttcgtaatttcgctgacccccaaaatttttcctctttccgatagatcaaaccctggtcatgcctccatcgtcggaccatctcactcgctgtcgtgcctcctcgcgactcctcgctgcacgccaccgcatcgtgcccctgaaggcgccgtggtggttgccccttccgccccagcgccaccacagttccatgcaactcagtttctcacgttcaatgagtggatgacaagtgataataacatggtacatttgtatatatatgtttttccaatgtttcttgattcattatttagtttatttgcttgattgagcagcttcttcaagtaattagtcatatgttgactcggtttgattgagatagatgatgcattatcagtttttgaccatccaaaattctctttagtgattaggatgcttcagtcttctgctctatcgacaagataagtgtgtgggggcatgtttaagaagcttctattcagttcatcaaattggcttccaaaatattaggcacaccaattgatgataagaggagctcagattcttcattatttttgcagactaaggatgcaaaagaattgtgcccaacataattttgctttgtataaacccttctgaataagtaataataaatctgaaaacaaatgtgaaagagtgcatgagatttgactattttcttttttactcattttattggctacatggatttcatgtgcacccttactattttcttgatgcattaatgttgtgagtcgtaagttgtatgccctcagctatatcagtttcaaaccatgaattcattgcttcattagcttaattgttctgtaaaaagatttttaagaaaaaaatggatctgaactttattggtgagataaatggctgtagctccatgttactcggctactaatagatacttagtactagggtgatcaatgaaaagaaatgataattagttctcccgtaattgttcaaccaaacattcatccgcgactttcacattgttttagactgagaaactgcaggttactgccccatagtctgcttaactgtaaactgtgacctttcattgttttaggcagtgattgaaattattttcagcactgaagtctgtgatcaactaaccaattcttcatagttcataggcataaagaaaagaggttgccccatgatcagctgagaaagtatagagattcagttcaggggaggcaaaataggaggaaaataatttgtacctataggcatgttttaagaatgttgctgtcgagggaggacacatctatactaatataaaaagcaggagttgtacctttgcaatcggatggccaaatcacttattcccgctaattcatccatcgtgcaacgcagtaatccagcgcgcgcattcaccgccccatccccaccgacgtacattcatcacgcgcttccggttgcccacccacgcggccgcacctaacctcctcaaacgacgccgagatgccctcctctctgcccctcccccgtcaatcacgctcggccggcattactccctgccgcgctttgtggcttcgttccacatctcccggaccttccatccgcagcctgacgaccagcccttttagacgtgatatccacctccgggcaatgcccttgcccttgttgccgccggcccgccgccatcgccgacatccatgcatggaaccatctcagccccagcccctgtcgctgttgcaaccaaatcggactccagtactccagcggctctgccttgctgcgctgcccggctgtacagaactcctgtcctacgctctgcgtggtttgatttgtcgctccgacgacctcctccaatgtgcggccgatgctgctgcatcgaggagggaggcggcaggcggcgtgagctccatacccaagggtggggctgtagcgaggaggaagacgatgtgcgacatcacaaacttgatgcgcacatcagcggccgtggagcagggcgggacggtctgtgccgtggatgcgggcatggaaggaatcacgcggctggtcaaggatctcatctctctctaatcttctcaatccctatgactgcttctattaattttagagttggacctgtttgctaaacggtgatgtatttttctgtattttgtgccaattcctgaagaacttggaacttatgaggctccttgaggagagggagtacgtccctcataccaccttattcttgtatgaattcatctcttttgttagaggctcttatgcatctgattagccacattatcgtttttcgtgaagctaaagcacatcagcttgcttgctcgagagctattagcacagcaaaaatatcacaatcagaggtttcaagatgcccctgtagtggctggaactggtcacaggtggtaagattaattattttcagttgtgatttgccatcttcagattaccatgctttttgtgataaatcaatcttcaatggtattataattttttttctactcttccgtcaataaaaacggtggcacacgtttggtggagctgtataagtgcatgtgctcatacttcataccgtcacaaggggcacattgcagagaaaaaagaaacagatttcagtatcaattggcatgtgaaatagattttagatatataggaggagatcattccgtgaaaaataacccgaaatttttttattatagctcataaacatgagcttgtgacttggcagatgctatgcatattctgagtatgtaggcttggcggttgtgggtttgacgctgttattcctgtaggttgatggtcagcattctcattctatactccctccgtcccacaatataagagattttgagttttttattgcaacgtttgaccactcgtcttattcaaattttttttgcaaatataaaaaacgaaaagttgtgattaaaatactgtaaataataaagtaagtcacaaataaaataaataataatttcaaaaaaaattgaataagacgagcagtcaaacattgcaagcaaaaactcaaaatcccttatattataggacggagggagtatgtatgagttgtatgtgtcgtgctatgcatccttactctcagtagctctgtactctgatggcagattattttcgatagcagcaaaaaatatgtttgattgtagacaacaattttttggttttattcaaattggtcgctacgtgcattgcacgttcaggattactagtcaattcacaatcttcggagatgtaatggatcagtatgttggagtaaaaaaaagtgcttacatgcatgcattaactatactacatagatcatctttggagttgacatctagatagaaattacactttatatcgatatttgtcaatatatattttgtttctaattgtttgtatggtgtatgtctatgatcgacttgcaaataatactacctctttatctatgtgaatttgtaatgtattgatgtctctatatgctgataaaaaaatatactagtttcgtatgagcatgcattgcttcatagctgctgagctacacgtgacaaatgttgacataatattgaatccgatagtcctatatatgtagaaaaatcaatttgcacgagaattaacaaaaagacaaaaataaatgcaaaattagcacgtgcatgatgagcactagaggcaaatctgaattgaaactaaattgaatttcatctcgcaaatgcagacacactcgtacacagagagcccaacacgtattgtcgactctagtgctcccttggctgttcgctctgtttctgctgcatgctatacttaattaatttcagcttcaacagttggtcggtcgaaacatgcgtgagtcatgtgaacgtttgctgaatcacctgtaccaactcttcagcgctgagctcgcactcaattccaatctgcccaaagatatactagaaaaatgtaagcacagtgaagattttataatttaccaaaatattaaatcataggaatgttaatttcatcttataaactaaaacttatcacatagcattccatatatagtttcttcacagaaaggaagtgctttcatgcatcaacccaagagcaaaacaattacaatctaatggtccaaaaactaaataagatgacgtgaaagcgtgacaacactgcactaaatggaaactgacatatatatgtttacatgatttacataggtcatatttaattgatgcatgatgttatggccctatttatgaaaataaactaaaattcagcccagtataatctaattaaataggatggaagcgaagaaacccgaggaatttttgtaagaatgcctatataggaaaaatatataggagaaatatgcagcggaaacctgaaaactaccgtaggataaaaaatgttacgtgtaagatttgtcaatgtcatgataaactttcactcctagatactcgaagatgccacaaattttagtattaaatttgtttccaatacaagtgtaccaatatattataccatgaattaatgtatgttaccaattggcacccatcctgaagaactgtgaaaatgcagatataccaccatgtaacagtgaaggcatgcagtgaagtaccagtacactgtctggtctctgatatatatactatactaccatacagatgtccgggcagaacatagacatttgtataccctaccacatttatgagcagtgcagcttcattgcttcaacatgcttgggcagtactagctgttaagctagccatacatgcacttcatgggaaactcacatgaaacaaatgcatttcttttgatacggcactgtaccctaaacagtttcctttcaaatgttccattcacatttactgtgtcctccacacggcctcaagcagtgcactcatctatgagatcttttgttcatgtgtacatatcaacaatcttagtgacaataatatggttaattatatgaaggcttctgttaattataaatggtagagctgaaaatgttgcaacgattacacttgcgacttttgattttcttttctaaatgaaatgcagagctcgtacctttatttaaaaaaaatactaattatgagaaaaatttgttaaacattaattcagttttaatttttttaaataattgtgattaggacacatactctctccattttaaaaaatctagcaactttcagtgtactattagaactttgaccactaattactcttaaattgttagattaaagtgatcaaaagtttcacacttaataacccttatagtgtttgtaaatattttgcaaagaagacaatttttcaaaattttaaaaataaatagtgcacgtatccggtgtcaatcatttaaaaatgaagggggtaataataatcacataatgagcgcaagagctgaaatagctgtgccatgcagtagcagactagcagtacacaccttgacagtgaaggagttgacggcggtgtcatcgacggtgctgatcttggcgtgaagaatctccagcgatcggccctccagggcggcgatgatcttcaccgcctgccccggcgaccgctgcgacaccgtcttcagcaccaggttcgcgccggcgaactccaccttcacgtcggggaggaggaggccgccgcccagcgcctgcctgctggcgtacgccgacagctcggcggcgatggcgtccagcgacggcgccgccgtctcgtggtgggtcggcgtcatcgccggggacgcgtagttggagccggacgccgggggcggcggcggcggcagccggaggagcctgtagggactaccgggcgtcggcggcgtcctggggctgatcggcacggcgagccgcgggctgagcggcggcgtggacttgagcagctgcggcggcagcctggggctgagctgcggtgggcgcgggctgcagcacgacgccgccaccgtcgccggcggccgtgggctgagcacctggtcggtgtagaccttgcgctgcttcttggcctccagcgagtgcaatacttgctgcagctccttgatgtagtccaccactcctcctatgatggatgcctggtctccctgatcaattcaaaatttcaaattaatacatgtcaaacataactatatatatgtatattatttcagagaaacaaatagtgtaacttggtctaacataactatatatatgtatattatctcagagtagttatctattgcaccaaataaataaatagagcctaagatgttaactatatatatatatatatatatatatatatatatgcatggttgcattatattccagcgctggcaaggcaaaaaaaacatgctatctataggagtgttagtttcaattgagattctctacttgagtatatgcattcgtagaatccctgctctttgcctgtacagctgattgaattaaagtctaaactgagaattttcacggagtaggtcggtccatataccatatgcattgatgcatgagacagtattggtagtactgtcgtactacgttacgtaggaccggatgcctgtgccaataagtgatgtgatatgatcgactagctagcagatagatggcatagtgcgtgtaggatcataaatgattgatacccaatccatggagactagttggagaatctaacttgttcgtgcaccaatcacattagctagctagatattacatactttctcaatctaaaaaaatgaacttctgactagaagtaaactatgctattccaaaagttcaactcaggctatatattatatactttctttgtcgtgaaaaaaatagcttctaattagaagtaaccgtaggctatgtccagattcatagcaagaaagtttgtatacattggttttttaagacacatggggtagatcacttatagttagaggcttatatcgatgtgtagacgatcttacccgcttgacgtagaagcatggcatgagggagcgaagcacggcgaggttctcgttcatctgcttcctccggttgcgctccacggcgatgtgcgccgtcttgggcgtcgtcgccgccgccacgtccgtcgtcgaagactccggcgagcagcacttgcgcctcttctgcggcgaaccgtcgtcgtcgtctccgtcgccgtcacggtccgccacctcctcctcccgccgcttgttattggtggctggcacggtcttcgcggcggcaggttccggcagctgctgatgattctgcccaccaacaacgccggagatgcaggcagcggcggcaataggactacctaacgtcgtcgtggtcgcgggggcgccgccggcgacgacgttggcgcagccctcccacgtctcgaggatggtgaagaggtcgtcggcgtcggcgtcggcgtggtgggggatgaactcgccgccgtcgctgtccaccaagaggagctgatcacacagcgcgtctcccatggatgatggatgagtctagctacggtcaccaagggaatgttgcttttggtggcttaatttgtttcaagctcgatcgatctgatggtggtttgaggtcgaccgttgtttgatgacaagcgcagggtggtatgtacgtagtcgaaggcgaggtgacataaatataggaaacggcgttgaggtacggtagaaggagggaggagagccagagtgtgtgggcccaccatctatggtttggccatgcatgcatactttgctgcctgctgggcacgattgattcgatcgatccgtcaaataaggagcctttcctcatctaaaccttgccacaaatacagaaatcgtcaacaataccagttgaaaaggcatatcagtgccggtttcctaaccgacactacagctaattaggcactgatgaaggggttgtcggtacccattttaaaaccgacattgatgtgttccctcgaataaataaaaacatagaggatggcttgaatcaagtcgatgcttcaagcggctctctaaaattcacagcccagcacatcgatgccctcctattccgcatccacaatacaaatcaacaacaagaacacaagagcatccgtgtatattccattatctaaaaaaaaaaagagcaaccgcacacatgcatcaaggcatcattgcaatattcagactggaatatatgaggaaacccaccggtgatgatgttcaacatatcatagaagaagtggaagaagtgctcaaacagttagaaagcaatgtacacacatggagactatggtgcagcaacaatcatcgtggaggcagtggcatcctgtgaccggtggatttggcattgtttgttcggtgtagcaggatcaaatgatgagatcagtgttttgaaccaatcccatacattcacttattaactcatgggtatatcgataaggatgcgctacacagtggaaattaatataatttgggatactatacgccaatggaatctatctagaatgggcaactcttgttcagtcgatctggcatcgtcaattggagaaggaaaaaatgtttcctcttcatcaagaatcaacgagaaaagatgttgaatgtgcatttggtatattaatagcctgtttcgaggtggtcactactcttactcacttatgggagcaatcgggcattatcaatataatgacgagatgtattataaaacacaatatgattgtgaaggatgaatgtcacctagggcctatggacgcacatgagtttgagcaggggcggagctagcacaaaataaagagggttccacttgcttgctttactctgatttgaattaaatttagcttgatacgggtgtctaattttgaactaacagagtatatatatggtgaaaatagacaaactatagctaaaattttttttaggcaaaatttgctatatgacatccaaaaaacgtgtaattagctggaggacaccgtaaaaacgtgtatttgctgtagggcatcgaaaaaacaagtaattggctgctggacactcgcagtattattttattatttttggaggaaaaggaaatgattaaaaacaagattgccttggctcatataactccaacgtgggccccacatggaagtcccctctccttctccttcttcccagacaggtctggtagcggagcggcgatccgtggccgtggcaacagtgacgatcacgttcgttgtcgggagggcgcccggggggggggggggg

SEQ ID NO: 21330 - DNA, 9655 bp, Oryza sativa
caggatcgccgaggaaggtgtcaggtcggcgctgcggcgggcaccgtcgatgcccgtcacgttgtccgcgacggtggcgcgacgacgacgccagccgcgaggatacagtgccggtggccaccgggtccacgacgccgggcatgtccaggctcaagcacgcccacagcacgctggagagacactgccgctcgcacgcgcccaccccaaacgccattgaccgccatggcaatcgatctcgacatggatgatgaattgatgattgatctgagtttaacccattgatccatgcagactgaccggacgccgagaacgtcggacgatggccatcgaaggcagccgcctccgccgggaactcatcctggccgctgggaactcattgagagagaagcaagaagacagaacagagaagagagagaatgagagagaaaagaacaaagaaaaagaaaagaattcaaagggtagaaccgtatttacatggttgtttctctctcttttccttcaaaaataataaaataatgccatgagtgtacaacagctaattaccagttttttacaatgccctacagtaaatacacgtttttacggtgtcctccagctaattacatgttttttggatgtcctgtagcaaattttgccttttttttaactaggttcctaggcacccccctagctatatgtagctccgccctgagtttgagggtgactacgagattaagtccccataacattatgttgtgctaattcagcgaaattttgctatgcgaaaccaagacacgcacagccttgttaaaagagatttggtggagcacatatgggcaaggttcggtcatcagtatactgaataaatacttcactactaacaatttatgttgtgctaattcatcgagattttgctaagtgaaaccaaggcacgcacaaccttgttaaaagagatttggtggagcacataatgggcaagtttcggtcatcagtatactgaataaatacttcactactaacaattatgttttccaaataggttcagggatgcatggggccaacttgctctccacattgccctgcgaaaatattttcgcaagtgacccttaagaggtgtgcctgtgataatgcatcttttatcgcacgagggcatcttaagaggccggatgcaaagatagattttcaaatgtggcccttaaactatattttttatgcatgggcaactatggtccaactacaattcagagggggtcttatccgaaaaaaatctattatatagtagtgtacaaaatataaccactagaaaatagattcgaatatgaatataataattatttcataaaaactatactgtaataaagtatatcttatattctacgtgacagtgcaacaagccgactcatttatatgccattatgtaagagcccctcgagcgtgaccacttccaaatgctcctatgttcatcaacattattctagctgaacatgtatgtaaattaagaggaagcaatgaaggtaattgagtgatacatgcatggacaggtgcgcacgatatacctcgggtttacagcaatgctagctccttctcattattatgtctctcatctttgatattacttgtattaactctctttcgagcctggcctgcatgccttaatttcacacacattcttaaattcatactccatttgcacgctgccatacagacgtgtactgcagcaaattaaactagatagtaaatctctcatttaaggcagactgcatatgaattattagtacttaaacatgacattccttttgctctacagatactataaggttgagccactgatgctaatctctttatttgcacaaaaatctgatctagccttccgagccacccctcccccccccccccccccaaaaaaaaagagaccagtataaaaaagctgtttacacacaatgaactgcaaaaatcaaacaagatggaattcatcctaggcttgttcaacaaattaattagttaaactcaatttaatttataaagttgtgttctagcaccttatgcatgtctctttgtgtgtgtcctattgctttcaatttgtttctcatgatctagtggaccaccactctaaaagatgcacattagccctcctgtacgtacgttcgtacgtgagattgatgagctgctagcttgcaagaagataaagacaacgaatgcatgcacatgcatatgagtcgaagataagtggcatatgctacaaatattttgttgattaatccatattcttcgatttgttctccattaaagttgcatattgcatattgcccaatgtaatattccgcacctttgcctaattgcctcaatcatgtatgtctctatctttgttgcaaaccggtacaacgacgacacatttactctcactatcatttcggcatttccaactcgcccaccactttacgtgtgattatcttgtcaccggtacacactgagacttcaaccacatcgattacggtaccctatgcatggccaccctaattaccaattatatatgcccttcatttttggttatcttgactgttgtcatttcagctctggactctagtctaagtatccatatttgtttgcgtgcttagactaatgatgatgccagaatatatggttggtagttaaaaaggatattaggattggattgctaagttttgaaatcgtctcttatataaaccgcatacctatgctcaatacaacatcaacatatatacacaataaatctcatatctctcttacatgtttttacccagatcttgtgaaagtgcttgtatacctgttgacgaaaaaatcgaacacactggcctgggagatctgtttagctcctgtgcaggtccaaatcttgatgggatgcgggcgtgtcagtcagtttgatcctgcaactgacaagatatgcaaatagtagatcaaaacagctgatcggctgacaagccgatagagtagtttcagccgatagccaataatagccgaagccgataccagccgatagcgatagggtttaagcaatcagctatatgtccaatgtagatgatgatataaaggcaatcggctgatgatgatgtaataaaataacaatataatccagtataaaccaatcggaaaataatgatatgataactaagtatcgatccaaaggttaaagcacacatcggttggaggtctgatgtcattaaatccacaagattagattaaacagtgaaacctttgttgtcatcagctaaatccaacttatatgtatatgcaatccttatgagccgatgcaatgtacagataactcaccggctaaaaccccaatgaaacccttattggcaatcaagaagcaggctagagattatggttctaaacacgacttagtagatcaaacttaactgatgcagcactaagtatgaaaagaaacataatatctagacaatcaagccgttgactaagttttcagggtggtagatgtctaaactaatctaatctagcaacgcgatttagccgatatcggcagaaaccctaaaacgagaatcagccgatagagctaaattgatatgctaagactagattaacaaagacatatgataaataggtaggcaaatatatcatccaaaccatagcaatcatggaggtcgaatgtactgatgcagccttgaacgacgccgacgtaaacgatacagttactcgggccggcggaacattggacttaccccttagccggagatcgaacaccgatgcagccccgcgttaggtgccaagtcccgccggacgataaaataaagtagaaaaggtaaaaggtggcgatgcgccgaattgtattgatcgtgaagatagattacatagaccccgggtgtacatatttatacccatgggttaatacaagttcttgttggacaagaaagaaactttcctaaagataaaatgaaaagataaagtccttataggacactaaacacactttcctaaaaatgaaaagaaactaacaaactattcctaattaatagataacttgccatgccgcattctctttgaactcggtctcttctggataagcttcctttagtagatcaatttccttaaccgaatatagcaagaatccgacaactgacgacttgacaactctcatcggctaatctcaggacttcgaagccgatgctgactctaagtcgatgactactccgggcttaccaaattttactgttaacaataccctagctagctacctcatgtgtgcatgcatgcttttgtttcataggtttctccgtatagtaagaaaaacaaaagagaagcactaacaacatatcttatggggtaatctacttctcaagtactgactaaattttccttgtgcatgtatcaaatcactagctttttttaactctactagatcagccataatatctaacaaaagactcatcactttccaatccattggatgacaacctaacacatcagatcagtcttgctcatcccttggatgcatgccgacctaactatactcatcactctggccctctcgtccctaattcaaatcttagaaaaaattttctttgacaaaaagttaaacaacatattcttctaacctagataaagacttgaaaattttgaataaaatattcaaatttagatccagaaaaggtaaatgcactgtaattttaggtctagaaatttattttctaacgtaaataaaaaaaaataaaaatttaaaataaaaaaaaataaaaatttatgtatatgaaatatatcacacgagctaaaaatttgcaataagtcacactacaccccttaactatcttctataaaagaacatggtctctcgacaatatatgaaaccagatattttaaacccctcaattatatatgaaaataggacaaaataccccctaaggcaatacaaccggacttcaaatttctttctatgattttaaaatacactctaaacagtgtttttacttgtgtatataagccacctattaactgtaggatcgaacaacaagtactaagcctaccagataggggtgaatggtagaaacataaaaagccgaaaacttttagcagaactaaaagttaccctcgaagctgatggagatcagtctgacctacatcagatctctggtctttccgctgtagatgtgccagtccaaccatcttggagccggttgcagtcggtttgatcgctcgtatccctaacgtaactgtcgaacccgagcaaacaaaaattgtagatccattgaaagtagattgaactatattgcttctattcgtgtttacaaagtgcaacaacaatagtcctctcacaaaattcaacttatctcgaaaccctaattttctaaactctacccacacaaaatcgataccgggaggcctcaacccctccccccccttctctatttacacccgaggtaggcagcctaaaaccacgaatccaacttgtaacagaagtcctagtccactaggtaaccttccggtaccaagaaacaaacttatcttatcacaactcaaactataatcttttcaaatttggactccatgaaaatttgacacctcatctcatatacacacaatctcccatcgtatgctgcatggaattttcaccaaccacgtgtgttgttctttagcgtaagcattccgcatgatatactgaccatctggatctcatctcctcccaagttgacttccgatccatcatcggcaactctctcccgaggcatcaagaaacacctacacatgaatcaaacaagaaaccatatcccaacttgactcaacattagcacctagcagtattacatacgtatagaaatcatttaaaagtcataatcacaagtatcaaaataaacaatctgaaactaataccgacacagaatcagtcgatcagaccgtcgggctagccggtctgaccggccttcaccacccaatctgactggtcccacaaagacaacaaaaccaccactttgccaaaataatctccaaatatcaaaccaattttctatcatgccaattgtgctcatcataaattaataaataaaacacactttgatttcatatcaacatgagatgcaaggaatatagttgaatacaatgtaagtaaaaatcatattttttggatgcaaaaataatgaaaaccgctatgtgttactcatggagggtattttgtcaagcttcaatagtttagggagaaccattgcgcggaagtattagttatttaggggtgtaataaaaaaccatttaattttgagagaatccactcagtaccactgagttttccccacttctacaatataccactgactttgtcaagttgaataatatgccatcgagttttccttaacctccactgcgtgccatcgccgtccacgagccattagttggcctccgtttgctgtattgatttttctctaaatgactaaaataccctagcacatcatccacaccaaatcgatctgctgctgttttagtcatttagagaaaaatcaagttcatgtgtcggtataggcactgtgattttactatggctggttttgccgatgcttctgttcatgcttctgttggaattaaaatcacagtgcctagcacatcatccacaccaaattgatctgctgtttctgctgcttcactgacatcctcctcagagacaagttcatgtgtatgttcagtttgttctggtggtgtgattgacacttactcacctgttgctagattgaccacaattcgtgtgctactttccctagcagcctcacatggtcttctcgttcatcaaatggacgttaagacagcttttcttaatggagagctggatgaggagatctatatggatcaacctcatgggtttgtagttgaaggtcaagaaggcaaagtgtgcaaattgttgaagtctttgtatggtctgaaacaagctcctaagcaatggcatgagaaatttgacaaaacattgacatctgcaggctttgcagtcaatgaggcagataaatgtgtgtactatcgccatggtgggggtgagggagttattttgtgcttgtatgttgacgacatactgatatttgggacaaaccttgaggtgataaatgaggttaaatcattcttgtctcaaaattttgatatgaaagatttgggagtagctgatgttatcttaaacattaagctaattagaggtgagaatgggattacactcttgcagtcccattatgtggagaagatcttgaatcgctttggctacattgatagtaagccttctccaacaccttatgatcctagcttgttgcttcgcaagaacaagagaattgctaggaatcaactggaatactcccaaatcattggctcgttgatgtacctggctagtgcaactaggcctgatatctcctttgctgtgagcaagttgagccgatttacctcaaatccgggagatgatcactggcgtgcgcttgagcgagtaatgcgctatctgaaaggtactgtggaattggggcttcactatactgggtatcctgtggtactggagggttatagtgattctaactggatctctgatgtggatgagatcaaagccactagtggatatgttttcacactgggtggtggtgctgtttcatggaggtcttgcaaacagacaattttgacgaggtcaaccatggaagcagagctaacggcactggatactgctactgttgaggcagaatggctacgtgatctattaatggatctgcctgttgttgaaaaaccggtgccggctatccttatgaactgtgacaatcaaacggtaattgtcaaagtgaatagttctaaggataatatgaaatcgtctagacatgtgaaaagacgattgaagtctgtcaggaaattaagaaactccggagttataacgttggattacatccaaacagcgagaaacctggcagatcccttcacgaagggactatcacgaaatgtgatagacaatgcatcgaaggagatgggtttgagacccatgtgagttatactatggtggtaacccagtctatgtgatcggagatcccgtgaattagatcctgggaagaacaaaccattaataaactataggagagtaccaatatatataccctctccaagtgaagatgcatatactctcgtgagctgcaaggcaggttggctatgccttaatgagttctgttggctttaattagcaaagatgttgtcctgcagagcattcttgaaagaactcacctttgtgagcttgactgttggtcgcagtctatgaagattttgggtgaatcttctaggaagcttactaaagacctaggagtatgacttatacgctccacccgaggggtagtctacagacggtctagtaccagataagactttgagtgaaacttgcttgcacaagacttgcaattcaaggcgtagtccattgttcaagttgtgagtaagtgtagcttggagttctaggtggatgttcaaccttaattggtctccatcgaaccgctggtatataaacagtacattggaaaaggcaaatctcagtgggattttgagatttggtgggggattgttggaattaatgaatgggccttagcccactcgaagattaattctttgaaaaatcacaaaagcccacctcatgggatggcatgcatgtggagtttagtaccaccttgcttattctaggagagggggacctccttaaaaggaaggatgccctcctagccacttgaagcatgtgtggtggagagaagaggggaaacacacgcgcgcgctcgctcgcctcgccgggccgggccggcggcgcgcgtgcacgacgtacgcgtcgaatggtccgaaaaattggctcctcacccttgcgcagatgcagcctccttttgcagttttgttttgctgcaaattcggattcgtttttgttttggaaacgttccgaaaaatccggtgcgtgcaaacggcgtggagtccggataagttacgcgcgacttatccggttcggttacgcgcagtagagatcgtgcgggcgccctgatcaagcgacccttctctatataaaccgacttgccgtcttcacgcaacacttgcgagatcaatctagggtttgtctcctactctgtactgcgccgtcgctcgtagactactccatcccgctcgccggcgtgcaccggcgatcgggagagcaggtctccggaacctctgtcttcgacgttctgcaccgggagaaggcggcaataaggtttttgggaagcgcttcgcgcgactgctccctgttcgttcgcgacggctcgccttcctcttcgctcgcgtgtttcgtgccttcgtagacacttgcgaaaagtttcgaccaagcagccggtctttccgtcacctcggtacgtgttcaatatgttgcgcatatttgatctgttcatgttatactgtgtagtttacatgtgtagatctaatgatgcgttcatgctagttttcatctgtaatgtcatgatttatttatggaatagattaaatcattatatgtctataatctcaacagtttctcctccccgtgagcggcgctgactccccatcgatggaacgccgaccgctcggctccccaacgacgcgccggcggccgtttgcctacctgacgacgcgcagccggctggcttcccatctacgcgcggcaggtcactggcctcttcatcgacgcgcggcggatcgccgggcttcccatcgacacgcg

SEQ ID NO: 21331 - DNA, 5602 bp, Oryza sativa
tgtgccaccggccgcgcggcatcctggcgtttccttcccctccgccgcaaccaccgtggccagttgccgacctcgcctccaaccacgcgtctaccgccgccggcatcctagcgctttcgtccccaactctgccacaaccgccttctcagtcgtcaccgcaaacaggcggccacggatggcgtcctagtgaatgtataccatgtataatgagttagggacaaataggtctttttacaacactaacggatgctaactgggctgtgatggcacgcaatagaggttaaggaaaactcgatggcatattattcaacttgacaaagtcagtggtatattgtagaagtgggcaaaactcaatggtactgagtgaattctatctttagttttacgcagttgagaggaatgagccatgaattacgccggacacggagaagtcatggcagagttaagtaacacacataccttaaaaatatactactggtacagatgatcgatcgatggatgcatccatttagggggtgtctagatccaggggtgtaaagttttggcgtgtcacaatggttattatacacggtgtctcatgggtgttcgggcactaataaaaaaattaattacataatccgtcagtaatcgcgagacgaatttattaagcctaattaatcagtcattaccaaatgtttaccgtaacattatattgtcaaatcatggagcaattaggcttaaaagattcgtcttgcaaattagtcgcaatatgtacaattagttattttttagcctatatttaatactttctgcagatatttaaatgttcgatgtgattggtaaaaaattttggggaaggatctttatcccatcgatcgaattaaaggcaacagcaacccatattaagtgacgatcagccgtcgtctgacctccacatttactcccacacattaaccatcatcaacctaccagaatgcgtgccaaactttgtttatcatttcgtacgttcctctcatccgtcatgctcatatcctttgtcccgttgtcacatttgcattatactccatccgtaaaaaaaaagaagtgaatatagtactgaatgtgacacatcctatataataaatttggacattgtgatattaaattgggtttttatgggaggaagcgcctttcgtgtgatatcacaatgcgagtgatgtgggagccaacatgcatgatttcaccggtacttataattagagagaaatcataataccatataatatacatgggtatattttcataaggaattaataatattgcgtataagtagaaaatttctctgtgtaccactgaaagttcgcccaaacccatatatgcccttaaaatttgcttattcccttctgtatccctaaatttctcctattctccttctccttcagttagttgacagaattcctatcataaagtgcattttgccctttgggtataaataaaatataaatttatgaagcatatcgatggagtgtataaatttattgtatgcgactattatctatatgagtttattttgtgagatactatttaacaaaaataatttttatctcacataacaactgtaaattatcataaataatagagtaaatttcactttggtcaacctttatttaccaaattttcacattggactagagttagacttatattttcacttaactccatatatagttaccatcatttgcactttggaccgggttttacaaattacacatagtataatagtacaatgattgtagatctgatcttatttcttttttgtgttagaaaacttagaattcaacaatttgtactaacactacagttgggtattgtaaaacatgtaatatcttttctaaaaaaatagttattaaactcaatatttctccaattttgtctctagtataagggttgtgaatgttcatatgtagtagtaatgaagtctcattaattgatagtgacggagctcgtggctcctcaccgggagaccgcacaggcccccctttgccggttcggccgggggcttggggtgaaatctcaagctctctcggtatgtggaaagaacgccagctaggaagaaacgcgagacacgggcgatgtatacaggttcgggccgctgggaagcgtaataccctactcctgtgtttcggtggatttgtgtatgaacaagtaacaaagtgtcaaccagcccccaatcgctctgggatcggatctggagaaggccttgtgtccaaaagtcctccctctatctaagtgggcaatgtcctccttttatatctcaaggggataccacatgcccctctccttctccaaactggactgttcttctcttcataaatggacggagatcggtacggctgctgtccgagtgcccttctgacgggacggcccatacctacccccacttccgccggaaacaggtgcgacgtgggattatggctgtctgttgatgacgcgaccagtgtcagaccggtcacagatcagtcatccttgtccaccacgtgtcagcttagcaacgtgcatgtttgcccttcttcatgtagcatcttgcctgtaatggttgggatgaagcctggtataaatctaaccagggctaacgtgccatctctaagagattacacgctagctccggcttgagacgagtgcctagaggctttcgtcttgacgggatggggcaaggcgtgcgtcagaccgccagtcgccacctaacccgtgatctgaccggtctgtgactggtcacagaccggataaaggaacgcgctgcactacgctgcatgcagcgtgacacgttcgaccagaccgcaataaatgtggttaggtgaggcttaccgtgttcacccaacccattcatgtggcgctaactccacaaggggtcggggcgcctcggccctcggggccggggcaggagtcacccgaccccccctcggggaaatcaggaggagggcggacacctcaccctcgggcccgacgtccccgaaggtgccaggccacgtgggcgattgtgtctgcctcaagcctctggtcacgatactcccggtcccatatcaccgacagtagcccccggcgttatgccagggcgatcgcccttctcaagggaagcggtcggtcgtgacgccactcctaaagcctggtgacaggtgggaccggtctccatggttgggcagaaacccaacggtctcaaatcatgcacatcggtaatggtgacttggctgtccataatgggcggtctcttcaagactgccacatcacttgagcggcgtacgaatctgggtgagccgatttgcttcgcctggagatatggtaacgtcgcttcggtcggcgagcgtaattaacgcgcgcacgatacgatctatctcgactgccacaaccgcatatccacctcatgcgccgcaagcgggcgaatgggattagtggaagcgtgggcacgagaaacgagggagcgagatagtgagaaacgagggagcgagatagtgggcgcgagaaacgaggagccgggcacagcgatggcaagggtatgaagacaccgaggaaaggatttgctcccttcctttcgccattattccccttgccttcgctgcttgagccctaactctttctctgctgcgccctaccttcgccacacgcgctcgctttcaatcacctcttcctccggcgccatggcacggggctccgctctgctcgacggtagcgtactaccgccttcccgcattgtgagcgagaggcatgccgggctgccgcgccgctttatgccggaatctgccaccggccgggagatagtgatgctgggcgagggacgcccggcaccagactacccggggcggtccgtcttcttcctccccttcgcaatggcagggctggttccgccattttcttctttctttatggatggcgctggaagagttccctcccgggaccgaggacgacgcgcgcgcgcgggtccgggatgccgccgaccacatcgtccacagtttcgaggggtcggcccctcggctcgcgttcgcccccaactccgacgaggagggcgatgccagcggtgcagacgatcgtgacgacgaggccggcgacccgggcgcatcggactgagcccccaggcccccgccagactccagtttttcctttttctttcttctaaggccttcatgcctcttttttgtatagatcaacttaatctgcaatcaaaaatgatgaaaaaattcgtgtcaattttattttgctatgcgtatgagatgaggatgatctgtgccgtggtcctcttttgtgtcttagcttgatttaagggctcgtgcccaagtcccagtcctctaatggctcgggtcggggctagtgcctggggagatccacatgtcgaggctggccaggccgggaacgtggtgaccgagggttatgggtgacccgattgtgggtttttgccgattcccccccgaagttcaccacgccccggggcacggctcggttctgggccccgtttggcgattttagctgaccgaaccgagcccccgagggcaaggttgagcacgagtgaccttatttcaagtcaagattcttcaaaaggaaaaaacggcacagacacaacctttaggaaattgaaactgcttttattgaaatgctgaaataagagaaataagaatgtgcatgcgtggtagcccccggccaaccctgcacacccgaggggggtgcggggttggcccgagccaaaacctgacactcgacccccccctcaggggtagaagcgacgaaggtgttcgatattccacgggttaggcagctccgtgccgtcgcccgtggccagccgtatggagcccggcctggggacaccgatcactcgatacggaccctcccacattggtgagagcttgctcaatccagcacgcgtttggacgcggcgtaagacgaggtcgtcgacgcagagtgatcgggcccggacgtggcgctgatggtagcgccgcaggctctgctggtagcgcgcggctcggagggccgcgcgcctccttcgctcttccaagtagtcgaggtcatctctgcgaagctgatcttgatcagcttcgcagtacatggtggcccgaggagacctcagggtgagctcggatgggagaaccgcttctgcgccgtagacgaggaagaaaggcgtttccccggttgctcggcttggtgtggttcggtttgcccagagcaccgctggcaactcctcgatccacgaatcgccatgcttcttgagaatattgaaggtcttggttttaaggcctttgaggatttctgcattggcgcgctccacttggccattgcttctggggtgggcaggtgaggcgaagcagagcttgatgcccatgtcttcgcagtagtcgccgaagagttcactagtgaattgggtgccattatccgtaataatacggttaggcactccaaaacgggccgtgatgcccttaatgaatttaagtgcagagtgcttatcgatcttgacgaccggataagcctcgggccacttagtgaacttgtcgatcgcgacatacagatactcaaacccgcccggggcccgcttaaatggtcccaggatatcgagcccccagacagcaaatggccacgaaagtggtatgatctgcagggcctgggc

SEQ ID NO: 21332 - DNA, 13906 bp, Oryza sativa
atctgtgaggtatgcttggatctcagagatccaagcaatcaatctaagggagcttggagcgctcccttcgggtcccgaggcctggactccgacggggctcgggggccggtcaggcgcatccgtctcccctaagaggtcgggtcgcgccgacggctgggtaagcctttcttcaaaggcgcccggtggggtctgggctcgcgagaacgcgagccgtgagagttcgtcggcaaccatgttatcccgtctgggtacatgccgaagctctatcccgtcaaaatggcgctccatacgccgcacttggcgtacgtaagcgtccatctgtgggtcagagcaccggtactccttacagacctggttaacgaccagctgggagtcgcctaacaccaagaggcggcggatccccagtccagctgccactctgagtccggcaaggagtccctcgtactctgccatattattagtcgctcgaaagtcgagacggaccaagtatctgaggacgtctccgttcggagaggtcaacgtgacccccgcaccggcgccctggagagacagagaaccgtcgaactgcatcacccagtgggcggtgtgaggcagctgagaggggtccgtgctggcctcggggattgagacggtctctggagccggggtccactctgccacaaaatcggcgagggcctggctcttgatagcgtggcgtggttcaaagtgcagatcgaactcagaaagctcgattgcccattttaccactcgtcctgtaccctctcgattatgcaagatttgaccgagggggtaagacgtaaccacagtgacccgatgcgcctggaaataatggcgcagtttcctcgaggccatcagaatagcgtaaagcatcttctgggcctgggggtatcgggtcttggcgtcccggagggcctcactaacaaagtagacaggccgctgcacctttcggcggggccgatcctcttcgctaggggccgcatccccggggcgttcttcgtccaagtggcctctcggggcgcactcgtcttctgtgccgatgacctcggggtcggaggatgacaggagcggccttcccacagtggcctcggggccgtcctgggggtcgggggctcctggcgtcgtcggacaagcaggcaaagggcctactccggtcgtcaggggcctcaggcctccgttcggctcgggggcctcttctccctgctttctcccgggtcgagtcagcacagggttagcctcggggccaaagggcgataggtgcggccttcccgcagtggcctcggggccttcctgaggttcgggggcacccagcaccgtctgacaagcgggcagagggccgactccggtcgtcaggggccttaggccaccgttcgactcgggggcttctcctccctgctcgctcccgggccaagtcagcacagggcgggggtgcgcgaaatgaggatggtcttcatcgcgctccacaaccaacgctgcactaactacttggggggtcgccgctaagtagagtagtaggggctcatttggccccggggcgactagaactgggggagagctgagatctgccttcaactgagtgagggcacgttcagcttcctccgtccaagtaaacggccccgagcgcttgaggagcttaaataagggtagcgccttctctcccagcctcgatatgaaacgacttagggcggcaatgcaaccggtgacgcattgcacatccctaagtttgctgggggggggcgcatccgctctatagctcgtatcttctcggggttggcctcgatgcctcgggcagagaccaagaacccgagaagtttgcccgcaggtacaccaaacacgcacttatcggggttcagttttatgcgggcggagcggagattttcaaaagtttccgctagatctgagagtaaagtctcttggttgcgcgtctttacaaccaagtcatcgacataagcctcaacattacgccctatttggctacccaaagaaattcgagtagtacgttgaaaagtaggacctgcattctttaacccgaagggcattgatgtataacaataggttcctacgggggtaatgaacgcagttttttcctcatcctccctagccatgcgaatctgatggtaaccagagtatgcatctagaaaacacaaaaggtcgcaccccgcggtggagtcgacaatctgatctatgcgaggcagggggtaagggtccttaggacatgccttgttaaggtcggtgtagtcgatgcacatccgaagcttgccgttcgcctttggaacgaccaccgggttcgccagccactccggatggatgacttcacggatgaatccggcctccagaagtctcgccacctcctcgcggatgaaggcttgacgttccggggcctgccgccgcactttctgccggaccggccttgcgcccggccgcacggcgagacggtgctcaatcacctccctggggaccccgggcatatccgccggtctccatgcgaagacgtcagcgtttgcccgcaggaaggagacgagcgcgtcttcctatttgccatccagaagaccaccgatccgtgtggtcttggatgggccgtcgcccagggcaacctccttgaccgggacctcggcgcatgtgacaatccgctgcctcggggcggtgggggcggaggtgccaagcctctcgtcaccaccctcgggcttggacgcagcagcgaggtggtccgcgcgctgctccatgcaagcgagcgcgactttcaggtcgccatggacagagatggggccaccggggcccggcatcttcatctggaggtaggcgtagtggaccgccgccatgaacttcaccaacgcgggcctccccaggaccgcgttgtagggcagactgaggtccgccacatcgaagttcacccgctccgtgcggaagttggctgatccaccaaaggtgaccggtaggtcgatgtgacccaacggccatgtgtgccccggcgtcacaccgataatcggttgggacggctggagcaccatccccggggccttgatggcatcaaaagccgcgggggaaaggatgttgagggccgctcccccatctatgaggacacgccccaacttcacgttgcagatggtgggggaaaccaccatcgcaatctgccctccccgggcgacgcacggtgggtggtcggtctggtcgaaagtgagggcaacctccgaccaccgcgcccggcacgtcgcctcatgagtaggggccgcggccagaagctctcgcttcatggccttgaggctccggcgagagacgtgagcacacgctcccccatcgacagtggcaatggtggccccaggttcttggaaacctaggtcatcatcaccgtcatcgatgtcaacagcgggggccttctgtttggcctcacttcgccgtttgccggagggagttgccggcgacttgccctcacggcgttccttcctcctgtcctcctcccacttcctcgttcgctcagccaagtttttgactgcgcgacagtccgcgagatcgtggagggaggtgttgtggacggagcaccacttgccggctgggcgctccctggtgggagtaccagcctctttctttttgtcgctcgcaggcctcccctttcgggtggcccgcggagcgccctcgacggcgaggacatgaccctcgtcgccggaatggaccgacctcttcttcctcctcctgtcacgccgccctgtctgagcggcggatccgggggcggccgaagctgccactccggaaccggaggggttccaggtccatgcttcctccttacgagccactcggtctgcgagctgaaaaagctccgcggtagtctggggctctttggaagcgattttttcgagcatgcggttgtgccgcacaccccccctgaacgcgtagatcaccgcgtgtgcagggatgcatggtatggtattgcggacttggcaaaaccgctgaatgtacgagcgaagtgactcatcatcccctcgctgtaccgcgtgcaagtccgcttcttcgcctgggcgcggataagtgccttgaaagttcatagtgaactgttggcataaatcctcccaagagtggaccgacgcaggtggcaggttcattagccaaccccgcgcctgtcccttcagggccatgggaaagaaattcgccatgaccctgtcgtcacccccagcggcctcaatcccggtcgtatagacctggagaaactcggtggggttgacactcccatcatacttctcggtgatggtgggccggaaccttgggggccaacggacattccgaagactcgccacaaaggctctacagccgacaccaccagccgggggcacggagggctggtcctcacgtccatgtcgaggtgacactctggacgaagaggcgccctccgttgcgcggggagtacgccggctattacgccggcgctcgatgtcgaggcgggcatccggctctccatgctgatcctcccgagtcggaggtgccgacgagggagtggcagccgaatggcgtgcaacagccgccgctcgccgcgccctccggcttgacgacacggagccggtagtgacggcgccggaggtcttggtggtggaggaccgtccaccagcacccaggcgatgctgggctgtcatgaccaagttggccacgtcgtccagccatcgttgagctggagactccgggtcagggacgacgggcgggtgacgtaggagcgcgccagcagcctgaagcgcgccctgaggcgtgctgccgtcgccgtagacgaggaggcgacgctccccatctcgccgttctcctgcatcacccgcgaccggtgatgctgcggatttatcaaccctctcgagcgcctccccctgcttaggactttggtgtggaggaggtgggggagtacgagctcgacggcgtgggtttggctccccgtcgtcgccgctcacactcggagagaggtcgtgcgcctttgctcgctcggccattaggctgaacaaggaaaacttggcgcacacggaggagtacgagagctcagaaaacacacgctgagccccctacctggcgcgccagatgacggagctcgtggctcctcaccgggagaccgcacaggcccccctttgccggttcggccgggggcttggggtgaaatctcaagctctctcggtatgtggaaagaacgccagctaggaagaaacgcgagacacgggcgatgtatacaggtttgggccgctgggaagcgtaataccctactcctgtgtttcggtggatttgtgtatgaacaagtaacaaagtgtcaaccagcccccaatcgctctgggatcggatctggagaaggccttgtgtccaaaagtcctccctctatctaagtgggcaatgtcctccttttatatctcaaggggataccacatgcccctctccttctccaaactggactgttcttctcttcataaatggacggagatcggtacggctgctgtccgagtgcccttctgacgggacggcccatacctacccccacttccgccggaaacaggtgcgacgtgggattatggctgtctgttgatgacgcgaccagtgtcagaccggtcacagatcagtcatccttgtccaccacgtgtcagcttagcaacgtgcatgtttgcccttcttcatgtagcatcttgcctgtaatggttgggatgaagcctggtataaatttaaccagggctaacgggccatctctaagagattacacgctagctccggcttgagacgagtgcctagaggctttcgtcttgaccggatggggcaaggcgtgcgtcaaaccgccagtcgccacctaacccgtgatctgaccggtctgtgactggtcacagaccggataaaggaacgcgctgcactacgctgcatgcagcgtgacacgttcgaccagaccgcaataaatgtggttaggtgaggcttaccgtgttcacccaacccattcatgtggcgctaactccacaaggggtcggggcgcctcggccctcggggccggggcaggagtcacccgaccccccctcggggaaatcaggaggagggcggacacctcaccctcgggcccgacgtccccgaaggtgccaggccacgtgggcgattgtgtctgcctcaagcctctggtcacgatactcccggtcccatatcaccgacagataggatatcctgtaacatgttacaatcattatttttgcgctaagcatatttgcatggcaaaaatttccatatcattgtttcttgtaaaatgcaaagcacctagataacaactcgtgtgatggtaactataaaaccagatccaaagggcaaagaatggtaattatacgtggtgttaagtgaaaacatgagcctagctctaacccaatgtaaaattttggtcaataaatatggtccaaagtgaaatttactctaaataatatcttgcatgacaaagtcataaataatatttataataatttatttttagatatgacataaaaataatatatatataaactatttatttagcacataaataggttttatcttataaaaaatgtcgtactactataacaaaatatgctttatatacattatttaatgataaaaaatattaattttttgttatatctaaaaataaattttgtcatagataaaaattattttgttttgccttcgcggaggtgaaactaaaatattattcttgctaaataatatctcacaaaataaactcataaatatgatagtcacatacaatatatttatacactccattaatatacttcataaatttatattttcttgataccaaagggcaaaatggactttatgatagaaactcaacggtcaactaatggtattaacggaaagggtatagaagggatccaaactgaaatttaggggtatggaagggaatgagcaaatctcaggggcacaaaagggattgggtgaactttcaggggtacacagcgagttttctcatctcttaaatatatatactcctccttaggttaccttcttcaagttccatgtattcagaaagaaataagaaataacagttctatatcgagagaaccatttgggcacatatgtataaatggataaatatggcgtgttttcactatgaataaatggataaatggataaatttagttgggttcatattgttgccatccatattttgtcttaaattggacacactcacgagtttatgcgtgtgagatgtatgtgcatcttctatgcaacaggaaatagaaacagcaaactaagagagagaaagatggggggaacacttacactgatgcatgcataaatatacatggatgcatgcaatataatgcagtggaagtgtgtgtgctttgtggcatgcaaggatgtaccaccatcaccatgcatgcacacactgcgctcagaggagaggagaggagagtactggcactgagatctttcatggcttgtcagggaggaagaagaaaacaacagcgagacgacaaaaagggggctctcctggcctgccctgcatgcgttggcgccggtgaccacgaaacagaattgcaggccggccattgcaacaattgcatactactactacatgcatagtatatgtcagaaaaacttcaattttctcgtggcagaagctagcagtccgtattaattagggttttaattcgctgcgaacatatatatcccgatcgatcgatcgatcgatggccagttatcctttcccgtaaactgttcatgcagtacgtacagactacacagactagtttacgttgcgtgcttatagcatcatatcctagcacagcaactgtatgtacatcagattctactagtgtagtataatgcatatatatataagcaagaatcattctctagtacttaaatcgaatatgcatgcttagaattagcactgtgttaacgccaaatatttgtcatttatatcattaagaagtatgcttaaatacaacatgcatgcttagaaccactgacgttgttatgttacattgataattaatttgcttattttttgcttgtagaacctactgcagaattacttattcctcataagactatggccctgcttagatttcaactttttttcttcaaactttcaactttttcgtcacatcgaactttcctacacacacaaacttccaacttttccatcacatcataccaatttcttcaaacttccaattttggcgtggaactaaacacagcctgtatggctcacctttgtggtccatcaaggtactacacctatgtactactgcatctgttttaacttggtgttttagacatttcacacaattttcagtgcacacatgttctatctttttttccctaatcatatatttgttcaaaagattaaaatatggaaatgtttaacatggtaaatctgcctagattgataaggttttatttatataacatgtttatatcattttattgtacctactcttatattttggggaggcatgaaattgctagctatagggaaaacgcttgcatgcatggaaacatatactccctcgtcccaaaatataacaacttctagcatttagattttgtcccaaaatataacaacaacttctccaccaacgtttttttctcaaccaatcacaaccctccaccatttaattttctcacatacctccacttctcctccaatcacaacactccctcatttaattataccaattttcttaataaccatgtccaattctaaaaatacttatattctaggatggaggaagtagctagctctaataattaagaccctatagctctgtacatagtacaatggtacagtttcggtcacatgtattttcgtgctggttgaagcttcattgaatccaagcttgcccagcgcattgaatggcaaccacgaaagaggtatgacacacatacttacatggagggaagaacttatattcatgcgtgttgtagctagggttcaggagcttggaaaggtttgtactaatgcaaatggggagaatattttcatatattttttcgtcagccacgtactagctacatccatgcatggggagaccatcgatggaggcatatatgcagctgcagctgcaggtccacacacttaatcaaggagcttgaatgggcttaaatgagaggaaatcaagggcgtgcaggagcaggagcagcagctagcactgtatatagtgtagtgtagctcgctagctatagtagcagcatgttgtactgctgctgctgtatggttttgcatatattgttggttggtttggggttcgtcagatgaggagatcagctatgtgcatccgagcttacagctaggtttcgccgggatgaatgtcggccgtgttcaccggtacccaaccctcctatttaatgcgtgaggatgtaaattgattaagatgtgagtcttctgaagcacttgtgatcatggctgatttcagcctctgcaggcatgcatatgggcttctgagcttgtctctcgctgtgctttatggcgttgagatctagtagtgatgagcctcgattctttttcacaatcgtcgacaatgctagatttcttgccaaagatttttttttcctcgaaagttttgatttgtacaccgttagatcgtgttgagatccttcatccttgcatgaagatgagaaaaaaagtcgtgttgagattcgtacaggaggaagagaaaaaaaaatcaaatgtaaggagattctgggattcaaactcccgatctcaagcactagcacaaatgttggtagccaaccatcatcccttgtaagttttttcttttgaccaattacatataagttacactataattatagtataattataatgtaattatactctaattatatcatagttatatataaaatatttttacctaaaaattatcaaatgttatgtagcttctcccttcacaatttggtcccttttcgaacttgtttcacaggtagatcctctgtaaaacttattgtgagaatggatccatatctcgatgcccaaggtcgttattggtaccgaagttgaatgtctcacagccagttggtttggtgctgagccctctgctgcatagaaacaacttcccccactactctctctctcctcctaatcatcttaaatcatgttgatttgctgtcaaatattagaaaattaatcatcactcggttacgctaatttgtttttatttataaaaagggtatctctaactgtcatttgatgtacttttttaccctccttttgtttttctgaatattagatatgttgatattcaacgtgtgggctggatcggtgggtcttaaaatgtgacactatatacatagtcattatttttatttgtttcattttatttgtgcaaatgattttgggatattggtccaaaatccgacatatttgccaccctattttttgtcgaattcttcttagctagtaccttgtatgataagggttcagttcctcactcccttctcctccaatcccctaaattatgcggactgtctatgtgattgcctgctgaaagattttgtttttcagcaggattttttgaccgtacgatggaacgcgtgttcgccatctagcgcctccaaccaaccatgcgcaagagagtgcatgtgttgtttttgtcattttcttcttccgtacgatacaaaagaaacccactaaaataaaccttgggtttctcaattacataaaaagcaaatgggctttcgggtttgtcacttaagcccagaaaaacaggagaaggaataagtctattttgcatccctcaactcttgctctttgttgaatcacatccttcaaccgtaaaaccggggataactcccctgccccccccccccaaacaaatatttgaaaaccggtgcgaattacctcctctggtggtttaggaggcggtgttgactgacatggcaaccttgatcccgttgactaactgtgtcagcttgtgggcttcacttgtcagagacttcttccatcctattttcatcctcacctttcccctctctctctctctcttctcttcccccgacgaccaatgtgctgccgtggtgactgtgtccatgcctgtgaggtcgtgactcttccaacactttcgatggacggcgccgtggcggctgatccaggggggcccgtgtgcagtagtgcatctgtcggtggtggagaccaccggcacagccggctctcaagccctaccactccatagcgtggcccttgtcgttgctatgctccacgtcactggcattggctcctccccctgcgatagctcttgaccccatatcatcgatattgtcaccgtcagtgtaccactgggtctgggcagagttcgaaattccaaaatgatatttccgaaaattcgggtctattggtggaccttgatagtaagtgactccggtcaaatatttcgggtaaaaaaatttaaaagaaattcactggataaccctatctcctcctcagtcaccacatctcccacccccatctcctcctcagtcaccgctcgacacatccagatccagaaactccgccaccagagtcgctgctcgacgcagccggcagcccaccgccacgctacacgcctgcacctgcatgccacccccagccctcgccttctgcacgccgccagtcgcccccatccaccatcacgttgcatgccaccgcatcagcgagcgggcggtagtgcgcctccttcccacgggcacttctccttccaggcgtcccctatggaacaagtggatggaagtggaattcctgcctctgttgggaggggaagaggaaggggtcatagcaccggagatgctctagtggcctcagcatttgggggtttggggaaggaggagaaggcagcagcatcggcacggggtatggaagaggaaagggagatggaagaggagcaggtggcattgggcgagcaacggcggcaacaaaggtgaacagaggtaaagataacatttgtggcttaatcccctatcctagttctggcattgtgcttgctagatttgctgttaaagttttatcaattttggtattagtaattttgtagttgatgttttctaattattttactgcaacaaggattgatattttgtagttgacatatacctggtaaatatttgtctaggtgagcggtgtgcttaattagacagacaaaggtgtgcttaatttagttagacatttgtctaggtgattattgatatgtgctttgataaattactgatttatattttgtagttgatgccctttaaatatttttctacaagctctatacattaattctctagttgaggtcccatttttttcttgggataataggaaatatcagttcaagccgtatttacgatgtttggagccatgggcaaagggttggggtgaatggttttaaatgtttatattgctcttttactggatctggtggagctgttactcggctcagggagcatttggctggaaaaagagggaatgtgaagccatgcttgactgtacctccacatgttcggaaagcaatgtgggctaactcatactaaggaaactataagggattttaaccaaatgcaaaaacaaagggttgaagcaaatattgttgaatctatatacataccttcagatgaagaggtgcaatttgagatggcatgtagactgtcgttgggggacggtactttcactcgtagtgttggtagtagtaggaagagttgtgcttggagtactcctagaatgcagaatagtagattctatcactcctcaaggaaagatgactttgacatagatttggcatgtagccaatcaccaagataactacgggtggacactataatgaataaggatgcaactataacacttgggaaggcttgggcaaaattttgtcatgccaatgatattcctggtagaaagcttaactgtctttactttaaagttgtgataaagttgactcaagagcatggtaagggggtgcgtccaccttctggcacacaagtagatggtgtttaccttcagtcgaactatgaggagttaattgagataatggatggattcaagactagttggaaggattatggaattacggtaatgtgtgattcatggacaggaccaaccatgatgagcattatcaacttcatgatatactctaatggtcaaatgtatttccataaatctatgaatgaaactggtaaattacaaaattcaaatttcttgtatgattgcattagagaggtggttgtcaatgatattggtgccgagaatgtagtgcagctagtaacagacaatggatccaactacaagaaggcttgcaagacgctgatacaagaacataaacacattgtatggcagccatgtgcaacgcatgccatcaacttaatgttaaaggacactgggagtttgtctccagttgaccaagtggtctctagtgccaaaaagatatccatgtttttctgtaaccataataggtgagcatttacaccaaatctttacagcttgcattcaaatcttgtatagaaagagcatctaaattgacttatagttatttcttcctctttgctacatgttattacttgaaaattgtattttaaatgctggtttggaaatcctagcatgattcacttcacctttttattgttttggcatgaccaatatatgtcaaaaattgagacagaatgtagacttctgattacctacaatacatctgacaatgtatagagcaaaccacagaacaacctaccatttgtagcattcactttatttatgcagaattgtgttggcaatctcccacaatcacatgccaaatgccacaatcacatgccatattgtaccactatgactaatctaatacattttattgtttttataggctccatgctgagatgccacaaggtttggtattgtatttatcttcttttaggacctaatggaacaattcaaaaagtggatgatgtcggaagagtggaccaacagcgaatattctattgcggaaga

SEQ ID NO: 21333 - DNA, 6124 bp, Oryza sativa
gataacgagtttgcttgacacgggtttcatgcgtgcaggtttgtaattttccattttgtttgcatgtatttcaattccaacctatgtgtaaattgttggtgctagctgaaagtttctacttgcaaatttacttagctggtggacttgattccgaggcccactacaaatacaagggttatttaattggcaaaccaagctacatatgcaaaagcagtatcaaaagcatttcagaagatggcgaaaactgaggtatatagagcaattggccagttcatgcagttctgcaacaaaaggggcatgttttcctctagagctgctgagattggatcatctagctagtacaatgcatgtacttcaaatctgaattatgcgtaaattgcatgaattccatactgttggtttgaaatatattaaaatattgtcagtttgtactattgcagctgattggtgggaaacttatggaggggactatctagaattgcagaagcttgccaaaagaattgtgtcccagtgaatgtcctatagtgggtgtgagagaaactggaatacgtttgcattggtccacacaaaagtgtgaaaccggcttggttatgaaaagttacataagttggtatttgtgcactacaatctgaagttgtgtctccaacagtttgagatggaagtgatacaaagggaaaaggaggttgatcctttagggatgatgatggatgtggctctttatgatgaagggaatccaatcatggaatggctttctaatgctagaagtgaatctgctccaatactcgatcaatatagttgttcatgaggtgttaatcgacatgtcaggtaccaggttccttgatgagcctaaccatgcatgtgccaatagaaggagagcaaataagaagaggaagaagaatgcaaaaacaacgtatatagatgaggaggatgttgctagtggtgatgtctgatgacacggacatcgactctgatggtacactaccaaactttgcatctagcctgtaggagcaaaaccgtcaggaaaattggttttaccgtcagaaaaaatattcttgtaggtgcaccgtcagaaattgccgacagaaaaattaccacagaaaaattcaattgttcagtcggtttcccgacagaataataatttctgacggccttttcctgtgggtggaacacaggaaaaaaactgagatgccgggtttgagagaacatagttctgacgagtgcaccgtcagaaaaattggctttccaaggcaaaaaaaaaaagagagagaatgctatgcacatgcacttcagattaatacacaagtaaattgatttggatattgcactcatgattagatccatacataattatttacagcaatcaaatattcatagtacaattgtgcacagatacatcaacttcagtgagatatacatatcaaagtttcaactttgtgtcaatcctgtttacaaacactaagaaaatagccacccagtggtaaaggaactgcaagtctccatctatgttacaatttataaagatacacttataaagattcatattttatctttcaagataaaattatccaccaaacattgtatgaaaattctgattgatcaacacctttcaatcagctgcaagcaaaaaggcaacaggtgttgaatgatgtgcaacaaaaataataacttgcaagatatgcactaagatgtggcacttaatctgtacctaagacttcgttgaaatttggcgttcttctgtagttttggaatggactctgcaagatggacaaattgaatatgcaaatcagctatacaaagaatcagtttaggtcatgcacattggttagttatatttagcaacacattcaggcagatcactttactgtaactgatgaagctttgtctcatgacatttaaatataaaccagggaagtttttttttagtagcaagggactctaatgtgggagtacctgttgtggtgccactgtattaggtcttcacaaaatggcttgagagaggaaaattagatggtcctgatataagttgaaacaagaaacaaattatttagatgtaaaatagacattatacactagactaatccaagaaaattaagtttctattatggactaagttacataatgtagactaatatgggaatcaacttttcttgcttaatatccgggaatcagggctgtctcaagggctctgaaaaaaaagagtaggtgaataaaatatcattctacttatacttttaattgatcaactaattcaaaaaagggcacctaaagtcatcagaacatctatgtgtttcgtaattggcacctaaaggtaaagtaattggcaacaatattagtagacagatggtttgctacccgaagcacaataatatattgcaagtcaattaccggtcttgaagtctaattgtctagactatccagatcaagacaaatatccagatcaactatacggtgatcatttactccaaattaagacaaatatccagatctactcttggtaatcacgtactgcaaatccttgcaaaataatccggagagcagacctaccagctgttggacgaggaggcttgctggggatggactgccgcagatccgctcacctcgaggctagacctggcgccgccggagacgggagcctccggatctggaacacccagcctcgggatggctggatccgtgaccatcgagaatggggcatatggatctgaagaccctgaacttgggttggctggcaccgccggggaagagatggctcatcgatggcacaaggcggcggcgtggtctccattcgtcaaagcaccggcgctggtgctggatctactcgcgagtggcgatggggactgcagaaggaggagaggggtggcggcggtggcttgagggattgggacgcgagggatgaaaaactaggttttcttatgtgggctgctggacttctatacgatggatttaggcccacctgtcagtggtaattttctgtgagtactagcacaaccgacagaactatagcgatgttctgtgggttggctgcgaaacgcacagaaaatatcacagcccacaggatagctctaaagtctggtagtggtagtcgtagtcctgaatatgtagagtcaggggatagcagctctgctagtgagaacatctctgatgatgaagatgataatgtggctgccaagaatagaacctctaacaatgcccaagcaaagaactccaaaggtgtattttatattagttcaacataattatattgtttatgtgtgctaatttagttctatactacgtatagcggtccatcctgctccgcgttcaaataggaggctgaagaatatcaacaccttaatagacaatgacaaaggtaatttcatgctactttctttcaaggaggtataaattccctattacttgcactgacaattccctactagtacatttttattactatggctatgaaatcatgtttcccctatactgtcatgtcaaaattacatattcagtatctctctttctctgtgtgtgtttttgtgttcatggctagctcaagctgcactgagatttcatttttttttacaagtactgttcatgtttgcaggtgaaggcaaagtgtcacactagactagcagcaagtcagaaactgcagcactgcagcttcaagatgctattaacattattaacaaagtatccatatttgtagtacttatgtgcctatattttatagtactggactattgatagaatctattatgctcctatatatattttgtagtactggactgtcgatggactgtatatgaatttctagactttattgtgtgttcaaggatattgtatgaactggtaatggactgttgatggacttatatatttttgggttggactgtattactggactgttgatgaactttatatgcatttctagacttcagtgttcaaggatattgtctgaactggtgatggactgttgatggactggtgatagacttgtatatttttgatctgaactttatatgcattgtatgaacagctattatgataattttggctgcgcgcgccgctcgtatgaactgctattgtgataattttacctaccgtgttcgtatgaactactattacaatgatacaatcttcctattttgtttttttttaatttcagaaatttcggccataattttaaaattagaattcaaaatttatttgaaaatttcgtccaaaatattctcaaaatttctgaaattttgggatttcggtgccccccaccccccaccaccaccacgaaaaaaaaggcaaaccgatagttgaaaccctaggtctgggtgctctcccgcacggggtgcctccacacaggggcgtgcctagtttatactacccggtgtcacaggacaccgagtagattattcaaatcctatataaattacactatattaattattatattagtcaataattagataattagtatgtattagacccccggtaacttttgttctgggttcgccactgcctccatagcatgctcgctggcacgctccgcggctatggtaggtggccgtcgatctacgacagccatgggggagacggtggcagttgggaggcgagaaggcggcaaccaccggcttgggccccagcctcctctccacctcgctaggcacatcgacgggagcttgggaggctgtggcggcacgagatgatgcgggagctcggctaggcagcactgccgccatggagcccaacgcggtttgaggcggatagctcccctcgcgcgcgacggtgtgggcatggcgagccacgcggagatgcgttggggttgccgcgacggatggagccgcatgctaccgaggccacccgcgggcggcaggcttgatggagaggaagcagaagcagccttttttgcctttgcagttgcgctttgaggtttggtattggtaggagcaggagcataagctagcaaccttgttggcttgttggccttgttccctttcctgcactactttttcaccgatcaacccttgaaggcttgcaccaagttatgcaggacttccacacaacaacagcatagtatcaacgatggcagtaagacggcagggactggatgtagggagggaaggatacggattacgaatagcttcatggagacaaagtgcaaagtcacagaacctcccgttgccaaataattggtggagcaaaatgtgaaatatttgttagcatctgcagttcataaatttataaacaatcccatggaagcaaatttaggagcatatgttgatcttaaaattcactgcaaatcctatgaatgaaaatatatagctactccctccgtcccaaaatataacaatttctagccattacaatttgtcccaaaatataacaacttctctaccaacgttctcttttcaaccaatcacaaccttccaccattcaattttcccacctacctccacttctcctacaatcacaacactcccctatttaatcataccatctttcttactagtcatgtggctctaaaaatatttatattctgagacggatggagtaaaatttagtaaatagggacataagtaaccgaatctgcaaaaatatagagcctagaggggcgctatgcataaaaaaagcctggcattccaacaaatcaacatgtcccgcatctgactcgcttgatggatttaggtttaatgcccattttgttttgcagaaaataaaaggccaccaacaccaacttatttgggtacgctttcttgggcttaaaaaaaggaggtttaaaatactggatttacttacaaaggcccaacgcaacacaccaaaaaaacaccatataggtgtgagtgaagcccaaaaacataactagcatgaaaggtacattatgaacagaaggaataagtttatctgaggtcccttaacttgtcaacgagtccgattttcgtgccttcaaccggaaaaccagatacaacgggtcccttaactatcaaaaccagtgcagatgaggtccctcggcggttttgagggtggttttggctgacgtggcgcctacgtggcaaatttgactggtcttcatctgatgtggcattgacgtggcgcatacgtggcaattcgatccggaaaaataataaacttcatgagacccacatgtcagtct

SEQ ID NO: 21334 - DNA, 4732 bp, Oryza sativa
agttgacatgtgggcccacgtgggccccaccattcttttattgatttatgtgtgagactgacatgtgggtcccacgaagtttattatttttccggatcaaattgtcacgtatgtgccacgtcagccaaaaccaccctcaaaaccgccgagggacctcatctgcattggttttgatagttgagggacccattgtatctgattttctggttgaaggacaaaaatcggattcgttgataagttaagggacatcagatgaacttatattcctgaacagaacataaacaaaagtagcagacataaatttctcacattggtgcatttaaaattggggtaggtgggggcgagattgctcgtgcgagacgcccccgaatttaccgttttcggcccaggtgatgccggcctgcgagatcaattcagcctgttactcaatttgatccactcgttttcagactttccttttttaaaatttgcaatgggcttcattatttatcacaccgaatcgagcatttttcttactcatgtgtatgaagtttgtaaaaagtctctcctaaaccaaagtttgtatacgtatatatgttttatacatcaaaaatatatgcgtatatataaaatttatatatacggtatatatatacgtatgtatatactttctatacatgtgtataaactttatatatatgtatataaagtttatatgtatgtatacatacgtatatacgtaacagatgaaactaaaggggggagttggtcgcgcgcggatcagcgtcctccagctggtgggggtgtggtgaatcggggtaacagccatgcttagccgttgcaggacaattttgacatcggagtttttaagtagacgagttttgtgctataaattgtttctgcataatacaaagaatgtttcaagggaagggtatggaaaaagagttgaagtttagcattctagtttttcttttttgtgttttctgctcaattatgagttatgggcaaggtggtcaaatatatcgattttttcatacgattttaagattttactaattaacatgtctaattctatagaagcaatcctacttagagcttccaattccaagtcagcatcgcgattttatttaactaccttggtatgcactatcagaaacttacttatgacgggataaaacaaaaacacgtcaggaaaattgtttgtaacgtgtcaacgtcaggaaaatcctcgtcaagaaaattctatttttctgacgttagtacaggctcgtcaggaaaattagatttttcacgataggagccattatacatgtcagtaaaataattagacgtcaggcctagtccggtttctggtagtgatggagtatccatctatctatctatttatctatgaccattaaactttctataaacgctctcaagtcaccacgtggcattcctgcaaacgcttctaagccaccacatggcacggtctaatctcacagttgattttcacttaaattggtggattcatcattttacaccatcaaattgaatctattattaaaaaataataacttcctgtatacggtacaaaacgatctaccgttgtacgtaattcgtgtcgttaatttgggtgttaatgaatcaagttgcatatatacaacgttttgtacggtaaccaaatcaagcatattactcaaacttttttcttgcgaacaaaaaaatgagttcactggtacatgttttttctcgaagtgcaccggtacatgtttgggctgaattacagagttttctatcttctatctaatttatttatttattgtatactaaaagtccattaaactttctagaatcgctcttaaaccggcatgtggcgttcctacaaatactactagaccgccacatggcactgtttaatctcaccatcgattttcacttaaattagtggtcccaatactttttatctttagattagatgaattattttaaaaaagtaataattttcttatgtatattgtgggccggaaaaaataaaccaaacataagtacttcgtgtacgtacttacgtaactggaaaagaatcaacgaaacatacctactgtcacggaagaaaagaaaacctgcatacgtacttgcaataaaaccaataaaaccgataaagtaaaaaaacatacataacatatgtacgtagtgccatttaaaaaaaatcgatgatgattttctactatttaaaaataaaataaaatactctaaaaacttacgcaaatatacatagttaataaactaaatcttctacaataaaaaaataagttgtcctatctttgatatattttaaaattatatatctaatttgtgatccagtcacatgaggtcaacatataataaataatattatgataatattttaaagaaaaaaaatgatgaattataccttgaactattatgctcgattgaattatctccataaacccaaaagtcaaacatctttcatcttcaactattattaatattagacaaattacccgctgactcaacccaagttggttttggtcctacgtgacagtccagttaacattttcttcgaaaacaaattggtgagacccacctatcatatatgtccctcacccctcaccccactctctttcttctccctccacgtctgtcaatcggcaaggctaggggcggtgatcggcggggcaaaggagctcgagtggcaagtggcagaggtggctcctcctcggcatctaccggcgcgtgcctccttgatggccgtgtggcttcccctctacctccatcggcgcgtgaaaaggacaatagcggtggggcgaaggagctcgagaggcagaggtggctgagggcgttgagtggcgaaggcttctcctcctcggctctctcggccaccacatgctcacttcgacggaggccattatctccatcccttccaacacatctcatcatcgtgtgacggccgctggaggcgaggacctgtgctggtcctccatggccaggttcggctatcaccctgccatcgagaactcccccaacaaatgcagtcatggctccatctacaacaacatgccatcccaccacggttcttaatcgatccccaccaccaatgcctctctcctgacgagacagaaagcaccaatcaagaacaacgaggtggatcaatcaagagagcaagagcaatggacagacgaaggagaaggagaacagcagcggggcggcggcgcgcctgcccggccgccccctgcagcaaggggagggataagagagagaggctagggaatgggattaaggaaatgagggagagagaggggagaggggagagagatagagagggtagagagtgtgactggtaggtcccacgtattttattttctaaaaaatgcttactggactgttatgtaggaacataaccacgctccgggttgagttagggggtaattcttttggtactaatagttaagggtgaaagatgtctggtttttgggtttacaggggtaattcgtactttttctgattttaacaaaatttacatcatatttcagatgtcaaatatcacttgacgactatacaatgctaatttaaatctacatatgtaaaataaatgaaaacaatacaatttagttgtgtattttttaagtggatctgatttgattttaatttgttagagattaagattctcaattttttttaatctttagaattatttcattagtatctgataagtgggcaacttaaatgttacatccatgtaaaaaaattatgaaaaaaaaatccaagccaattattcttgctataatacaaccacttaaaccatcatgagatttatggtcatatgtatgtttttctctgtgtgaaatagttttgataacaaataaacaaacaagtaacatatgcaataaactatttatgatatattttcttatacttgaagagttccaacttatcaggcataatttgatggacgtatgccatacaccctattgatgtgactataaagtatacttcaataaattagttattcaataaattagttattgtaaataagtttggaaaaatagattcattctccaaattaattagtaaaggtgtctcatctgattatgaataataggcattggaaaaaaactcaaaattatagatatttgtcaaaatataaccaataatatggtgctttggaaattacggtggtagtatttaaaaaaacctttatccgggttaaaaaatcatatatagtagacatagatatgaaacaactccagcattccataatcatgacacatgttttcataaattcaaggttgtacggtttgaagtaatatgtccaaattagatattaacgaaaacatgtttaaaatagagtcaagatctattttataaatatcatatacacgtaaacattcgtaacaaaaattcaagcaacattaaataagtgtccgcgcatacgcgcaagctattttcctagttggagtataataagtgtttcttttcacaacctttccttgtgtatagccatatttgcacatttatatagataccagattttaattcattattataaaagaaaaagattgatcgattaatctgggtgtacgtggagcacacacctaattaatactctgcactaatattttgaaatggtcaaaccactcaagtcacttaagtgcttactgcacttgataagaaagcatttatacctaaattaacaaatcatcaatatacatcattgtcaaaaaaattatcatcaaatgtcatgtgaataaat

SEQ ID NO: 21335 - DNA, 1379 bp, Oryza sativa
cgcgcggttcatgttgcctccaccacccacttgtaaagctcaattataagctaagctctctcctccttatcctcttttggcgggaaagagagaaaaagggaaagctataaagagagatcgatcggttcgatggcgagagacgtcgtcgaggccgcggcggcagcggatggtcgtcatcatcacaaggcggttgttgcggcggacggcggcggcggcggcggcgcggggacggcggcgctggtgtgggactgcggcagcgcgctctacgactcgtacgagctcacctccttccgccgccagctcgacgccgccgtgctctcctgcggcggcaggtcgctgtccatgccgcacctgctgtcgtcgtcgtcgacgcagcagcagcagatgccggcggggcggaagaagaaggaggaggcggcggctgccggcgatgctccggaggctgttcgggaaggtgctgctccggctgaggttccccgtggcgtcgagggcggcgaggggtggctggtacgactacggcgcccacggcgacggccgcccggggtcgccgtggtccggcgcgctgacgtcgatcccggaggagagcgccagcccggagaacgggccgtcgtcgtccccgctggtcgacgacgacgggccgagcgcgctccgcaaggcgcagtcggagcgcttcgtcggcagcaagacggcatcgtccatggtgcagttcgatgtcgtcttgtagccgacgctgctctagctagtctctgcacgacacactacttacgctgtactatatagtactgttcatgtcacacctgtaaattaaattagcacgaagtaaaaattagtatcaaaatcagtcgctgatttagttgttatggaaagtagctgcaggcttgagggtcttcaagcagtgcaaacaatgggggattattgagacattgtttgttgtggtttgaacaattggatacaggaatacaggtgtggaattttgggagaggttcaaaattctgggtggaaaatttctgatttcttttatgtcggtcaagaagattttcgggacaactgtaatttgccaagtttccatgcgtgaatgatatatctgcaaaatattattgccttcatatatatgaatactatccatgacatgtataaaaacaataaaattataatatatgtaattagtactaggagcttcccaagacaaacgaaattttggaatatgttgttaggtttaaaaatttgcttgaaattttcattcaaaagttttggaatttggttatcctcttctgcacctaccacccagccccccaaaaaatggtagtctagggtgcatgatgtgaaaatatgaaggcgatggagatagagacggcacaggccaaatgggtcacaaaatg

SEQ ID NO: 21336 - DNA, 700 bp, Oryza sativa
ttcctcacccccaactatgcaaaccggacgaattacccctctcgacacaatccgcggtggttttggtctacgtggcgtacgcgtggcagtccggtcagcattctattcattaaaaaaaatgtgggacccactctcttctctctcttactctcactctcactctatgtcatctctctctcacgcgcacagcggcgaggacgaggggccggaggcggaccggagtatcgtactttttcctcttttttttgtttacgagcagttggtttgatagccagaccggagtatcaattcatcatttcattgttgaatcgggccgttcaattcctctattggaattagaaggatgatctgggctattttgattataggaattctataagaaattataggatttcaattttcataggatttattccatctcttccaaaataaatcaaaatttttatataagaatctagagggagagattaagtaccacacttgaaatagcggaacaggggacagaaaatagaaaatcgaaggaatacttccatggatctaccaacatactccatccatccataagagttagacttatttcatattttagtgtttccaaataaattatttctagtctctatacatccatgacataaattgaggggtaaattaaatgttagattagaacccgaacccgaggagctatattaatacttattgg

SEQ ID NO: 21337 - DNA, 705 bp, Oryza sativa
ctttctttcagatgctagattaatcagttacaagtaaactaactaactttacttggccttgtttatgcagagggaggccacctgttgctttccaatttttctgctgggtcacgcatgaatagccaagacaataatcttaaaaatttctttcagacaaatgggcatgtggtttttcaaagagtggagaacaactgtagcctaagatattttacggaaaatgagatacggcaaatcacccgtggttatagcattttactgggaaaaaggttcattcggtaaagtctacaaaggaatgctggatggtcgatgccctgttgctgtgaagcgatacatacatggaacccggaaagaggagtttgccaaggaggtgatagtacattctcaaataaatcacaagaatgttgttcgacttttgggctgctgcacggaggaaaatgctctaatgatcgttatggagtttatctgtaatgggaacctgaatgatatccttcattgcagcaacacaaatggacgtgttcctttctctttgggcaaacgtttagacattgccattgaggttgctgaagtgctctggtgcatgcattcaatgtataatcccgttctccatggtgacatcaaacctgctaatatacttgtggatgaaaatctttcaccaaagctatctgattttggaatagcaagattgctttgtgctaatggggctca

SEQ ID NO: 21338 - DNA, 616 bp, Oryza sativa
tgcatgtgttgtgccaatgactccattgtacagccgttcacagaactcttccctaaatttcatgctgtagttttttgtcataagcttaatttcctcttgtttaaagatttttagattgccaaattgctgtgctgatgacttcacattctttgaaggaattgagttgcttggtgcacttatgttctgctgaatcagatttccctcttcttcctctagagctttcctaatcattcttagactagttgctacttcaaccatttcaggacgcacttcaacctccctcctcaagcatttaactgctaacttgccaatatcttcgaggaagttcatgttttttgtattgttgatgtcctcgtcaaacaaatgcatcaccttcttcccttgttcaacagcctcagtgaaacgctgagcaagggtgatggtcccatccactgctttttttctggtgatgatttccagcaaaaccactccaaagctgtaaacatcactctttggggttagaattccattcatgcagaatgcaggatcaacataacctatagatcccatgatattggtagtatgttgagccccattagcacaaagcaatcttgctattccaaaataagatagcttt

SEQ ID NO: 21339 - DNA, 601 bp, Oryza sativa
ctataggcgaattcgagctcggtacccggtggctaacaaacgaggcaaattatcataagaagcttcaaatgtgccatacctcatctcaatgatcttttgtttggctctccaggcctttgcatagcttatggtgtacttgaatttgttctcgatgtgcctaataattgattttggttcaaagccaatgttaccaacaacactgctgtacatctcacttgccacaaaagctgaagtgatgtttcggtgatacttctccaccccttgtaagtagcacttgtgctcggtcacaatgctaactttccaataatcattccatttacccttatatgcatggacacgccacggacaatcttccttcatgcacctcacttcatacacataatttgttgacttgaccaccctaaactctctctgcaaggaaactgcccaatgcttcaccgcctccttcatctcatccttatgagcataccttgcaccctcaattacctcgttctccttatactcccagggtacatgatcaccctctgatataacaagtccagagaagtcctcatttgcccaatcagtggccattatatcaccttcctcatcggatgatgcg

SEQ ID NO: 21340 - DNA, 6780 bp, Oryza sativa
tgagtagcatctatatttatcactgatgctaggtagttgtgatactatacagaactttgcttgttcgaattctgaaaatgctccaacacaaatatttccattctaaggaagaaatgaatgagcgtatggttggattggaaactgtaacctgaactctacatatatacaacacagctaattttgtagtactcaaaaaagctagcaatatgctaaagtgggtgagaatacttgttgtttctatactggctttacctcaatgcaaaatagaatgtagtggtcggagaagctttctgggatggttcagcatggtagagaagtgtcacttttatcctgccatcactccttggtggactattgaaagtcacctatgccaaggaggaagaaatttggtgtggggtcccaaaactaatgattcggaaaccgacatgtttagactgtatcaagccctggatcagtagattgatacatgttcaacgatctggatcttcattgcatacatttgatcaaggtttcaaaggagataatattacaaaatataagggtatttacaagcttgtggctaactattacagcagaagctatatgatgactcaactctagtgttttgctatagacttaaaccatctatctaatctatacttgagaactaagttaaaatgagattaacttatatgattgaactcccggcttcagtaagaacatcaaacggactgaaaaaaatgtggggttgaagcaagggtgagtacaacgtactcagcaagctattatattaatcaacaatgaatgcatgaaataataatattcgagtagggttagatttacttgcagaaagcagagaatatagaaggaaagtctataatgttttaaatgcaacagtatttaataaagtttgaaattatgtttctaaccaagatgacattgtgagtcccaatgcccgataaccgcaagcatggctattcaaatagttttaataatattcatactgcagtagatatacgctttacccgcaatccatgacgtgccaaacacattagccttgtcatggcaaagcttttcggtcactaacatcaatggtacctgttccatgaactctagtccccacacgctctgaacgtaacgttatcagcagcgagaggagttctggtgttcccggggtttttagagagaactggttgagagaccctcgtcatctcaatcaggttttcataattcacacacacagctcacgagataattaagatatttacctgcgcctcggtaaatatcacaatcgccctgctcggcgtaagtttgcctcctgtgcgaggacttaagaagaaccactatacagaggtaccgcctttgctagataacttaatcagctaggtctatgcccatacgagaattgcggtcgtactcgtatgttcttcacatgtacttggtagtcttatgtcggttggaacagtactagccacccggaaatcaaccatttctaccgtactgtcccaatctaagtttattatattttatgcataatctaactaggcatggctaagcaaaatctagcatatatctggtttgctatatattcaggttatgcatttaaaatcatgtatggctaatgcagaagatactggagatatagaatataggattattatgctcaaaggagagaaataataacttgccttgctccaacgcaaataaatccgaaataggcaacctgattatttgatgcttgaaataccataggttgctatccatataaaatagactctactgaagaagaggaagatccaaattcaataaaagccataaaatagcaagaaagagataaacagttaggaggactagggtttaggttatctcttttatgcaggtatatggattactgggctgatattttatgtgcaggttctaaagggttgggggctaaggtggataggagattaagcaacaattgtcgcttatatttcttgtgtgggttttggtttcttggagagtaggagatataccgaataatctaactggttaagtggatatgtggctagtattggtcgaggttgggctttggtagaagaatggctaggatttagttgttctcgagtcgatgctgaaataggatagcatatcggctcgtaattcatgcataggctatgggtagtaggcaggtaaatggttgtgattatagctggtggggagtctagaaaataagttgactaaggtttcagttgtctaagccgatatcgaggtaagataaatatcgactagggtttgggtgttcgctagtcgtcgctaaagcatgacgactaggtttggtatcttctctagccggtgtcgatagacaatataacggctagagggatgggaggtttgtgcaggtttagcgaggcggaagtgttactccaacaaccatgagtggcgggggagcggctaggatcacacagagctcaagagctaactgtgcgaggtcgagggaatagtgaagctccgaccgttgtacgcatcaaggcgtggggtgccaggagcagcacttcgaccttgggtttggttttgccgggctttacaaccaacggttcgacgtcggggccaatagaccgcaaacgtccccatggaaggcgtaaagttccaaccggcggctttttagtggctaaagggtatttggggtaaaagaaaatatttgaaaaaggcaaatataaattcaattgatatttgaataaattcaaataaaattataaaataacaaattaggcatcaaaatgaagcatttgaatttagatgaatttaggtctaggtttcactgagatcggatctacggtttaggatatataggcttctaaagattggaatttgaattaaatagagtaaattgcgaaagtatactgttcatgggcccacctgtcagggattcctttttctttttctttttctcctcttcttcttcttcttcttcttcttcccgtctctttcttctttttctcctcggtcgaacagagaggaggaggagagggggcgccgggctccggtggcgaggaggcggtgacgccggcggccagtggtgttcccgactgcaacgcacctagggatggcagtggccggcaaagggagtaagggaaatagccggaacggcggatggaaggtcgtgaaccgggaggagagagagagctccggtgaggtttgattcagaggtggaggaagaggggaaaggggaaaaatggattcctctcatcgaggcaagctcgatggcgcgagggattggccggtattgctccggtgagggagatcggccgacgacagtgatagccggccatggcaaggagagagaaaagagaggagggcttcaagctcggtttgtgggggataaacagagggggttcatcctcttatataggcgatgagaggcggttcgaagaggagtaagacaagggagaatcggcgacggcgatggcgtggaaagaaggatgacggcgccgacttgattccttagcggcgacggttgcggcggcgtgcgccgtgcacggcacgcgcactgggaggagggaggcggctgggttgtgggccgaactgggccggctcggcttagctgggccggcagcccaagaggaaagaggaaaatagaaagaaaaaggattgggccaaaaggaagaaagaacggagtttcggctcgatgacaaaaagaaagaagtctaatttgtatacttgatttggataacgttgttttgcgaagaatttgaattaggagagaattcagaaaaggagattttctaatttatttgagtgcaatatttagaggtggagtttgagggaatttatttggaagcactcaaataggaaagtaaattaatagtattcctcaaaatatttttgggaatgtggtaggaaaataggtggaggcaaaaggataggatttgaatcctaaaatatatggcatgggtttcaaggaattgtttgaggctaaaaggaaatttaggtgacaaggatataatttattttcttagcacaacagcaattattcacaatatttgtaataatatttttcttgtgccgagaaggaaatcaagccacaggaattaaattagcggctagatcaaaaggaagaatttagatatttggcgataaataagaataggtttggaatcaaaggataggtttaaaatcaaaggatgggtcgacaattaaatccaattggaattgtttggtttaggttctaggacaatagtggagaatttcttggaccataattcataaaaatagaaaggggttttcaaactaaatttgaataaaagaaattttaatcaaaagaaggttttaaaccaaatcaagaaatacctcaatttaaccaaatatatatttttaaatgaaaaacacaaaagagattaaataacagagaggttttgtgcgagttagttctaggaggtccctctaattatattatcctaggtttaggaagttattaagatcataataatcggcatgatgcaggattagaaaatgacgcattttcaggatgttacatttgggggggggggggggggaattgcatatgtaccattgcaaaagaatgacttcgctagaatgtcattcttaaaacaggcttcggtaaaataccacgttcaacgaagacggcttcgccgaaatgccatcctggacgatattacccttggctccacttcttcctcctccatgagccggaggagctcaccggcgacgactatgtgccatggccaacactagctgtagcattggagaggagatgcagccacgacgtaaaccacgatggtcagcagccaattcattgaggacaagcagagccaattcgtccttctcaaccagcaagcaaacaagcagaacaagcagcctcaaacagtcacaggtcaaccacgacgccatcgacggctccgccgcctcgtcgtccatcacggcaatttttcgctgtcttccgcagtggctccaagtctgggtccccgcatcaccagctactaccgctcgccgccgtctcattgtcctccatcgtcaattgcagcgctgcccttccgtcgtggtcctcacccgccgctcatcctcacccgccagcaccagatctggtagcatgcctcgacggtgatggcagcggtggtcgttgtcatcgcgcgcgcccgcggctggcgagagcacgtggtgggcgtgcatgcacaacgcgactgcgcacggcctcgtctcctccgcttcccgagtccgaccttgccccgagccggagtcgcctcctcctcgcgcgcagcgcacggccggtgccaagcaggttttggaccgagggcggacggacgcgggcacggaacttgctccctccactagcatatgtacctgctgctgcaataggcgggtgccatggccgccggtgagctacaggaagatggaagaggtgccgaagggtggaagaagatgcccaagggcaaattagtccagtagggcattcgggcgaagccatcttcgttgaacgtggtattttaccgaagcctgttttaaggatggtattctagtgaatccattcttttgcaatggtacatatacaattttctcttgggggggggagggtgatgtacagctgacctggagacgggaaggccgggcagcaaatcatcaggtaacgatggcggctgcgatgaacctgtgccagtgacctacaacagtctaaatgcatatcatagacaaaaaggggcgcaagctagtgtatattatagccgaaccatcacctgatactggatatttgcaacataaacatttatttaatgaaagattaaaaaaccaattcaaggtaaaaccataaacatttattcaataaagattgaaagaaaacaattctttcaaggtaaacctgtgagaaaaaaaatgatttaacagggtcaagtctgattcattctaccctagcacaatatagttaaaatctagagacatctgtagacacttaagactcttttaatttgcattcagtgagacattatcaatggatcgtaggccctcctagctagtatgtcttactatacctctagctaagaggaagaaccaaattaaggtacacaagaatttaatatgcacctcatgcaaggtggtgtaaaaaaaaaaagtcccatggctttaacataggccaatgatagctaaaatttcagttctaaataggtcatgatgactttataattttatatgttgttttaaaaagtaattgattcttatggaggaaaaacagaactcacatatacatgtcacacttcatatgcaggggagggataccataagcttaaaaagcagtaataaaaaacagtagggcatttatattatgatcctaaaggctttgagatggatccacactatttatgtttctaagtgtacatcttatgcaggcaaaaaagaagcacaaatattaatctcaaagcagtctaaaaaggaaatttaccttggcaagcaaagagaatcattgcatacatttgaaaggtatcctaggcttgattaaatgcaggaaagccccaactgcaagcagggaaccacatgggggcgtccttgttggcactgcaaaagaagggttgccgattggaaggaaatctttggcaaaagagatgaggtaagggccagagaagaaattggaggtaccaggaagcgacgccgtgagcacggccttgccagcgtcgacctcattgtccaaacatccaaatagaagctacaatagttggcaacatagtattaaacatttacaataaaagagcatcgaaacctccaaatagaagatacaataattggcaagtgcaactacaaggcgatgcttttatattt

SEQ ID NO: 21341 - DNA, 7543 bp, Oryza sativa
ccctcgtacaacagttgcatcagcaaaaaagttgcatttgatacaaacccttgggcaatcatgccaccgtaggattatttgatacaggaactgcccggggctaaaataaggacataactaatggattaatctagaagaaacagtgtgaagaacaaatctcaaaccgttgactaatccataactacaaagtattatacaacatctccattaaaataggagcagcctccttggcaaacttgaagaccctgtccaccaacctcaactttaaagcagcgaaaactatgcgactccagctctgcaatgactttctccagaactaagttggatagcactgatattcatgttaaggaaacatcatgcatcactaaaagataggcataaatcccaacagaagaggagtcacatagcttagtgtcagtatgtggactctgtgacgaagctagaagtacaataaagatctaataagcattcttaaaccagaacaagggcattgaacgtagtaaaaatgcatatctaacaggactaaacatcaatgagtgaatatatatcagaagccagatatgaagaaattgagtatttaaattgtaaagaaatatgagaatctttagattgcaatatgtcatttatgttccgcttctctacactatgacatttcataacaatgtatactgatttgatccatagcaatttcagaatcattcttttgtagtcattattgtagttctgaaatttagcttgctaaattcagaaccactaaatgtccaaaaagaacaaaagttgttgaaagttgagttattagatataaaatcatatataggtggcgtggtattttcacaatagagaagtcatgaatgaaagtctgtaaaatgttaggcataaaaaggatactagttggtatcagggtcaaaacacaaccaccacctccagctcctgttaacttggagaccaagttgaatttcaatgttgtccgcagtacagtttctattgaagaatggctaacacccatgcactgaagcaaaccttggttcatctccatgagttccgccagcttttcctcctttgaggtgatagctatctcatcattagctgctaactcaacaatgcttgacacctcttcactaatggagttcactgcgttgaatacagaagccatagcatctgaatgcctggaggctctttcagagacaccagcaaccagagcctttgtgttcctaccaactcttgtatccgtaataagcattttcactgggttgctagatttaaggtttgtcaattcccctttcttgaatttgatcatgcttcctaacaatcaggaacagatttaattagtatatgcaaaaccaaggaaaacaaataacaagtaaagggaggtttagattcctggaaataactggaactagcacaacatgcatggctggtacctaaacttaacacggtaatgataatgaatctaaaataggatatgtcactttatttgatgactgtaacaatattatctgtatttgcatcatctcattcattcaactaagtgtcacttggatgtccaacagagccggcatctaaaagtactaaatcgaaagactttccatgaaaaagaggagagcataccgaaagtgctgacagcattgtcgatgccagaaggcttcccatggataatcttctccccctggaaagcccaccggttaactagctcaagatcatccttcccgaccaactcccaccccatgccctcgccgctgatgccgccgactgcagtaaccacgccggcagctgtcagcaacacccccgacatcgacacgcagaaggcggccgatgacccaagccccgaccccatgggcaggtccgagctcaccgtcaccttcccgggtctacacctacaatgtggcccaaagtcctccatacccattaggaggtttcatgattacgtcaaggattgctttcaggatagaggcagagcaagcgaaccaaccccaatatggaggtgtagaggaagaggaaggcagagagaccggcggagagccagatcttggcctcagggatctcgtgctcctccaagagcctggcaatggaggccagccggtccggggagcatggcctcgcctcccgtgcccccgccgcctcatctgtcagcagcacctcgcggaggcgcccgcacggccacgagaaggtgaggccaggatccttgaggtccagctccaacgtggcggccgcctcgtcgtcagcgaggggcatgaggcagagggagcagcgcgtgtagaggtcgatggcggcggcgacggcggctgagccatggacgacggcgtgctcgccggcaaggataatcttgcctggggcgcgggcggcgcaaacctccattagtgatctgacgaacccttcctgctctcatgtcgaatcgaattgatcaatgctaatgtatgctataagcttattaaattggaattcgatattaccgaagtttggtactccaagcaacaacccaaaggccgctgcttttaatcccctggatacagttcttctgactcactttgaaccctcgggttttatggcctgcacaatgcaaactacacggatgattatcgctatatatgctattggcaagtatcagccacaccacccataatgaaggctacactttcgtgtttttgtgcttcagcttttgaatatctgtgtcagtacttaaaagattgagatcacattatacatcagttgaatctatttatgaaatttaaacccctctacagagccagaaactgaaatatccaggggcctatatcatgaaacacaattaacagctgttccttcagtcaccagcctatccaagggcctatatcatcaaggatcaccccttcttctgtgatataataaaatgcatgttcttgaatatatatagtaccttcttatcacccttgattagtaaaaaaaaccattattgtgtttctgtttagtatatgcaccagaaagcatccataatacatagtggacagaagaagaatgtcaatttaatttctaggcagaaataagggataccaaaaaggaactcagagaaataaaactttgaggaaataatgcaaatgtgaagaatagcagtatataaatgataacatcaatttttaaccttttcgaaaagttcaaacactattcacagagtttttccaacatctcaattctcataattgcttgtggagtaggtaagggttttcaaaaagcaagcctggactcctggggcccctggactggttggttggttgcctacaatctgttacatcaaacagttcacactgcgataatctgaaaacgattatattctgggattgacatgtagggaaaaacattttgcgctaaataaactctgtgtgatgaacagaatgcaaatcctgaattacaatcttttggtgacagatagttaaggtttcttttttatgtggagaaaattgttgatggtgactatctgtatggtctatggggcaaataattgatgttgaaaaattctgaatgaatatgcatctatagcatggtttattgtttcaaactataattagtagtataagattgaaacaaataatatgcaaatagctgaagcgaacaaatcattcattctttatggatatgaaagagccaatcaatatatatgctatttcagctgcacaagtgtctagatttacaaagtttcatgttaaatgtccatcaaatgctgcattattatgtaaaaaaagactcttatgcatatgtttgcttccaagcaatttactttcagaataaatacaagctgtaaaaagttacccacgctggaagaaaaagaaccgagttcggtgtaataaatattgatatgaattcacgcgtcagggtcaggccactatatgtggtcgaattgtggcctctataccatcaccaaataaaatgcacatagctgaagcgacctaaaaatcacctgatagtgacgacaacgttggtgtggagactaactctgaaatgtgtgtgatctgcagcatattataggaaaagaaaaactacattaaagatcagtgggatctatttcttgaagctgaacccctctgcacaaacaaacaaatgtaaaacagaatgccgaaggtcaaacttgcgaaactcagagactgaaagccaattgaggacagcatacgattgctgaagttcagaaccagataaaaaatttgctcgcattcatttattcatatcagtgagtttgtggttgtcggttaggtgattgaggtagtcaacacacaatacagaccatggtgctgcttaaactgacagtattcaacattgcagtagttgataactctttcagcaagctagaatatatgccactgcaatttagttcaatttctgcacattgacagctccattttaaaacagatttgatcaggttgagttagcagcagattgtgaagcaagttctccacaaaataaaataacatatcatttcaccccacaaaaaaaaaaagcagaattcatatgaattcattagcgcagccaaatttaatagtgaagcttagggcattggtcccaagtccatattggagattaaagaaatgaagttgccgcgattgacatcgggcgagaggtatttgctgtcctctccaaccttcaatccaagattcatcaaatcagtcgaacttatcattgaaaaaagaaaaaaatccaatcacctgtcggcacggtcgcgatccactagtggcggcgacggggttaggcggaggccaccagtggagaaggcgagttgctttcgaggggaaggtggaggcgcgacggcggagcgcgcgcagctatgatggatcgaggcagcaggatgatggatcggcgcagcggcggtggaggtggggaagtgagggggccgcgacggcggggataggcggaagacggcgaggggcgggagggaggcggaggcggagggcggcgaggcgaggcgagaccgcaggatcggcggcagcggcggttgaggtgggggcagtgcgggagacggcggccggatcggcggaagtgggcgtcgattgtgcgagcgggaggggattggagtggccgttttgttttgtttgttttttttttactgtcgatgtgtcagttgagtgaaatttttgtgactgcacttcaattttttatcagcttctttttttttttatgcttacaatagattgttactagaacggaggagtactaataaacaaaaatctaaaacttttaaccttaaatttaagttgattttaaagttttttcatcgtagtttatttttcagatcgttaatagcacatatataaaagttttatttataaattattttttatttgtaaatatgcaatttggaataatccaagcgatggactccacagtcctctccacgccgctgcgcgtgaacacgtgcatctgcccctgcctccctggccttactgggttgaatcaatttctgcagtcagttttgtacagttctaaaaaaaaaaagggggcagttttgtagtattctcagatcagatcacgtgaagctgaacagagagggcttagccaggtcacaaaaataagaggaagcaatgttgaaattataagcacataataatttaatttattccataaataaatcatgacattgcagatgtaaactagattgaacgcatcattagatctacacatgtaaactaagcagtaaaacatgaacagatcaaatatgcgcaacatgtcgaacacgtaccgagatggcggaaagaccggttgctcgctaggaactactcgcggttgcgagcgtcgacgaaggcgcgaagcacgcgagcggagaggaagccgagccgtcacgaacgaacagggagcagtcgagcgaagcgcttcccaaaaaccttattgccgccttctcccggtgcaggacgtcgaaggcagaggttccggagacctgctctcccgatcgccggtgcatgccggcgagcgggatggagtagtctacgagcgacgcgcggtacagagtaggaggcaaaccctagattgatttcgcgtgtgatgtgtgaaggcggcggctcggtttatatagagataggtcgcctgatcagggcgcccgcgtaaaccgaaccggataagtcgcgcgtaacctatccggactccacgccgtttttcacgcaccggatttttcgaaatgtttccaaaacaaaacaaattcaaatttcccgcagcaaaacaaaactgcaaaaggaagctgcatctgcgcaagggtgaggagccaattttgcggaccattcgatgcgtacgtcgtgcacgtgcaccgcctgccctgccaggcgaggcgaggcgagcgagcgcgcgcgtgtgtttcccctcttttctccaccacacatgcttcaagtgactaggatggcatcctcccttttaaggaggtccccctctcgtaaaataagtaaggtgatactaaactccacatgcatgtcatcccatgaggtgggcttttgtgattttccaaagaattaatcttcgaatgggccttagcccatctattaattccaacaatcccccaccaaatctcaaaatcccactgagatttgccttttccaatgtactgtttatataccagcggttcgatggagaccgattaaggttgaacatccacctagatctccaagctacacttactcacaacttgaacaatggactacgccttgaattgtaagtcttgtgtaagcaagtttcactcagagtcttatctggtattagaccgtctatagactacccctcgggtggagcgtataagtcatactcctaggtcattagtaagcttcctagaagattcacccaaaatctccatagactgcgaccaacagtcaagcttacaaaagtgagttctttcaagaatgctctgcaggacaacatcttcgctaattaaagccaacagaactcattaaggcatagccaatctgccttgcagctcacgagagtacatgcatcttcacttagagagggtatagataagtactctcctctagtttactaatggtttgttcttcccaggttctaattcacgggatctccgatcacatagactgggttaccaccatagtataactcacatgggtctcaaacccatctccttcgatgcattatctatcatatttcgtgatagttccttcgtgaagggatctgccaggtttctagctgtttgcatgtaatccaacgttataactctggagtttctcaatttcctgacagacttcaatcatcttttcacatgtctagacaatttcatattatccttagaactattcactttgacaattaccgtttgattgtcacatttcataaggatagccggcaccggtttttcaacaataggcagatccattaatagatcacgcagccattctgcctcaacagtagcagtatttagtgccgtcagttttgcttccatggttgacctcgtcaaaatggtctgtttgcaagaccttcacgaaacagcaccaccacccagtgtgaagacatatccactagtggctttgatctcatccacatcagagatccagttagaatcactataaccctccaataccgcaggatacca

SEQ ID NO: 21342 - DNA, 2239 bp, Oryza sativa
ccattctgcctcaacagtaccagtatttagtgccgtcagttttgcttccatggttgacctcgtcaaaatggtctgtttgcaagaccttcacgaaacagcaccaccacccagtgtgaagacatatccactagtggctttgatctcatccacatcagagatccagttagaatcactataaccctccaataccgcaggataccaatatagtgaagccccaattccatagtacctttcagatagcgcattactcgctcaagcgcacgccagtgatcatctcccggattagaggtaaaccggctcaacttgctcacagcaaaggagatatcaagcctagttgcactagccaggtacatcagcgagccaatgatttgtgagtattccagttgattcctagcaattctcttgttcttgcgaagcaacaagctaggatcataaggtgttggagagggcttactatcaatgtagccaaaacgattcaaaatcttctccacataatgggactgcaagagtgtaattccattctcacctctaattagcttaatgtttaagataacatcaactactcccaaatccttcatatcaaaattttgagacaagaatgatttaacctcatttatcacctcaaggtttgtcccaaatatcagtacgtcatcaacatacaagcacagaataactccctcacccccaccatggcgatagtacacacatttatctgcctcattgactgcaaagcctgcagatgtcaatgttttgtcaaatttctcatgccattgcttaggagcttgtttcagaccatataaagacttcaacaatttgcacactttgccttcttgaccttcaactacaaacccattaggttgatccatatagatctcctcatccagctctccattaagaaaagctgtcttaacgtccatttgatgaacgagaagaccatgtgaggctgctagggaaagtagcacacgaattgtggtcaatccagcaataggtgagtaagtgtcaaagaaatcttcgccttctttctgagtatagcctttagcaacaagccgagccttgtactttttaatagtaccgtcaggcctaagcttctttttgaacacccacttgcaccccacaggtttacacccacagggtcgctctgtcacctcccaagtcccgttagtgataatggaatccatttcactacggacagcctccttccagtagtctgcatcaggagatgcatatgcttctgaaattgacttaggagtgtcatccatgaggtacacagtgaaatcatcaccaaaggacttagccgtcctttgtctcttactccttcgaggagcttcactgacatcctcgtcaatgacatgttcatgtgtatgttcagtttgttctggtggtgtattgaactgggaattacttcagagggttggctcgaactactatgtatatccttcattgggaaaaagctctcaaagaaggtagcatcacgagactccataattgtaccaatatgcatgttaggtacctcaaatttaactattaaaaatctataggcaatgctgtgatgagcatatcccagaaagacacaatccacagtcttaggtcccagtttgcgcttcttcgttattggtacattgactttcgccaagcacccccatgtgcgcaaatacgaaagtgatgttttctcccaatccatatctcatatggtgttttatccttatttctgttaggaactctgtttaacacatgattcgaggtcaacaatgcctccccccaccatgccttaggtagtcccgcggtgtccaacatggcattcaccaagtcagtcagtgtgcggttcttcctttcagcaatcccattagactcgggagaatagagagacgtcctctcatgtatgataccatgttcctcacagaataagtcaaactcgtttgagaaaaactctccaccacgatcagacctaagcctttttatctttctatcaagttgattttcaacttctgccttataaattttaaaatagtctagagcctcgtcttttgatttcaacaagtacacagagcaaaatctagtagcatcatcaatcaacgtcatgaaatatcgttttccacccttcgtaaacaccccattcatttcacaaagatctgaatgtaggagttctagtggtgccaagtttctctccttggcagccttgtgaggtttgcgaggttgcttcgattgcacacaactatggcacttagaacctttcacaatg

SEQ ID NO: 21343 - DNA, 607 bp, Oryza sativa
aaaaaaaattccacatgccgattccgattattatttgcatttattaactagggaattagctcttggttaattaagataatttcttcgggcaatttatttaaccaatttttaaagcaagcaaaggggggaaaacttcagggcgtgacaggacacttcctagccagatgaccaggttgcccacacacaaagcaagtcctctcatcctggttaggattgttgttgttcttcttctgcttcttgaagttggtggtctgttgagctttgtatttccccttgctcttgttctgggccttgtgcacaacattggcactagactgcccaccatcgcccttagacgcggcgtatttttcccgagttttctcctcaacatcaagagacgctatcaacccctcaacggagtattcctgtctcttgtgtttgagtgcagtaccgaaacttctccatgatggaggtagtttcgcaataatgcacccgtccacaaatttgtcgggtaagacacacttaaggagttcgagtttcttagccatggtttgtatctcatgagcctgttcgactacagaatgggtgtcagccatcttgtagtcatgaaactgctccatgatataca

SEQ ID NO: 21344 - DNA, 1175 bp, Oryza sativa
tatccgaatcttccctctccatttcatcaacaattataccgactctcttcccctcatccgccatgcccatagcctgctcctcccttggttgattttcctcattttgcatcgatggtccaacaacatcccctgcattgataggaccctctacatcttcggtttgcattgaaacatttatatctttctcttgtaccgacacaaatataacgaggggccatgaccgttcaaaagccatttccacataccgtctccaagcatcagtgctgtccatcggcattagttcccaaaaataaccttctgttgcacgactcactacaactgacactgacattgtgtagacttcttggtctattctaaatcctctcaacaaccaactataaattgactgaaatgttctctccgcaggcctatcgatgcccttagatgtcattacaaaatctgacagatcaacaccatctggaccaaatctaatatttccttcaccgtgaactatctgaaatgtgaccttacttgacattgtgcctgatgaaaacaataactgcgttaacctcgcatttctgtactacgccttaagttacattctctacaatattgttctctaaatttctaaaattacgttacattctccagatcaaactaaactacatcttacaattaacactactgtctatgtctcaattcatactattatattctatgctctggatctacacatatgtgctgtgtgctacagatgtgctaaaatatatggaactaaaactaaaacgcaacatatatactcaaacataacatattagtacaaatgcaaaagatgtatgggagcatacctgtgatgaattgagcgaaccagcagggcttcgccgctccccttctgctgccctcccctctctctctttcgttttttttggatttttagtgaatataatgaaatttcacagaggagggactgggctttatagggggagaggcaaaaatcgccctcccccagggcggcaagggggccccctgcaaaattccatgccccctcgccgcccatttgcaggccgccccccccacagtacaaaatcgccctagcggagggcggcaaggggggccgcctgcaaaatttcatgccccccctcgccgcccatttgcaggcggccccccgcacaatataaaatcgcccttaccgatgg

SEQ ID NO: 21345 - DNA, 6048 bp, Oryza sativa
ggaggccggcaagggggccgcctgcaaaattccatgccccccctcgccgcccatttgcaggcggccccccgcacagtataaaatcgccctagcgaagggcggcaagggggccgcctgcaaatttcgttgacggccgtcgcccgagagcgaacggccgtctgccaggtcattttcgccgccctctgaaagggcgattgggcggtaggcgactacttccgtcaattttcaaaatggaaaattatttttgtaaaacttttaataaaaaaaattataaataaaaaaaattccaaaggagaccatatgacccacaaaagaatttgggcttcaaatcaaacaaaaccaaatggcctgaaagcccagttcccaaaaacagcagcttaacaagcccaaatttgaaccaatggcatgtgggccaagctagtagatgccccacaaatcagtaatatggatccacccagtccatatcccctgatataccacgctgagctttatcatgcatgccggagcagatcactgttctgctcaacaaattacctgcacatgatctaaaggactgattgttccaggataggagcatccgacagtaatttcgttttgaagttatatatatataactgagattttgaggaattttatcagtgattttttgggattactagatttgtaacacagtttgcattgcgttgaatgttatgatactatttcattaggcaggtgggaaagtgcttttattcatcgacatccacttgttttctacatgttacctaaatatttattaatgttttttaaaaaaatgacaaaatagattaatatgaaatatatatctcttcacaagcatgtaattttaaatttaacttctacaagctgtaacaaaaattaaaaaaaaatacaactctgaatgtttgtgtactagttttagtttaatttattgttctgttacaacttctagaaatcaaatatgacctacacgtttgtggagtatatctcttattaatgaggaaaatttcttgtgtgcctccttaaatttcaaccaatcccttctatgtttacgagttttgctcactcctttttatactcctgaattttgatttggattctctccacaccatttccatctgccgactgtttaattcctataaaattatccatttttcctttagtcatggaagaaagtgatcatagagaatatcgttggagtctagtataacaaacttatgaatattatagtcacacaacaaagattttgacaaacttcttcattccttgcgtgcccaaggtaaatttgattttttatataaccactaaaggtcatgtaacgaaaattgtatagaagagatcaaaagcaaaattttggggtatacaaggaattgagaaaaactcaagtacgtagaagagattgacttaaactaaaatcttgttaatgctttttaacttttttatgactatttagatgatatgtaagaaatggtgagatgtctactcgagggataaaaatccatctccacacacagatcacatgttgttccaaaccaaattttgacaaattagttgaaacaggtaaataaaacgctgcagtgtcgtccttatggtaatatggtgcggcatttttctcgaagaagaatacagtacgcaaatttgaactctttgatatggatattcccgatgagtgtgacatgcgaaacgtaaatagcggattatttcctgcctatctttatttaaagattttcctgcctatctcgaaaaactctgtgttcggccctcctcccagcacgcaaaataaagctagtattattgcatgattaattaagtattaactatttttttgaaaaatgaatcaatatgattttttaaaataacatttatatagaaagtttttgcataaatcacaccgtttagcagtttgaaaagcatgcgcgcgaaaaacgagagaggtgggttgggaaaataggggaaagaacacagccttaatagtctttagtctatctacaaataaaattattttgtagcaattccatcacattaaatccaaagttccacttgttctaggcttctagcagcctttcaagctcacttttcatcatgcagttactacaagtttgctagaccaggatatgtgtccactacaagcttttttttgaaacctatgtccactacaagctgacaaaaacaagggttggcaagatgtcaacactatgtaacatgatgtcaacactgtgacacttcaaggtccaaaaagagagtacatggatgatctttttccttctcctagatcatgtttatgccctatatataaattctctccaaccatcttcttgtgttcatgactcttctcaatctaaccatatgcatcaacaatactagcctaatggagaagctggcagtaaccactgacattatctgaagaaattacttgccggttacagcaatgaagagaagctgaacccagaggagtggtactgagaacacaggtgccaatacaatgtatggtgagctactgtataatggagtaattctgtaactgtgttctcaggtcacccctttgggtttcttctcatgattctttgtccaatttgagatagtggtatacttgaatgattagattggtttatcttgattcatgagcaaggatatgtctatatactagggttagacatttcggaccgaaattcccctccgatacgatattattccggctgaatttctttaatttttcaaaattttcataaatttgggtaatatttattcaaattcaactaaattttgctcaaaatttcgaaatttcggaccgaaatttccaaaatttcgggatttcggtgacccccgatataaaagcacaaaccgataaagcaaaccctgctatatactatggaaacgtctagaggaagttccttttttttttcctcatgtattttctcttttgttccaagaattttttttttctgttcttcattccggtaagtgttgccgcaccaacattttatttacatgttttttcttgcagcaaatctgttttgtatggatattgctgtaattggaagaacaaataactgaaggtagtctgtagatgtttgtttggaaaagcgtttccctactcgatgggtgtatatcatctaagtagttagaaacaataacaatatagattgatttgtatcactccataaacattgcacattcaaattcgattgctataagttgaacaaagtatttgtatacaagttttaatttaattttttgtttttttataactggtttttacaacttatacaagtcgaatttcagcatgcatacttatggattgatatatctcatactaatctattttttgttacttttttatttatttataactatttaagttacaagcgatctatgagtaactgtgtcatccacgggctgttttcataattccagcatcatttgactgttcgttgtgaaatttatgtcaaaatctagtgaattttctatatgcttaacaaactaattccacggcaataacatacaacaaggttgttagaacagaaagatttacactctaataagtaataacatggccactgttcttccattcgtaagcagctttcatcagtttgaagccagctgctgccgttgcatcctcttcatcaccaaaaatgtaatcgaagaactcctcgcatcctcctcctccgccattgccgtcggcgaggagactcctcttcctcttcacccttctcggcgtcttcttctcgaccggctccacctctccgaggtcgccgaacgcggcctccttcgccagccattgttggagaagcatcgcccttgcctccttcatggcgggatcatcagcgcatcccctgaagtgttcgtccgctcttcggcatacggcgcggcacctccggacccgctcggccttctccgccgcgttcccggcgatggcggcgccgccggagcacgccgtggcctcgaactcggcgtagctcacccacacgttgaggtgttgtgttttgccgagaagcctctcgtagagctgcctcgctctgtcgagctcgccggcgtcgatctcgaactggatgtagtccgtccacactagctccggggcgtccagcgccggctgagagacggcgaggtcgtatacggatcgggcgcggtcggtctcgcccagcttcttctccaacgcggcgtagcttctccatacgtggctgctgctcggagcgtgctcgatgaacttctgggacagaatccggcaccggccgacgttgccgagctggagctcgatctcgatgtacctcctggatagcttcggccggggcgcgacgccgatcgcgttgccgaggagccgccgcgccgcggcgaggttcttgtcacggatctcgagctccgccgccatgacgcagatattggagaaggagaacttcttgtgtgggatcgtcctgaggcactcccggtacacgccgcgggcgcgcgccacgtcctccgcgtcgagctcctcgaagagggcgtagttgatccagaggtagatgtaccgccgccaatgccgcttctccgccgccgccgccgccggtggaacgttggcgacggcgcgcctgtagaggtccctgatccggttcgcgtcgccggtgttggcgctctcctccagcctgatgaggtcgaaccacgcgtcgtagcacagcgggttcgtggtcaccgcgcgctcgtactgggacctccgcttggtgacgatgctgtcctcgacgccatggcggtcgccgaaccgcttctcgagagagaggagcttctcgcgcagctcctcggcgcggggctcgggcggctcgccacggagcgcgtgctggtatattgcacgcgctcggtccggctccccgcaccgctcctcgaagtcggcgaacgcggcgagcagcacggcggtgtcgtcgttgtcgccggcggcggcgagcaggctcccggcgtgctcgtacacgcggggcgcgcggtccaggttcttcagtttcgtctcgaactcggcgaaaaggatgaacgcgtcggcgcacgggagagcagcaacatgccgctcgtgcacggctctggcacggtccagctcgccgtggcggagctcgaacgcggcgtacgcggcccaggcatcggcgccggggcgccaagacgtccacctatcgaacactacgcgggcgttgtctgtggcgccgaggagatcctccatgcggaggtactccgaccagatgcggtcagcgcgcgggaggatcgccacggcgcggtcaagtacgttgcgcgcgtgcccgacgcggccgccacgagcctcgaactgcgcatactttatccacacaccatggtcgcggtacgccggcgcgccgccggccagcgcgcgctcgtacacggatcgcgcgcgggcggggtcgccgccgccgccgccggggaactcctcccaccgcgcgtacctcatccactccgacgacgcgtcgccgcatcctccgcgaccgctgccggctcggcggacgatggcctcgaaccgtgcgcgtcgctcgagccggtgctcggcgagctcgtcggcatcgacgatcctcctcttcttggactccgccggcaggcagacggtcaccgatccatcgccgtgcagttcgcgggcctcacggatgagatgctcggccgtgagctgcacgggcgccggtgctttgttcttgacgcggcggggggtcggcagcatcgccaataactggaactggatacaggtggagaagtgccgatgagttgtggtgtcctattattataggccgccgaggaaggccaggccggtacacaatggaaatacgaatcgggcccggtcctttgttcctttggatttttttcgtttttagatttttttttaatatttacagaaataatctatcgaccaaaaatattgcagaaatagcccctgccgctctaatggtgggcggcaagctgacgtggcagacggcgggtcgaccgcgccgtctgccgccgtcgaccaaaattgcgattaggcccttgccgcctatacagagggcggcaaggggctaattgtaattttggccgcccataaagagcttgcggccgtactttttc

SEQ ID NO: 21346 - DNA, 3370 bp, Oryza sativa
tgaaaaaagtacggccaaaagatttttctatgttatgttaataataaataaagaagtatttattggtaaaacttgttaatattgttataaaaatgtattgaagttggttgttgcgcaatttcatatgttaagtgaggtattattttgtaccttattcgacgtattagtactcggataatttatataggcctatcgcagtctgggtcgtagaaacattatatggacttaaacaagaagaattatgtaacatgaagaaatagtagtacaatttaaacatgatacgactatttgcattgcggttacatagatgatattagattcgaactaggagggaggtagtgcaatagttgaacacaacgacgatgtagtaatgggacaaggaagcatgacagtagaaatttcaatatgacaagttgtccgataatagctaacccctacgtgaggatccctctcctctctcaaaccgcgctttagtaactctgtattgctctggtagttcaagctgcacaacacggctaggtgaagttagaacccttctggtgtctatccattctctgtattgacatctccttggtggttcctgggaggaaagaattgatgtaaagcaagcaaagttagtaaatgttgtgagaaaataaggattcatgtaatcaaaatattcttaccatgaaatcgtcgtcaagaatatttggacaaacaaagaaccttcgacccaatgttgtaggatttatggaacgaagaacctggcaacgatcaccacacctgcatcttggacgggcttcccatggagggagtgccgtagttaacacccgccagtcgctctgttgttcacgacattgtcgttcataagccgcttttctctgtaagtattgctcagtactttcggatgcgaaataccagcgaccttcttgtaaacaagtggttaggtcgagaacgggattttctgtatcgacccactcgatgtatgcgcaagacgtagtgcgggtctgccgaatagagtagtgttacgaagaataaagcgattgcccatacggaatgaataagcatatgcagataataaaatacctcacggttataggtagggcacctaaaaaagcgccttcctcgaatatcaggattcctcgaagccattagttggcatcgatcaccacataggcagagaggacgctggcaccaaggtggtagtaggtatacacaaggatcgctacgccagtttggatcctcaacaccccggcgtctagccattgacgaaagccggtcggatttgtaatgaagcaagtggggaagagagtactgaatatgactgagttctgaaagattgggaggcctcactcgttaaggcgacttatataggcgcaaaaaatcgagtgatacccctgacatgtgaacgtggtggggtatggtgggtacgcctgattggcgccgaaagatacatgcatgatcggcgcccaaagttacattggtcgtatgcgccaaatggcgggcaaatactcgtatcacacgcgaataaaggaggctacatggtgcggaagaaagtagtcgtgcatgcgccgaaaggtatcgtgtatgcgccgaaaggtatcgtgcacatataacaataacgtagtcattacacaagcatacagtactggaaagtgaagcaagtaaacaaagagaagactgctctactggccctgccccgcgccgcgaccacgcttggtcctccgggcctgtgctcgcacgtggtcctgggagtaggtgaaacgatccggtggcacagcacgggtagcacgagtgtcccgcggaggagtggcctgcgcctggtcctgcgtctgcaccggcgatgcgcctcccagctgtgaggggccaatgacgtcctctgtcgagcctgaagcgaagtcgaagtcagtgatgtccaagagcaaggtggaaggcagcaagcggtccgacgaggtcccagcatggtctagtggtggaccctgactcgacgtgccggctgcctgtgacgaagtcccggtgtactgccagaactgcgctgagtgcgaggtcgacacagctgcctgagacgctgaccctgcagcctgggagaagtgggcggcgtgcgtcatagcgaactgggcgaaacctacacatcgacaacgggacccttgtaagctaagacataaaatgtatgtaaattgattgtcaaagtaatgttgtttttttaagtacctgtggggggcacaacagaaggcctagccaaggaaggcggggtgctgaacggtgcacgaaaccctgaagcaatcggcaagtgaaacggctcacttatatatgtgcgaggtatgtacagaaatagtaataaaaatacttacctccgtgcggagggggagtcggcctaggaacgtgcgcagctggacggggaccagtcggtacgggtggccgctgtacagctgcgtctgcccgagcaacgttgtctgcacgacaggtgagcactcggagaatcgagcgcatcgactccaccatccgcgtgtacgtcgtcaggtgatcctctacgggtaccggaatccccgcgcctaaacgttggatcgtcgttgaaccgtcaacgacgacccggttgatgtcgtcgacctacatggttaatttgttcgtaaatattcgtaaaatttgacgaagagaaagatatgaaaacataaaggaatggtgcgatgcagggtactcacagcacaagcgaagtcctggtcgcggtgcttggcatagaggtctctagtgctcgcaacgtggggctgctgctccaagggagcgaaggtgaccctagtacaggtgcgtggctggtaccagcgtaggtaggcctggtacgactcctcagtgtgtggctctccctcgtggtccacgacctcctcggttgcgagcaaccagtcctcaataaaagtcgccaacttggcgggccagtcgccagctgagtactgacccttgcgcgagtacctgcgaattaatgtgtaatattagtgtgaaacgacagatgttacaaattattgtgaacaggcagattttaatgcaacaacggaaagcgtagtgcaagatcttaccggtgaacagcagctgggacggtgctcggaaacggtactggaaagggctgacggaagccgaactgccgcatcacgcggaaaggggcgtgaggctcaacgcagatgtcgaagaccatcggaaccgtagtcatccagtacgcctggtccctggtgcagagtgtggacagacccaacggcgcacgagcctgggtagccgctgcactgtagggctcccacacgacgtcagtcggcagaaggcggtcgaactccatacaaactcaggatacgaccgcctaacctggacgtgagcccatcggcgctgcaatacgagacgatcgatgtgatgt

SEQ ID NO: 21347 - DNA, 2249 bp, Oryza sativa
gtaggagtactcgtcggcctccgcctgtagctgctcaccctgcaagccgtcgataaaatgttaggcaccttaactgcggactaaatatgtaatacgattgtcatttcggtacaaaaacactcacggtgaactgaagcagccacctcttcgtaggtccggtgttgcggtggtgtgccaacggctagagcgggaggtgcggtgcgcgctgtactagtgcgaaacgtgccgtcagatcgtcctgccagtccacagccgtggtcactggcccaacagcgtctcccgcgagcggtagccccaacaagtacgatacgtcctgtagggtaggggctacctcaccgcacggcaagtgaaaagtgtgtgtctctggcctccatcgatcgaccaaagctgctaggagggacctgtccacagtccatcgtctggccgggtccgcgtcgccggccgcagcctccaccagccgacacatcagtaggaggccggcctcacgtagcctgcaataacaaattaatatgtcattataaaaaatattacagtgcaactaacttgtagtagaacactgttcgtacctctcgacaaaggagtcgtgaaccgtgagtagctcaccgcacgtccgtgcccggaacgtcccaagctgagccccctgcaccgcagtaaggtgagaccggtgtcggtgatctatcgccgggtccaacaactgaggtgtatcctgacgtgccatctctgaaaaatatagtgtttcgtgttagaacaattcaaaaaatagtaatgtaaaacaaaagataacttgcaaaattataaaatagtaataaaatcatgagattaattatgtacaacaagagtacaggctatttaaatatagcaaacgttactaatggtacataacgatgacgtgcaatttaacatatatgtagagttcaataatataacataacattacgtgtcgaagtccgacatacatcagcatacctaaagacgttaggcgccttagtctgacgttacatcacgagacctaaagacatgacatgccgaagtctgacattacacgacgaaacataaacacatcgataagttcgaaccgaattgcaagcaaatccccatgccgacatagaacataagaactacgccacgtagccagacgtggcacgacgacgcctaggacgtggtcgagtggaggtagtgccttcacctgtagggcgagctccatctgctgctgatcctgatagtcctgcctccgccgcacttggtttctccttgtctttaggacaatgcttgtaggtgtgcccatgttcatcacatttgctgcaacgcttcaccctgccagcctccgactcgtccatatcgttgtggatgcgacgagtcctcctccttccagccttgcctcggagcttcgatgggtcaagaatattaagtacttcatcgttagtctctgtgaactccccagctatgccgaacctataaatctcgccgctccatgtatgatatattgtttgcttactgaagtactgtgacacatatactgcatctggtatgccacactccgctgcagcagcaatgacatgggtgcatggcctgtggagcagcttcggctttgcacaagagcaatgacatgtgccgtcgactttgagaacacactcctgcttcactctcttgcggtagatacccctgcctgccttatcttgatatagtatctcaaacctgtgctgttgggtaccttgcactacagctcgatgtttcatggcctttttacgcaactcctctagctttttctgcatgaaagctccaaacaaaatgctgttgttcggcatagagggaagaactgcctggaaccgatccctaaaatacctgcatgtcccatgtaaaatgaactccactatgccaactagtggcagtccacggacaccgcgtatcacccagttgtaaacttctgccaaatttgttgtcattattccatatctagcactacctgtgtcatacgccttggcccatttctcttttggttcatgcagaatccactgagaaaatttccgaatctccaatccagtttttctaaccaatgttggactatccattgggagaggtccaagagcttgagaagggtcagcaaccgcggtcgatggagccgctgcacgctgatcacttgttttggctgtcaactcatctaatctcttccaaagctcaattgaatttttttcttcctgggtctgattgcacagcctctttgaacatgttcatgaactcttttgttcttg

SEQ ID NO: 21348 - DNA, 3631 bp, Oryza sativa
ctgattgcacagcctcttgaacatgttcatgagctctttgttcttgaattgcttgaagaaattagctcccatatgacgcatgcacacctactctgtacatcttcccaaacaccggggtatcctcgttccatactcccaaactgcaactcttctatcgctcgcagaatgccagcgtgcctatcatgtatcaggcacacatttggcctcataccaacaacttttgttttaaccaatttcaggaaccagtaccagctgtcggtattctcactctcaacaaaagcaaatgccaagggcaatacctgattgttcccatctacccctattgctgttagtatctggccccgatactttcctgtcaagaatgtcccatcaatgcagagaacaggacgacagttcacgaatgccatcttgcatgcatgtagagctaagaacgccctttgcagcacactcttgctaggatgttcaattgaggggaatttcttcacttcgtaagagctcccagggtttctttcctcgataacaccaagcaggcgtggcaaattgtcatacgaggcttcgtaagttccaaatctcatctctattattttctgtttggccctccaggccttggcatagctaatagtatacttgtatgtctcttcgatgtgtcggattattgaccttggttcatatgtgagattatcgatgacatgcgcatacatctcagatgcaacaaatgcacaagtaatgttcctgtggtatttctgaacaccaggtagaaaacatgtatgcttggtaacaactgacactgtccaataatccttccatttccccttatacacgtgcactctccagggacaaccatctttttccttaacacaccgaacttcatattgcgaccggttcgacttggcaacccaaaactctctatgaagtgacactgcaaaatgttttacctactccttcatatcttctgctctactataaatcgctccctgaataacctcattttctttgtactcccatctcacactatcctcttcagagatgatcagcccagaaaaatcctcactagcccattctgctggattaatatccgtctcatcatctgacgaatcaccttcctctacacgctcgttgtcagaatcctccctctccatttcatccacaatggcaccgacagtctccccctcgtcggccactccacctggttgaatgccaactggagctactacgcccccgtcctctcgtgcgttgacctcctccacagaagtctcgtttacttcagcacttgatccctcgccatcatccatgttcatctgcacacctggatccttcgggtgaacaaacggaaccaaagctagaggccacccgcgttgcaatgcattttccaaataccatctccacactcgagagttttgaactggcattagttcccaataaaaccctcagttgcccgacttactataacattgattgttatgtcacttgtctgtggatcaactctcaagcccttcattaaccatccttttatagaaggtacactcctctcagccggtctatcaattcccctttctgatacaataaaatctgacagatctacctcagttggcccgtaacggacatttcctggtccatggtaaacttggaatatttgtttgttcgacatatctgtcaatgaaataactagatcatattactctttcatgcaataaacatctacaacgtaatatcttcttgtgtaagccaatgcaacggtaatgtattgattccaaactagcagatctacgtagttaccgatatctacaatacgcacttctagattagtacaactaaaaccctaaaaatataatgcatttattcaaacaaatttttaaagaatacacactatttaactcaatagttatatataggatctatgaatattacctgaaattggcgtctgaatccggcagggcttcgccccttcttctcttctcctctcctctcttctttttttttttcactggaattgaggagagaagaatgagggctgggggctgggcaggaggccttttataggcagcgaggcctgccgcccggccagagggcggcaagggttttccagcaaaaaaccctccctccgtcaccgcccgttcctcccctgtttgccacgtcagcttgccgccccataggtgggcggcagggtctattttttgtaatttttttggccgatagattatttctgtaaatattttttaaaaaaaatctaaaaccgaaaaaaattcttgttcctttcctattctgatttctgatgcaagcggatcggacgcacggaaggaaaaaaagaaatcaagcgcccataggccatagctaactccccgcagacatgcatgtttccacctgatgtcggtgtggctaattggcgcgcgccagctggcgccgcctcccccgcctgatttttttttcttttctttatctttccttttggcgcttttttcgattatttttttaatctttagcacacatatttttaaatgttttgagttgaaaatttttaaattttgatttgtacattttcgaatcttagcttaaaaattttcaaatctggactcgaaagtttttaaatctcgagttgtaagttttcaaatctgagttaaaagtttttaatttttaaatcttaatttaaaaattttcaaatctggacttgaaagttttcaaattggagttgaaagtttttaaattttcttgcaaatttaaatttcgagtagaaaattttcaaagtgagaaagttttcaaaatttgtcttcaaagtttaaatcttaagttgaaagttttaaaatctaacttgaaagatttcaatttgttagtaaaaaaatctcccaaaaaaagaaaattgttccctaattactgtcattatccttaactaaccgtcagtgagttagttacgtgaacacgcgcaaaacacacgctagcggcacacgcgccagctagcttttccgcctgatgtctgcaccgtgctacatgcaacccctcatctctcctatctcatgtataagtactaagtgctacaccaataacaactatacgaaatatttagtcccaacgagtgaaacatcaaagaaataatatgaaatgtacaatattttgcaaatacatgatattgtgaaatatttttatatctcacatgaaacatagcatgtaaaatatcataaaatgtttgctaaaacataaaaaacacactgtgcaacatttacaaataaactagtgaaacattaggaaatacttgttgaaacatacaaataatatgatgtatcaacattttaaaaagatcgatcacaacataagaaaaaaaattagaatcaatataatcatgtgagatcttattttaaaagattagattatgaagaatacaacaatgcgatcgaattattgattggataagtgatttaaaagaaaaaatcattcaaaatttgctaaaaaaatattcacacctacaaaaatggagagagaggagtaaagaaaaagaagttggggcacctcgcctgcatgcatgtaatgaatatttgtgattccatgtgtatggaggaggccgatatttgtgggatttgttggtcgaccaattggaagtaattcccaaaaaactagagaaaaaaaggagagaagatggtgg

SEQ ID NO: 21349 - DNA, 32243 bp, Oryza sativa
cgccgcagcagccaccaccgcctcgctggccgccccgcgccacagctgccaccgccgacagcgccgcccaacgtcgccgccgccgaagctctccagatccaatggcggcggggccggatctgccgccgcctagccatgatacctcgccgtcaccactcccgctgccggcgaacgccacctcccctgcgcctgagagggggcgccaccgcagttcataattgttcaattgtacctttatccatgcaagagtatttgcacccttagcaacaacgggagactgcaaacaaatcaagaagttagtacacctggtcccttcacagatgaaacaggatgtgaaaaaaaaatcgctttaaaccatgtgtttttttttaaaattcagtcatatattcagatccaacttatatattgccaaaactgatagctatgttggatcgaacttagaaaatgcagctattgacattccaatctttctaaactaatttgttagtacagaacagcatatcaaaacaatgtacaaatcaccacaattatttgtcctgtgacgttttataaaaaaactagaaagaaagcctgtgcattcgtgcaggcatctttattatttttctaggacgatctattaaagtagtccataaattttgattactaattatctcattattgtagaaaacatgaaagtaatatatatgctgtcaaatgtataggtcacgaagattgaacttggatctatcaaatatcaaataataagaatgcatatgatattcacttataaatcacggttgttgctcctacttgtatgcaaacattgcaccaccaagctactcacatacacaacaatcaaggccctcacattggctcacctcattttttttccaataccttgaagtcaaggctccaacatatataaacataacagcttcaccatcaccaggcttctcactttaccatttacatgcccacttaggcttaccatatataaacaattaaagggctctcgcattcgctcgtctcagtgagaatcaccgttaaagcaccttgttggtatttcttaacaatattactagaaatataattatcatcaatgacgcaaaaatactcctgctatattatgattacaaagtccatccgcaagcacacggatataccattgtagcatttcaccagagagtattccaagggtatcgtatttatttaatcccgtgagaagattataattgtcacagcctgaatttcgtttcagaatttataaattatttaataaattattcttagattttttattaaaagttcattaatttacaagtgaagttaaatgtggaaaatcaaaatttctaaatataaagcatggttggatttaatttgtattaaattctccatgattaattatactctctgaaattttctcagatttttcagagctcaattcctaattttaataatacaaagaacattccagtaattattcacattttaaattaatcattaaatgagctggtttcaattttattaaatacttagagtgtccaactatgttcaacaattttattggaattatttgagcattggaattatttttaaaaattgaaagatcatttcagtgattaatttaattgggaaaagtaattaaatttccttttccttttcgggccgaaacaggaaaagttcaatttcatgccatccttccttcctctctctggtcggccttttctttccaaagtctagcttgtgtccctcctttaatcgggccaaggaatagaagcccagccgaaagtctgctttgcatcccttccgctacagtgcatcttcaacctctagacagatccgagccagccgggtgcacggctgccgccgcctcctccttccaaatccgatctccccgttgtcctctttccatattagttgcgggaatggaatcctctcaatctgctctacaatttccccaagaaatccccaaaattttctatggaaatccattccaatttcgcgaatcaatctttccttacaccggcgaagatcctaaacttttccggagcttttcccgtcgatgtgggctcgatcccggactcccatggctatatatagagccccctacctctcctttttgggccgccacctcttccctctctccgccgtcggcggaaaccttctccccgcgagcgcctactctctccgtcgccggtagccgctccagccgccatgcgctgccgcctcggtcgtcgccgctttgcgccgccacctccctcggctccgcaaagtcgagttctaccccggccgctggttattttgcgccaaaatccaccggagctccatcgtcgccgtcaacccgaagttcaccgtcgcgttttgatctccggcgaggccctgctgctcctcccgtcatcgccaagcttcaccgccacctttgttggattcgcagctgcgaggagaagcccgtccgtcatctgtcatccaccgaagatcgccggaaagtcgtcgccttcgttgaccagaacctcgccgcccttcggagctcatcgccggtcatctccttcgctgtccgtcgtcgcataagtgttggtaagaatcgccgtcaccttctctacctcccggtgccctccatttgcgttattgtgccgtggttcgccggtaaccgctcccatgccgttcaccggtgaggtttttccctaggaacttaatccaatctaaccaatccgttgtctatctagcattgtcgtcgtctccgtgtgttgccgccgggtcgccgtcgtcatctctccctctccgatcgctttggtttggtgagatttctatctgtgttccctcggtttaggttttaatctcttgtttgtgtcgtcgagtagccgcgttgtcgctaccacgccgccgtgccacgcttagctgctgccctagcgtcgccgctgcgctagccctctagccgccgccgtgccgctccctgccacagccgtgctgctgtgctgtgcgttgccgcttgccgctagctgccgtttggccgctgctcgtgcgtgccaagtcgctgtgtcccgctactgcagctaccaagccacttgctgttgtgccgtgtcgtcgctgctgtgccgtgttgtagccgtgtgacgcttaaacctagccgccgctttagcccgttgctcggtagtcgagttatctagctataggtgcaaccctaggttcctaccggcctatcgtttgccgtaccagggctttaccgttaatcgtgtctagctcactagtttagccgcagctgttgttgagtcgttcgcttgtttgttcgaacgaggtgttccccgtgcttcgttcgttcgtccgtgtggagtcgtcctttagtttagagccgttcagagccgtcgttccgttcgccggtttcggttgatcgtttgggtgatcccgtgtcacgtagaatttactccttgagtcggtatcttgcgtggctcgcttgccagatcaatccaagccatctgatcttggtcgactcggtcaaaattaatctcagccgtccaaaatcaatataaatcctgttatcccttttcaatggcatattagttctttttactataagtcgtctactaaattcgttccaataatttccagaggatgatttagtcttatatctcagttataaattatttgtaaattgtttaattaatttcgaatattcttttctttaataggctttaattggaattaatcttataaaattcataataattcatatgaagtcggaattaagtggttcaagtctctaaattcatctaaattcatgatctacatgtttgtttactttatatgtactttttatttggtgtttattagtctttttcctcgttttgcgtgttagcttgtcgtttccgtcatttcgaagattcgcaagtgcgtcggaagtgttccagaagattaattgaagaccgattattgcaaagcaagtcacacagatcccaaacacaattcctttgagcatgttgatcttatatttaaattctctatttatttcaactatgcatttattttcgaatgtcaccgggtggtgtgaacctattcctttgttatggccaatttgcattgatcaccctatttcttgattaccttgggttaaaatttgactagttggatttatgtattggttcaactagatgtattagatataattgcttagccatgcttagaaacattagcatatgattgggataactaatgtttcactattacctaatggtggatatctaatggtagctcacgatggtcaatcgtgattggttaattaattaattgccaattaaaacttgataatggtgggttgtgagaacatggttttgatggtcgtgctcatgacaattaaggaccggttcacgagttttggttgtgaaacattaaccgtgccaaccacaagccagcatgagcaacagctttaccttttgtatagcatggtttattgcggggcaccagactgagaagtggcggagataaccccacgggggtcaccgaggagtccatgccttattttataaggaggtgattatgatccaggaatggtgcgctgtggtggattgtgttatgcgaggggtactgtcacagctcctttccgaggtactgtggtggtatcgcggcgcatggtgacatgtcgtggggccgtgtcttgtgggtacagacatctctggccagagtaaaattattcgaatagccgtgcccgcggtcatgggcgggtctaacaatgtctttcgtgattagtctcacacctctcacaataattattgatgctataattggtaataatttgcttagctcctggtttggaatggtacattcctaatttggagatagagctgtacaatcgggtatggttgttcaggtttggttgggcctgtgcagcatgtgtgtcatgttcagtgttgattaatagtgatgattaattactttactgttttacaattcttaaatgtttattaaatgctgcttttgcaaatgagcctatattataccatcctttggtatccttgtgcacttgtatatttgctatgtggcttgcggagtattccatgtactcaccttgtaataatcaatcaaacctcagttgaagaaaagttgcgaagaagaagacgtttggcttataccccagttgagctgcctgtgggagtggagccggagcttcgctagaccgtaattccaatgttgtttacttttcttttgtaagtatgtaatgttattattttgatgaatctgtatattaaattgtcagtttgtgtatcttggctgattcctggacgaggattttatcaaacaagttagttcagaaattactagtgaattcctgggcgtggcaataatagagagatccatactaataatttaaatattacttgtaataaccaaagtctaggcatggattaatataattcgagggtagagtgacactaagcagaagtatttatactcattcataattatctaagctaagtggatagaaaatagaaagatcctattcctatacttgtagtatacatacatattatacatacatcctagtcatatgattacttagctaatatataccctctttccgatgcccttttggtgcttcgagaaaccacccctgattgcggagttccttacgataatccgtcatgaccatccaactggggctaaatacggaggagtaccctcaccaggaaattaacttacgactatatacacgcgcggaggaatacccgtactgagctgtcaccatcagtggcccatcttgcttccacagcatataaccccaaataatgatatccagtaatctaaataccacgcttaaattaccaaatactactctaatatcatcgtcatgacatagagtcatagtaaatacaatcattatacccacaccattgcatctcccagataagctagcatcataataaatataacttggatatataataaagttggtattcatatactcggaaagtaatacaataccaaagtagtataaagaagaatattctaaagaaagtacaagtcttaaaagagatagaaaagctactagagccatacccgaattcttccgaagactccgaggactgaagattctattctaattctattccactatactctagagactatactaaacttgagagatgtatgaagcttcttgcttgagctgtgtgggaaaagtgaggaggtgaaggctttttatagctctccaatgacggttatgacgattggaatggccagaattgccctccaaccgtcattggggagtgatccaagccgtccagaagaagccctgcatccaacggcggcacggcgggttcagccgaaccatgggctgggaccagcctggcccaaattcggcaggtggcatcctcttttgctcctctccgcagacttatgaattttggcccaattggttgtgtcatttttgagttctttgcccattcattgataagtctaattcttgacatcgcccgattgattgatcgcctgttttgatgtcgattctcctccattttatattcattctctgcaagaggttaataatcctagtgctagtggaatatttattatttaaacataaatatgtattgcaagcatacctagttctcctctatttaggtaatattgacgggcgaaactaattgctaacgactatcaacacacctatccttctcaatttgtttttaattttataaagattagatctaattgttggaaataacgggtcgaccgatttaagtaacaatcaagagccagatgttcttatttttccttataatttctataatctattagtgctacatggtggttcagaagcatttgtagtcccacgtgatggcttgagagcgtttgtagcaagtttaatggaattttagtatataatagatccgtgaatatttaaatttgggtgatttttacttggctttttaatcatattttaaacttatgatccttctctcaaaaatctatttgggattgttttgaaaattggttatgattttgttcatgacgatccttaaaacacataaattctaaatttataatcgattaaaattgaggattcttgaatttacgacaaaattatttttcaacagtagagttggttcctatgcaattctttgttagtacagaatagatcgagttgatgttttggcaatttcattgccctgatttcctagcttgcacaacccctgccatgctcggacttttctctaatttgttagtcttatgtcattctttgttagtacaaaatagagttgatgtttaggcaatttcattatcgggattccttggcttgcacaattccgtgcattctcactatggcccattgtgatcagacttgttctctaatttgttagggcctcgaaagaaatcttaggagagctaaggatattactgttgtcgatagtattgaccatattagataaagttatgttataataacatagtgcaaagcaatgttgagataagcatttgagttaaagtttaaatcatctagatgatcatcattagcccacctttacatgttatttctcatgcaaggtcgtcttttcatggtatgatattagacacgctctctctactagataacaattcttttcatatgaattttttattaattgttgtttccatcgccgacaacgtgtagccttggaaatatcctaatggaacattctagtagtctcattggttcatgtagaatagttttcataccacataagttaaaaatctaatgcttggcacctgagttaattaattattgaggattgccctacctcatgttttcgttagtatgcttatacactccaacgatatctttattcatttactatatttttataattttataatataaagatggtgccttgtaaatccatgtgaggaggaggggtagtgggatgatactctgtttttttttagttttttaaagattgatctagtgggtgaaataatagttttaatgaggtcggatgcttcattcttttagaatttatatgatttttattaatttttaagatgtgatatgtagtggcttatgaatgtagaatgatagatctaatgactgaaaataatgggtctaccgatttgagtgcaaaatgatgatggttagatattttttttatagaatttaaacaacatttcttaatttttaagatgtgatgggtgatggcttgcgcctagaagatatttaatgtacaaatttatatatgtagaatgatttaagatgacataactgttgtcaaaatttttctatgttcaatattttattttttacctagcaaaataaatgtaatacggattttaaagtatttatttaattacaaataaaaacagtatagataactgaaaactgtatataaattgagaatcatgatgatttagctaattttaaattattttatattgagctgttagaaaatagctacgagaaaagggaagagcaaaaaaagaaaaagaaatacgtgagcacatatgcacggtgtgcacgtacggcaggggaagagaagagaaaacgaattcattgagattgatctaataggccgacaggttggtttaagttatctattcccaaaaattgatctaatggttaaaaataatgaggccactgatttaagtgaaaaccaatggtgagatgtttttctttttttcaaaatttctatgattttttctattttattagggcgccacgtggcatcgtaggagcgtttttagagcaccacatggcggcatgagagcgtttataggaagattaatgaacttttagtatataataatagatagatagatagattttgaacatgagcaggtctgccaatgccaggttttcgtcctctttgttttgttttgttttgttttcgtccactgatatgtttgttaaaatcttcttttgtttcttactgtgactggaagaacattagtagagctttcagattggtctcctgaaaggatctaaatatattttgaggaagcacgtgaagctggatcaattggagtgaattgaaccttgggtgattatttgggagactttcggtaaataatcttgtattgctgttgatgttataatgtttgcttaatgttcactagctgcatggctttcaatgtgacacttctacctgcatggcttgtgccaagtttttacaagatgttattttgttgcacataatgtgtaattcaatggatagatatcctcatcgtcttcaagtaatcagtgcgtttcagctgtctcttttacttgtgagcatgatgaagccctttaactacattacccttttactattcagaagaaataatacaatatggtctagcccctatctttcttctttgtatcaaggacatgcagtacgtacatttacatgttcttgaagaacaagtgtaaaacacatcaattctgtaatttcagggaaacctccgtacattgaattttggtcagtttgcaaacaacgataaatggtcaatctctggtttacaacaggaactcttgcattatactattagattttgtttctaatagctgaacaattattgtcctaaatatcagcacctgtatctaaagctttagtagttaagaaggctcaactaattattctgttgtatgtgacgtggaatatatcttttttccgtgcggctatttatttgtaaccgtatttattgggaaagagtttcagcttgcatggattgctttatcgatctgcttcaatcaaagatccatctacccaagttgcatatgaaccaaagatttcatttgtgatttgcattgtctgtaactgaaataaaccataggttgctgatccacaccaaaaggcactaatgtgatgaaatatagaattttctcggagatagattctaattaatcactcgagtggatgtccacccgtatagtgatgtcaactaaatgatcttgaaaaaatttcaaaaaaaattacaagatagattgatatataatatattactccacaaacatgcaagttaaaattcaatttttataagtcgtaacaaaaatcagatttaactgtaaatatacgtatactatttagagtttgatttgctatttttgttacatcttgtaaaagtcaaatttgaacttacatgtttgtggggtgatacatctatcttgtcaaattttttgaatttttttcatacccatttagttgacgtgcaataaatgggtggatgtccacataggtgattaaaagtgtttcccaattttctcaactattttcagcactgtatatctgtcaccaactgagatattgcccatgcatgatttcgtgggcatcaaagacagaatctgctttccatggtgagttgataaagtgtaaaatgaattattcatttcgggaaggattgattgctgtttgggtaaactaatgcatttctcttatctggtgtgttttaccctttacctgttgccggatggtccctttggaatgttcttaatcattgtttttatgtgaatcatatatccatctcattgtatgtttaattgttaaaacataaattgtattttaactgtttaatttgtatcatcaccaaatatggccatagcaatagcacgcgcatgttactaggtaggattggtactaaaatcttgtaagagcccggtaggtgctttgaacaaagagtgataaggagtgcatgtattcacaatgcatgtcaacacatttggactccagtgtgctctccctctttttttttcatgacgcgctccgatatgcatttttcatgactataagtttggtgaaatgctcacgaaaagaaaagaaaaaaatactatggcaccaaaataattccacgacaaatctagtggtactacggatcgactagtctgaacatccatcaggctcgtcagaactactattgctgcatactgtccgggaaatacatatggtcaccacagagcaactcgtcatcgacactgaattcgcacgtatccaaatcaaacgacgagaacgtgtcccatccgtcgtccaccaccatcgacgacgacggtgttggcggcgccgacgaccgcatctgcctgagtccatcaacgacggcgcggaacatcgacagccgccgtgccggcggcgcagaacggatggccgccggcggctgctcccgctcgtcgtcgctcatcgtcattgacagctgcgcctgggcccccgccgccatcgtagccgccgcaggctgccactgctgacgatgcactgcattattggccgtgtggccgccggcagtggagctgaacctgaacaacaccgcgtggtgtacttccgctttggccggcggtggctcggtgaagacatgggccggcgtcggggccggcggcgatgggttgcaggtgtgcgggtgaatgtaggtgaccctgtagagtggcgggtcggcgtcgttctcctgctgcaccaccttggtcgccatgcaattcctgtcgtcccggtaagagcatcggtagtatagcctgtagatcgcgacagttttacaccaacgtctgaaagattggtttattcgtgacagattaattaatacacacgtcaggtaaattaattttctgccctgggggctattcgagtttttggtagtagactagtaggtacgagtaccaaacatactaaatacaggtacataatctagattgatgaaatgtgcaattagtacgtgcaccaaagattagaaaatattattttttctttaaaaacattgtgatataggtgtgatagtgtcatgcctcatgatactcgcggtccatccacaccaaaattaacccaaattgaaatcccggactacacaattatggctgtgtgcattcttagtgtagagatcaaaagatatactaattaataaagatgtggttcatacctgggtgatgacaaagattggtacagaatgaaacttatgtatatttagtgaaaacaaatacttatatatatttggtgaatggtgatacataaaagtaagaaatttcattccggagattataatatcctactcaattctttttgtatatattacttcaatgccacttttctcatacgggcggcctctcaattgtttagggtttagttttaactcggataacacaatgggcattatgattatacgtgagttaggattgtaatataggggatgttgaaaatttccaaaacgtaccttgggaacgatgagttcttgattttcttctctccatacttcctccagagatggccatctgtatgtggtataggcgtaaggttgacacatgttggatgcccttcctgcatcctgtaatagtattacggaaatatgaaaacattatctaaaactagaaaggtagcccgcacgttgcgcgggcatatattatagattatgtttgaagaaaacttaaaatgagtgttgctttagataaatttttcaatctatttgttagcttttaaaatatataatatttaatacattcctataaacaattttgtaccatctcttcattatctataaaggagtttgatttaatttgtttggtgacatgtggtgttttgtcttgtttaatagaatgtttaggagctttcttttttttagcaaatcctaaataactattattgttaatgaatatgttttatgtgtaccaagctagtcctcctagttggttcatattgacgcaattttttacatatttacatataaatttcaaaagttattttgtagacctccatccctgatatatgcgtgatctatagtatcttttttttaaaaaaatgttatggcaatggaacatgtaatggttgttccaattttaatgaaaagtaggaaacaatgttcctattaatattttctatttattgttttattttatactacccttattttaagtttcaaacataggcgttatgaatagagcaatttatattagaaataaaatgtgtggcttaaaaattatttctccttttagtttgatagctataaaaatatcgatgaggggcagaggggaaagtgcgaaccgaggagtgaggagacgggtagtgttgtgtttgtgcgcatgtgaggagaggatgtttttggggagggggttctctcctttttttttaataaatgatttaagtgaaaaccaatgatttattttgttcataaaatttcaaattattattttgctaattattaagatgtaacacatagcgacttaaaatttttccttcaattcttccttctaatttttaagatgtaatacctaattagaaaaataattacccctcttttgagatgagttaggccgggaatattacttcttttgttctttgctttaacttcccaacttattcctctttttttttttctagggcacacttttcaaattgctaaacggtatgtttttttttaaaaaattctatacgaaagttgctttataaaaatcatattaatcattttttttaaaaaatagctaatattaaattaattatgcgctaatgagtcgcttcttctggtgctctagagattaggtcgtaacccatggaatgaacacagcctagttatgttcattttactcttagaaatgtagatctaaattaattatcgtgaagttatgtaggatgataaatatttattattattgttttttatatttcttctaatagtttgaaatgcatgcaaaagttaaaaaatatagcccaaaagtaacatatttattttcatattttagtaatagtgtaatttggtctttaaccgtgaatttggtcataaagacatcgatggataaaaaaactattatatgatttagatatcttagatagttaatattttaacaaataaagcatgaagatggagaaagaattaatggaaaagagaaaaagggagaaggcgtacgtacgtatgtacttaactacctaatgctgggtgggccgagttcaggagatgatatttttttaaaaaaaaaatccaatggttgtaaataatgggtccaccaaatttaatagaaatcaacggttatttgttaaagtgctatgtggcagtttaggagcgtttataggataccacatggcggcttaggagtgtttatagaaagtttaatggacttttagtatataatagaagataatagattttcatatgctagcacaacttttggaatttgtactaagatatgtatacggtacaagtacgtactgtcgtttatattgtagaactgtacacgtttatatgatacttgttcaatatttgttcaccatccaaacaaggaataagtaatgtcaatgaaatcatggaaaaaaaaaagaaatcttggtgatatgtatgcatgtacacctcctatgaagtgattattcatatatagataagggtacattttatttgacaaataatggacccacgttatataattttactctaaagtaattaactacttcaaaagaaattcataaattgtaaattaggctcagaggatggtaaatttgaaaaggttgtggaatataatgggcctactctcgtttatatatagttatgtgagggcatgcacaataataatataatgcacacctttcgtgtcaaaataataataataataataatgcacaccactctaaatatatcctcaaatatgtcatatcaaacaatttgccatataaaaacgggctgaaacaaaagggttttataggaaaactagaacacatatagaagacaagccagatatatactaaccaagttgctagaaggccagtgaggtaagagcaaggacttaatcttaaagacgaaacaatgcgtataacacgatagtagatgtttattcaatgtgtgttgaataaattcatcgcaaatagttttaagcaaggatttcatgtatataattaaatatgttgataaggttttaggcccagcgtcctccaccttcctcttttgttatatttttctatcttaacatcttttacgatggtctcactagctagtatatatatatatatttagataatggaatataaagctagtatatatatatatatatatatatatatatatatatatatatagtagaaatgatctacatatttcatcatttcctatcttattatagtaatcccccactaactccttaagcttaacatgcaaagatgtcacatcatcatccactaatccactaattaacaagatgccacatcatcatccactaacaatcatcacatttaaacatcatgcaaacatgctatgtctttatagtttttataatttaagagcttttcaaatacaaacatgttaaattatcatccaatataattcacataatgtttcaatatacatcttattatgttttatgataccctatatacttatatagttcatcctcacttagttagtgattaaatgattaatctatggtccagattatctttctccttttttcctctaattaagtcatatcccatcaattgtttttatcctttagatgattaatctacagtccacacacccaaactatctccctatttttcttcttctataaagtcataccaccttactttttacgtttgaatcaccattctacatactatttaaatttaaattatcataaaccacattaatttacttaatatggtgttatctagctatcatagctatcttacacgttattttttttattgttatcatactaaattcccgcagcaatgtgcgggatttcacctagttttctttatctcaaaaaaacccacgtgaatcaatagctctggttaatgtttctactaccatttctcctgcctactccctccgtccccaaaaaaaaaaacaaaccttgatttccatgcccaacgtttgaccgtccgtcttatttgaaaaaattatgaaaaaaattaaaaaaacaagtcacgtataaaatattaatcatgttttatcatctaataacaatgaaaatatgaattataaaaaaatttcatataagacggacagtcaaagttggacaaggaaatctaggtttgccttttttggacggagggagcagtacgtagatctactttataaatttgttgaccactctattgtcgcacactaattaatggtggtgtatatagaccgtcatatttctccagtagtccagctgcacagcgatcatcacatctgttccattagcagtccagcttttgatatcatcatctgttccattagcagcttagcaacgtatcctaattaagcagtttctctatgtaggcaaacttatcaaaatctcgattatgtcatacgattttacagcttgacagtacgtctaagtgcctaattttatggttcagtacacataggtagaaaaatcgacgatttacaatttttatttgctcctacttagaacttcctatttcgatgtagtatcacgattttaacaacataccccctctgtcacgtaaagaatcaaatcttgggaacagattcatccccagaatttaattctttatgggatagagagagtagatgtacagaaggcaaaaccatcacatatactagttatccggccccttcacaacagcttgtggtcctccctcttaattacgttctacatgtagttagagcaaggataatagtagagttcactttctattattagcctatcttaaagccaacatatataggttggctacaattttcttctcctctctccatttctcacttatacatttaatatatttgttttggagcttgtgataagctagctcttgcatgatattttatattatatctcttctccacgtaagcttacagtagagttatatctcagtattatacttgctcttattagccagcacatatacttagatctgtgtgtatatatatttcaaaatactctaattttatgtagattgctgctattagtagtggagaattaaatatttaattactttgaatactgtgccatataatatgatttggaagatctaagccaacagtataatcacatcatttatgcaacgtgcaacacgtactgtcctgagaggttatatgtctccatatatatactgtgggataccagctcctcatgcacaccaagagccaaagtactcatatataactgaaaattacactgtctgtatagataattgccacttgcctctccatatataccacttggggtgagttgagtttgaattagaatgatatatatatatatcatatgtgggggcctaattatttagtgctaaaattatccggagcacgctgtagatgcaatgtatcggacataatttgttttctgtactcattaaaaaaaaggactatagtagtttgtaaaattgtaaggtcaaggcacacagacttcactctttcagcatattcaacttggacaaactattgaattataatcgctgctgtccagcaactaatatgccctacgtcacagattaaatattgtgcccctaataactccagcgggagagggagaacctgatttatttccctgagagatgttaggtgtgtttagttcacgccaaaattggaagtttggttgaaattggaatgatgtgatgaaaaagttgaaaatttatatgtgtagaaaagttttgatatgatggaaaagttggaagtttgaaaaaaaagtttggaactaaacaaggccttagttgaataatattatagtgcctcctcattgttgaatattttggagcttcagcgttgcgggactcttcagcttgaagattctgttaataaggtcctcgcatcgagaacacactttgcagtggtaatttatgtagtgttagatctgcagcgcattgaggttatgggtgtgcatgacttcatccatgcatcaagattcaagattatgtactcaccggctatatgtttcactaggaaattttaacgtccatagattttctatcatggtctctatatctagtgagttagtgtaagtaaatatgtgtattcatggataagtgttttagaacatatatgggagtttttattaaactcggctaattaattatacgtatagtattaagatgatacaatcgcattgatcaaagatcagtcttaacacagctgcatagctaagatatgcacaaaaccaatatgcatatgtatatgttttctcgtataattaggacgacgaaaagaaatagggaaggaaacgaacggcattgctgctcgatatgcatgcagaagacagctgatcatcagagaaaatcctcaaattattaccttggcttccgcgaggagaacggcgacgacatgggcgtcggcggcggctggccatggacgccgccgccgaccggacgtgggctgcgagatgccgggtccgtgaactgcatcgtctgcagctggtgacgcgaggccattgtcctcgcgtgcagactgcagagactattttcaggtaaatccctgcacctaagacgatggagagcaacggcaggtctatatgtaggtgaagaacaggagttgctttgatcgatgcacatgaggaagagtgatggaggtgtcaccagccatatattaatgttgcaaacggaggatataatattatcagtcctctaacctgattcttgttcacatattgcattagctagcatatgaggtgtatgcttacatggtaaaaaaaaatagaatagtacaggaagatggtatctgctcccatgattgtgtgttaaatttatgacatatgcacatctgaaaataagaagtctctatccatatattgcattatcttgttaaaacaaacaacttgattggggtgcgtatttaggactatatatgcatgtcatcatgtcgtgaattattattgctacaggatctacaacatggccaacaagtctgctctcctcttcttgatcttctttatttaaaaaaaatacaataaaaaaccgttaacatttggttgttcttcctcttggagtgtgggatttcaaggagagagagcgagaatggcaatttattgttgggtcagaccactccatggtacacatggctaaagccatgatggcaaagtttatgagaatgagatcgaagagcctgggaaaaaggaaaaaaataaagtctatgagaggacagaaaacgtagttgagcagtcatgtcgattgatcgaactaagcaatgctccgagtggatttagacattatctcgaatttcctatgtttgttgttgatctgatctagctagatgctactatatattgaggtagtcttaaataagacattattaattaattaacatatatcttaattaatctaggcacacaaggattgggaagaggcaagcaaaactatggataagggttagtgataccatggagattatatatggtggagatggaggtcctacttcatagaagttcatcaaagccctggtggaaagggagaaagtgtagtataattttttttaaaaaaaacactggaggggaggcctccgctgttaaattaaactttcttgagaaagaaaagaaaaacaaactagtctaaatatacaaaattacattaaccgaatccaagtcttgactacatcctaagcaacaaaagagagaagtctcccctaaagaagctgcctccaagaaagtaaagagggtgacttgttattaagaaaaataaaaccatttctttgcttacatatgttccaagcccctacaagaattttttccataaagcatcgaccttgatagttgtttctggcctccatcatcatattgtccatgttcaaagaggtatcccaaaatataccgactctgattgatagcatagaacactgtgaagtgtatttcaatcctccccaaataaaaatccatttatcactttctagtgactgatcaacctcacttatcatatctgataacgactgaagttcatcatatgcttgcggggagggagagagagagagagggggggggatagatgaaagttattctcaaattgaattgacaaagaacactggactgaaacattcctattaaacaagaacctagataattaaaaggcaattaaagaaccaaagccaaaaacacttgccaacatttgagccttatcctcactgacatttattagaatcaaacaagatttatggtaattaaccttgagcccggtcccttgtgcaaaagtctgaagtccggtcccttgagcaaaagtttgaagtaaagcttttagagtgaataactcctttccacagactttagaggtggaattgtgagacaatatttatttatgttttcacaatggaaggcctgcaatatatataaaaagttatgttgttttcgttgcccattgctttcggttgagggtttcaatatagtctaactataattttataaggcagtggttgacacatggccttggagatatagtactagcaacaggtgtcattatatattttgtattcattagagtgtgcacctagttgaaaggaaaattaatatacatatatccaatggacaatagttaaatacaagaaaacaaaacatatttatccatgttatgatgtttgtgatatatttttcaactttttgtattgcgcatttattttgtatataagcctttagttgcaaattagacgatgctctgtcatatgtgtttagcggcgatattgtatagaaataattaaaataaatactaaaaataggtaattgagatccctagagaaagaaacaagatatagaatgtttttttactctcgactatgcattaaacatatgtgtgaggagaggatggaagaaagacagcgacacatcgttaaatgcacatgacatccaaatgagctcaaggccatcagattcagtcgattagaccttaaggctgccacacttgtccactataaggagagatggaagcaagacgttgtcaaatgcacatgacatccaaacgagctcaaggccatcatatccgatcgattaggccttaaggctgccacacccgaccactataaccatgaggccaatgcattcaaactgctctctgtgtgttttagatgaatgtggagatggcggggcagatttgatggcacattcggaagtgatcataaatgataccggcttatacttgaagattttttttagagagaaggcaattttcattacccagctttggggagaaagccaaaagttacataggtctgaaaaaactagaaggaaaaacaggactaggagacccaaccggaacttccaatttccaaaggtgcaataaaacaggaggatcaggccccaaccccacacatttcagagtgcttcccatagcacaaagctacaactattacaacctgaaaagaaaaagagctaaatggtattccctctttccctaaatgattgacgccattgactttttaaaatatgtttgaccgttcgtcttattcaaaaacttttgtgaaatatataaaactatatgtatacataaaagtatatttaacaataaattaaatggtagggaaagaattaataattgcttaaatttttttgaataagacgaacggtcaaatatgtttaaaaaagtcaacggcgtcaaacaattagagatgaagggagtatcatccagtaggctatagaagctcgtagctgcgacaccttcatcatccgcctagcttgctccattcgtactagaagatatttttgtgcaggtttacctatactttatttcacgcgtgcaaacgagactattttatgattttttaggtcatctactaatttgaaaaatgaactacagtttcactataggaccatattgtgatttcgatgccacatcacctaaaaacacaatgaatatagactaagtttgaaatgtgaacaggtgtttatagtggaaaaggttgagtaataacgtcgtctggtttggaagttctagttgctttacatttttttgaaagaaatagttgctttattacatagtagtttccctgctacatagcactatatacgacggttcacctagacccagtttatctcaggtgtttcttcccacctatccaatacgtttgttcctttctctcatttttcatacacacgcttcccaaattgctaaacaatattttttttcaaaattttactatataaaacttatttaaaaaatcatattaatttatttttttcaaaaattatctaagacttaattaatcacacgctaatgagtcatttcattttttttagggtttagctcccaaaactaattgagaagagactaaaacgtgttttagggattagctcccaaaaataaactaattgagaagagaccgaagataagaaataaagtgccggtattaaacaaaggcacataatagttgagaagagaccgaagataagaaataaagtacgtgctttgttgctatataaggcaaattttaatttttgagctactgaagacgagtccgttgggaaaaaagagcgaaagtcactaaaatattagcatgcaaaatggctaaaaccctcaatagtttagctagctaaagggttgctcgatcggaatctaaggccctatttagttcccagaactagcattttcacgctgtcacactgaatgtttagacacatgtgtggaatataacatgtagacaaaaggaaaaaccaattacatatattgcgtgtaaattacgagacgaatcttttaagcctaattgcgccatgatttaacaatatggtgctacagtaaatatttgctaatgacggattaattaggcttaataaattcgtctcgcagtttcctggcggaaactgtaatttgttttcttattggaatacatttaatacttcaaatgtgtgtttgtatatccgatgtgacaaccaaacctaaaaattttccccaactaaacaaggcctaacaacggtgatatatatatatatatatatatatatatatatatagcgccatagtccttgtcacttcacatgcccttgtcattaattgtggtcattggtatatatattgcctctttcttttatgattgtcaccttgtgtggtggttcacatcatcatgagatgaggatattgtcacttgcaccatatatatactccctccgtcccataaagctttatttttgaatttctatatccaacatttgaccatatgtcttatttaaaaatttataaaaaaaatataaaaaaattaatcatgcataaagtatcatatatattttatcattaaaaacaataaaaaaatactaatcatataaaatttttaaataagacgaagatttaaatattatataaaaactgaaaaataccatcttcgtgggacggaaggattagttgttagtgcttacccttccggtggatatatactactcccgccgtttcatattgcaagactttatagcattgcacatattcttatagaagttaataaatctagacacatatatatgtctagattcattagcatttatatgaatataaataatgctagaaagtcttacgttgtgaaacactcatgaatgcttgctcggtgaggtgagtcattaattgctgtcgtgtttgcttcctatgcaacacgtagcatatatttaccaaaattattgcggttctatatcacactcttctatttcctccatgttgaaatatatatgattttgtataatttcactattttaattaattagtccaagggcattgctacgagaaagtgagttgagaagagaccgcatcctatatagtaatgatccactaaaaaattctaaaactcaaaatacaaaaaatgtcacatcattatttactaacaattattatatttaaacatcaggcaaacatgtcatattatctataattttataatttactaaattttatagctttaaaatgcaaacatgttaaatcatcttcccacataattcacataatattttcatatatccctccatcatttcttgtagtatcctatatatatatatatatctatatagttcattcttatttagttgatgttatttctcttttctctcattaagccatatcacacaattgtttttagtctgtagatgatctatggtccaaattatctccctcattttaatttcttccatatcatctcaattctttttaacccttagatgattaatcttgacccaaattatctcccaaattttcttctcacataaaaccacaccactttacttttacatttgaatcaacattctatatattattgaaatttaaattatcataaaccacttcaacttatgtaagctttttacttattgttatcgcactaaacttccatcgcaacgcgcgaggtttcacctactataagaaagagtttctggcaagggggtttccatctaaaatctaatcttaaataatgtggggtgcacaaatatgtgcgcactcaaaagtgtatacataatgcttacttcgatgcatgcacaatcataaatatttctgtaatgcttaccaagcacgtaatattatttctttacatttaactatggtcttctatgccctccatgatataattactgagataaaattgatgtgtttttgcactcaatccttgcatattgggttttgcttcaacccttatgtgccccacctaattaggttctcattttttgtggcctatatgcacattacactggttgaacataagttaatcatgctattttctttgaaaatatccatattgcccttgtagagcacaatgctaaatgctaaccatattgcccttgaatataactagtgagtaaggtccccatatagagcacgatgctaaatttttgaatcaccagaagtcacattatttttaagctggctttgaaaataaaatttgaaatttaccaaatcacaaaagattttgacttttaccatttatttgaacacaaagattttatttttcaatgaatttgaacaaaatttggttaaattccattggaaggtttagaatttggttaaaatttgttgaaaattcattaatttggcttggcctaatttaacaaaagttcacatctctaatattataaaaattcaaggtgtttttatcaaaaatatttcgtacgtcgtcggcttttgcttgtctctcgatccgattatgtttctatttgcttgttccgttcattaccgagaaggaaaaaaaaagatattacaggtagcggatagactggcataacggatagaagcgggatgacatcctcaaggcctgtatgggccacgacccaggtaatgtgtgtatatatatattttcgcgaggaaggtaacgtgtaaagaccggccataatcttccaaatgtgataggtcatagagtaagttttattaggtaataaatagttatagttattactaaatctatttatacctatatcttaactacttaaaaaatttgtaactttccattcgtcacatcaaatttccgtccgtaacaataattttccgtccataaatccaatcgaaatccaatcagacaatccaaacaaagagaaaaagaacgggaaaattaataaaaagtgcacaaatcttatctcaatctcgcgggaagccatcgacacagccgaatccgcccgtgggaagtcgccgttgctgccggatccgcttgcgggaagtcgctgatgtcatcagatccacccgcgggaagccacacgacgccaccagatccacccgtggaagccagtggaggatgccatcgctcgtggtggggggagggggctgccgctgcccatgctaagggagggcgccgccgccgccgccactcgcagtggggaacgacgtcgccaccgttgctcgcggtatgggagggagccgccaccgccactcgcgtgtcgccgccgttgctcgcagtatgggagggcactgccacggctgctcgcacaccaccgccgtggctcgcggtgggggaggctcacgctcgtcgccgggagagaggatcgggagagagaaggataaagtgtgagggttagggttagggttttctcccgtccgcatcttcagcggcgcagaggcgatccaagccgtgcatcaaatcgcctttgcatcgggctgcctccatcgctgggccacatcactgttgggccacgcacgtttgatgggccaagggcaagccggtgggtccaacacaacgcagcgaggaggagttgggggagacaaattagacttgagttgcggactgagaaagtaaatgtgctgaaaatggcccagagagaaattgggatttttatttaaataaatgctaaaatgatgtttttattgtaaaatttgcaattaagcttcaaaaattccaacaaaatttcaaagactgttattaatcatggttaatttaataaaaattaaatccatccatatcatattattttgccaccgccgtcgctcacgatgggagagaactagggttagatatagatttaattcattgtttatgtccagaagtatctcatataactcctatggaactataaataactataatcattattataatattattttttttcctgttgcaatgcacgggtattttttctagtgtaaccaaaagtttttcctgacgaaatatatatcaatccggagagaaaatctaagagttgctaacagaatctatataaaggctattaaaattaaaattcaaagtcatataagatgaagcaaccactgctgcacaaaccctctttaaccccggtttacaaccccctttagtcctgggtagcaaactatggctacaaatcctggactaaagatagcgatctttagtcgcagttaaaataaccgggtctaaaaacgttactaaaaatcagccatctttagtcccggttggcagactaaagattttttttcctttttttcattgtttttttgctatttgcatattaatttcaaatcaaactcaacaacaaacatccacattcacaaaaacatcacaaaatcttccacaaatttacagatcgaatgaacatactcagattaacatcacaaatttaccattcacatcacaaaattacagatctaaacatcacaaatcaacaaaacatcacagataaaaatccccgcgtggccacctgccctcccgctctgccacctgcgccagagtcggcaccgccgcgcccctcgctggtgccagccgccgccgcgcgcgggccaccgaagccgccgccgcccccacctttgctttctcccactgctgctacatgcctacgaaagagaggaaactttaaagaaaaggacaagagatcagagaggaaaaaggagaggataagaaaggaaagagagaggaaagggaggagaaggaagttaaaatgagaaggagaggatacgtgtgagggattatatactacgtgttgatttttagtcctggttggtagtaggggaccagacgctattttaatcgggactaaagatcatataatggcgttgggcttttcaaccggggttaaagagtcctggtttttagtaaaaccaggactaatgtaatttttgggcaacccggcaaagatgatttctccagtagtaaacgtttacgtgcatatactgattcaacgaaaactctagaaatatgtagtattctcaataatccaagcaaagttgagcaagtactaatataaacagacgctctataatggattgcagatatatatggtgattgtggtcatcactcatctgtttcatttgtttcaatgtttttatcctcttaggacccctttgaatcttagggttgaaaaaatgttttctaagagatggaactcttgctaaatttactctaaaattcacatgcaatgtgtcattccatagaaatttcatgagatttgaaaagcttcaatcatttaaatcaaaggaccaaataggtaaattttctatagaatttaaatcttatgaaattcctacgtaaatcctttgattcaaagagacccttgtttctttgacgcaccaaatttatatgtggaatttttgaaatactactacatgacaacctgacggtcaactacacaacttcggtacggtgggacagcactgtgcgttgggtgcatgcacctgctgcagtgtaggtttttttttttaactgtttgcttagcaaaattaattgcaatgtctgattgaaaaatattcatagtccacctgtccaggaatccacttggcagttaatgaattattttttcctgtctttgaattaactagccattgatatatcaagtttatcaattgatatggagcatatgtggataacaaattataaataagtaatattgtcggatggtggaagaaggacctggaacgagatctaaggtgtatcacgtgtactttcccaatacgggtggcatcgctcgtcaattcctagctggccaagttgctgtgtcagtgtggatactattttggttttctaggaggaagtcggcaaagtcatctagccagccattaattagttggctaataagtacgtgtggttgccaattaattaagttgattccaaggtctggtgatgtagtactatcctaaattacatataatacctgattattctcgttgtttggttctgcgtgcatgcatggatggggattggatcggagataacatgacttcagaagttcagattaaattaaattgcaaatggttatttgtagttctctacgggcaagtgtttgttttctaagctcaattggctgacttttttccgtcgcaatttggcaattgtttgagttctctatgacttaccgaatacatctgatgcataggctagacagattttattactgagaaaatgtaactatagtttttccaatccagcaatctagatttgtaactagttaagagttcttgaatgcctctggtcctctagtacattaaagatataagatgttaacgtccgtgaaccttcttattcgatattggctttgtgatggaatatgctatggatcacctttctagggattacgcttacacaaagaagagttttggaaagcgtcccgtagaaaaaagatattggacatggctaattagaacatccatttgattttctagatatgatgtttatgtctgttggaggtaggttgtgaggctttccgccaagcagccgaagcaatcaagattgtgcggtgaagcatgatgaaacaaccagagccacttaggtaagcaccacagcggaaaaaggatgaagtagatgaagccacatgagtaaggaagcatgatgagatgttgaagagtcgctgaagtggcaaaagcaacaggacgacaaaaggataacaagtgtggtggagccacaaacacatgagtgtactcactggggcagtcaagtagtaggcctcctccagcgtaaacacccaattaagacctaaggtcagcccatgaagaccacctaaaacagacatgccaagaaatatgacaagaatgcccctcagatgtccctatcactgttaagggatagttgcgtaaaaaaaaattaatatcactaagagttttattttatgatgactcgaaatatgcacatacataaaccactaatttggtaattagtgacatggaaaacttttgtttaacacttccagaaagaccacctatctatttgttcgtttagcaggttcaccacgtccttaatatttatacaaaaaaaacaaacgttatcggtggtaagtttcttgttaaatttatatcgaaagcacacttaagtgaacgttaatttctgggcttgcgattttatctctattgaatgaattttccgttcacaggttagtttgctatacagggacttgccgcaccactagactcggtctagctaaactgcaaatagatgaccgcgtttgttatactctagatagcacaaactcgtcaatattaaattttctcaagcatcattgatagtcaattttcgcattcagatcgttggcatcagggcttcctctcggtggcggttctcccctcttatctaattaagtactttcgttttgtaatatatgatgccatcgacttttaagatacgtttaactattcatcttgtaatatatgacgctgttgacttttgagatacatttaaccattcatcttatttaaaaaaaattatataattattatttattttatcgtgactttatttaccgtcaaatgttctttaagcatgacttaaattttttatatttaaaaataattttgaatatgaagaatggtcaaacgtttgttaaaaaatcgacaacgtcatatattgaaaaaatgaaggtagtatcattatatcatacttcgtcagtatacgaaaggcaccaatcatatagacacatagcttcttgcgttggtctatccatgaagaaaagtggaaggcaaccaaaaacagctaagaggctttattaaggcaatcctcgtaaagtagaatacaagttgtgttgaaggaagagccaagttacggtgtgcccataaattactattgaagcaaacaacacacttatggcttgtttagtaactcgatgtaaggggattgtgagtttacgtaagagaaatgatgataggattaaaatgagaatttgatttttaattctaatatcttgtttggtagaggtgatggaaattgataggaagtttagttggagattatgtcattaataaaaacggatggcttaaaattgtttagaaaaagtaaaggaggaattccctcctaattacctgccactacctaggtattgaaaagaagggagtttcttcctcaattctccatccccatcccaccaaaattcccatgtctcccaatcaaacaaaacacttaatagcctcatccctttaaactcccaatctcttctaaaatctccctccaaccaaatgggccgcaacaaggctagaatatgggaatgggagtatataatgtagacctcttgtcagttctgctagctaaattacatataagaataataatttagttttcttgctagttggctgcctataggttttcatctagatgtattctgagtaggtaaagctagctatatacttcctctgtttcacaatgtaagtcattctagtatttcccatatttatattgatgatgtctagattcattaacatcaatatgaatatgagaaatgctagaatgacttatattgtgaaacggagggagtatatttagctgtttgcaaaaagtattggtgctggcttcgataattttgaatggtataaatccatattattgaccttcacagcctttatctaaaaagcactcaattcatatgatcccccataaaaaataaaaatcctcactcaattcgccttggttttttttaaaaaaaacacatcacactttattaaacgacaacatttaggggaattgaattccccaatacatcgcccaggataaacctaagagttggaccatctttaacaagagagaggtcaactgaaaaaagaaagcaaacttcctaatgaaactaagcagcaatgaaggagccaatcaacagggtactgcggcaatgccgcgacgattgcatccaagggcctctattgatgtgtactccgcttgacgaaccggtaaaccccttcggctgcctccccgggaatgacacatatgagaggtttggtgcgaagccgtagattttggtgtgagcatcaccggaatccgcaaaagatttccacggagttcatcgttgaatctgaggagcacggactgtaaacctgcaaaccaaggttgcaaatccaatctgggctcaacccgaacgataaaccctgcatggttattactgccaagagacagagaggaagaatttctccaaatccagccaaccaaagactcaatccgaagatggtggcgaagaacttgctgtcttggtaactcgatggagaaggttgaagaagaggagatcatccgagccgcatccacgccgccattgcaagacacatccacaccaccgacaccgtcacggcctgcatcggcgcagccgtcgccgtcgcgggtagcaacggcgcggccgtcgccgccgcgggccacatccacacggccgccgccgcgggcagcatcgccgcggccgctgtcgccgcgggcagcatcggcgcggccgccaccgccgcgggtcgcatctgcgcgtctgccccggccacgggtcgcatccgtgaggccgccaccgcagctgaccatatccgagtcgccattgccaccacaaactgcatcggagccgctgtagctgccgcatgtcgcatccgagccgccgccaccaccgcggaacagatccacgccgctgccgtcgtctcaggtcgattccgcgtcgccttcgccatcacaagctgcatccgcgtcgaatccaccaccatctccaacttccataccacaccaacgaggagaaaacgggaagaacccgacctaacgagactagcccggctacttagctatactaggggaggggggacgacccctctccctcccgccgccggcgatgaggccgccggaatcgaggaggaagaggggtcgagagagggtgatttactgtagcaagggaggtttcaagagagagcaggaaggtttgatgaact

SEQ ID NO: 21350 - DNA, 660 bp, Oryza sativa
gtagtccagaaatgggagtgttacacaagttattgtttttcatcaggcacaatgtcaagtaaggtcacatttcagatagttcacggtgaaggaaatattagatttggtccagatggtgttgatctgtcagattttgtaatgacatctaagggcatcgataggcctgcggagagaacatttcagtcaatttatagttggttgttgagaggatttagaatagaccaagaagtctacacaatgtcagtgtcagttgtagtgagtcgtgcaacagaaggttatttttgggaactaatgccgatggacagcactgatgcttggagacggtatgtggaaatggcttttgaacggtcatggcccctcgttatatttgtgtcggtacaagagaaagatataaatgtttcaatgcaaaccgaagatgtagagggtcctatcaatgcaggggatgttgttggaccatcgatgcaaaatgaggaaaatcaaccaagggaggagcaggctatgggcatggcggatgaggggaagagagtcggtataattgttgatgaaatggagagggaagattcggataatgaggaagtggacgacgacgcatcatccgatgaggaaggtgatataatggccactgattgggcaaatgaggacttctctggacttggtata

SEQ ID NO: 21351 - DNA, 769 bp, Oryza sativa
caacttccataccacaccaacgaggagaaaacgggaagaacccgacctaacgagactagcccggctacttagctatactaggggaggggggacgacccctctccctcccgccgccggcgatgaggccgccggaatcgaggaggaagaggggtcgagagagggtgatttactgtagcaagggaggtttcaagagagagcaggaaggttagcaagaggggtcgagatttcactcagttcgccttggttaggtggggatacaaacaagggcatatggaactgataacattcctgatgcagcagttgggcgcaagagatttttaggtggttgagcataaccaccctctctatttatatcataatatttatagtttctactttgaattcctaatttcactagaactcaaaccatcaatttccaaattcatccaaaaagaaatcctagacaaatctcatgctgtgtttaattccacaccaaaattaaaagtttgattataattgaaagtttaaataaaaaagttgaaagtttatgtgtgtagaaaagttttaatgtgatgaaaaagtttaaagtttaaagaaaaagttggactaaactcggcttcagtcacgcaagcaatccgactccgtgatcagactggctctcctggccggcctgtcaccgagccgctctgcacaaacaccaagctggcctataggcgccactgctgctgcccggacctgcacacctgcatacatcgataccacattcatccaagaactgcgtgcagcgtgc

SEQ ID NO: 21352 - DNA, 631 bp, Oryza sativa
tgcatagcttatggtgtacttgaatttgttctcgatgtgcctaataattgattttggttcaaagccaatgttaccaacaacactgctgtacatctcacttgccacaaaagctgaagtgatgtttcggtgatacttctccaccccttgtaagtagcacttgtgctcggtcacaatgctaactttccaataatcattccatttacccttatatgcatggacacgccacggacaatcttccttcatgcacctcacttcatacacataatttgttgacttgaccaccctaaactctctctgcaaggaaactgcccaatgcttcaccgcctccttcatctcatccttatgagcataccttgcaccctcaattacctcgttctccttatactcccagggtacatgatcaccctctgatataacaagtccagagaagtcctcatttgcccaatcagtggccattatatcacctttctcatcggatgatgcgtcgtcgtccactttctcattatccgaatcttccctctccatttcattaacaattataccgacttttttcccttattcgcatgcccatagcctgctccttccttggttgattttcctcattttgcatcgatggtccaacaacattccc

SEQ ID NO: 21353 - DNA, 1113 bp, Oryza sativa
aggtcttttaattccttgttttcgggtacacacaatctttcccccatccagattgttccttgttcatcctcaacaaaacctcgggcttttccaactctcatgttctttttgagctctgctatttcaggatcacttgcctgagctatgcgaacctgctccaccagtgtgggctgtgcctctagggcagccacgaatccgtgctcaactataccaaggttcaaatgttccaaatcacgttgaacctcacaacatagttgctctacccatgcaacattgcagtagctcttcctgctcaaggcatccgcaaccacattagccttgccgggatgataatgtattcccatatcataatccttgatcagctccaaccatcttcgctgtctgagattcaaatcaggttgagtaaagatgtactttagacttttgtgatctgtatatacctcacaacggttaccgatgagatagtgccgccaaatctttaaagcatgaacaactgcggctaattccagatcatgcgtcgggtagttgccttcatgaggacgcaactgccgtgaagcataagaaaccactttgccatcctgcatcaacacacatcctagcccctggcgagatgcatcacaatagacctgaaaatctttcgtctgatcaggcaggattaagactggtgcagacaccaaccgtcgtttgagttcttcaaaactcctattgcattcagcagaccagatgaacttttcttccttcttcaatagctgtgtcatcggcttagcaattttagagaagttctcaatgaaccggcggtaatagcccgcaagccctaagaaactccgaacctgagtgactgtccttggtggggtccacttggtaaccgactccacatttgctggatccaccgctactccttgagcattcacgatgtgaccgagaaactgaacttccttaagccagaagtcacacttgctgaacttggcatatagctgatgctcctttaacttttcaagtaccagtcgaagatgctgctcatgttcttcctcggacttggagtagataagtatgtcatcaatgaaaaccacgacaaacttgtctagaaattccataaacaccttgttcatcaaa

SEQ ID NO: 21354 - DNA, 1991 bp, Oryza sativa
atattgtgacatgtggaacccaaaaaaaaattccacatgccgattccgattattatttgcatttattaactagggaattagctctaggttaattaagataatttcttcgggcaatttatttaaccaatttttaaagcaagcaaaggggggaaaacttcagggcgtgacaaacctaccccccttaaacggaatctcgaccccgagattcggaagagctggcgaagaggtgcgggtgggtggccttcaactcatcttctctttcccaagtggcctcttcctctgagtggtggctccactgaaccttgcagatcttattactttgtttcttgtccttctctcgctggtttcgaggatacgagtcggcttctccacatacgtcagatcttcctgaatttcgatgtgatccggacttgcctgttcctcaggaactctcaaacatttcttcaactgagagacgtggaacacgttgtggatgccaagcatgttggagggaagctcgagctggtaagcaacttcacctctacgttccaagatcctgtatggtcccacaaagcgtggtgccaactttcctttggtttggaagtgatgtactcccctgagcggagtgacacggagatacacataatcccctgtttcgaaagcgagctcccttcggcggttgtctgcatagcttttctgccgagactgcgcgattctcaatctttccctaacagctctgactttctcttctgcctcatttaaaacttctgtaccaaacaattggcgttcccctgtctgatcccagaagagcggagtacgacaccttcgtccatacagtgcttcaaatggtgccatctgcagactagcttggtaacctgtggtgtacgagaactcagcatacggtaagcttttgtcccatgctccaccaaagttaagcgcacatgctctcaacatatcctctagtatttgattgactcggtcagtccggccatctgtctgtggatggtaagcagcgctgaaattcaaaccgggtcccaattcttcttgtaatttctgccagaactttgaagtgaatcggcttcctcgatcagactcgatcttattaggtacaccatgtaacacataattcttgccagatagagttctgctaatttcttccctgagtaggtagtgtgcaccggaatgaagtgagccactttggtgagtcggtcaacgactacccaaatagaatcatgccccgatgatgtcctgggcaaaccggtgatgaaatccattccgatttcttcccacttccattctggaatctgaagtggctgtagcaaacctgctggcctttggtgttctgcctttactcgttgacagacgtcacatagtgctacgaactcagctatttcccttctcatgctgacccaccaaaacttctctttgaggtcttggtacattttggtactgccgggatgaatggaatattgagtttgatgagcctcggttagtatcaggtcttttaattccttgttttcgggtacacacaatctttctcccatccagattgttccttgttcatcctcaacaaaacctcgggcttttccaactctcatgttctttttgagctctgctatttcaggatcacttgcctgagctatgcgaacctgctccaccagtgtgggctgtgcctctagggcagccacgaatccgtgctcaactataccaaggttcaaatgttccaaatcacgttgaacctcacaacatagttgctctacccatgcaacattgcagtagctcttcctgctcaaggcatccgcaaccacattagccttgccgggatgataatgtattcccatatcataatccttgatcagctccaaccatcttcgctgtctgagattcaaatcaggttgagtaaagatgtactttagacttttgtgatctgtatatacctcacaacggttaccgatgagatagtgccggcaaatttttaaagcatgaacaactgcggctaatttcagatcatg

SEQ ID NO: 21355 - DNA, 14542 bp, Oryza sativa
ggcggtaatagcccgcaagccctaagaaactccgaacctgagtgactgtccttggtggggtccacttggtaaccgactccacatttgctggatccaccgctactccttgagcattcacgatgtgaccgagaaactgaacttccttaagccagaagtcacacttgctgaacttggcatatagctgatgctcctttaacttttcaagtaccagtcgaagatgctgctcatgttcttcctcggacttggagtagataagtatgtcatcaatgaaaaccacgacaaacttgtctagaaattccataaacaccttgttcatcaaattcatgaagaaggcaggtgcattagtgagtccgaaagacataactgtgcattcgaacaacccgtaccgagtgatgaatgctgtctttggaatatcctcttcgcggatcctcaactggtgataacctgatcgcaggtctatcttagagaacacagtagctcctttcaactgatcaaacagatcatcaatccttggcaaaggatacttgttcttgatggtgacctcattgagtgcgcggtagtcaacgcacatcctcttggttttgtctttcttctccacaaagataatcggagcaccccaaggcgacgtgctcggacggatgtatcccttctgtaactgttcatcgacttgcttcttgacttccgccaactcgctggctcccattctgtaaggcctcttgtggatcgatgcagttccaggtaccaagtctatccggaactcgatatccctttttggtggcattgttgtcagatcgtccggaaaaacctctggatactctctgactatgggaatatcctccagcttcttagtggttttctccactgctacctcttgtccttcaccagcagcctggtttaaactaatccctggcttctgcggcactggagactggaagattaccacctctccttttgcattggtcaacttgatggtgcggctggcgcaatcaatcactcctctgtgccttgtcaaccaatccattccaagtatgacatctaggtccttggattcgagaagaatgaggttggctggaaaaatcaacccttgaatttcaactgtcacagatgggcagtagtgagttgtggtcatgccacctccaggagtatgcactcgcattggtatcttaagcttcactaaagataacccatgtgcaccagcaaaacgcttggaaatgaaggaatgggttgcaccagaatcaaacaatattactgccggtgtcgagttgacggggaatgtgcccaatataacctctggtgctgactgcgcctcctctgcagatgcatgattgacacgggcctgaacgaacttgggtccagcacgtcttggcttcgggcactttccaaccgtgtgtccgggtttggtacaattgaagcagagttcgggtttttctcccaacctcttgggctgttctggcagaactggctgaactgattgagctggaatctttagtgaactcggggtagggttgagactgtgctgctcactgttgttgtgactatcactatggtgggtcttattgaagctacccgggtggtagggacggtgctgtcggataatcatggtgaaaggtccaccgtgacgtcccatcgtgtaacgaggcttctgacacttcccctggggagtcctgaactgggctgccttcctcttacggttcattttgttacactgctcctcttgacgaatagccttgtccacaagcttctcaaagtcctaatagtctatagagatcaactggttggtcaattcatcatcaagaccagacataaacttctcctgcttctcggcatcggtacgcacgtcctcaggggcgtagcgcgcgaggcggttgaactcatgcaaatactctataactgttttggttccttgttgcagggaacggaactctctcttcttttgtcccacaattccctcgggaacctgtgctttattgaaactatgacgaaactctgtccaagtaacctctgccccagttggacgggtcaccatgtagttgtcccaccaaatagaagcgggaccttgtagctggtgtgtagcaaaagcaaccttctcctgctcgttgcattgcaaaagattcagcttcttctcaatggcatgaagccagtcgtgggcctcgattgggttggtggtgcttgagaaggtgggcggcttgacacgaagaaattctaacagtttggactgaggaggcggaggaccaaattgcgggttctgctgctgctgctgtgcttgctgttgcacctgctgcaacacctgatggtactgtcgctgcatctgttgcatcatcattgtcatcatctgagtctgattgtccaacacctgagcaattgttgggttctcaggtggtggggacggactgttgtcagatgcaccgttggcacgtgctccattgatcggctcttcgctgccactggcgttgttcgagtcgcgtgaaccattccttgtctccatctgaggggataggtagaaatatgagaaaaggaagaaaacaggggctcagaaactaatcttgcttatgaatttaagtgcaattatcttaatcttgattaaaacactgaaaaagaggcacgaaactcctaattgaggcagtcataccactgacacatgatatcgaccgccgactaacccacaagcaacaaacctaaacacgaaaactagcaagcaaacagactaagaaggcgataaagctaagggcggcgactctgaagctcgaggcggcgcttgcaaacgagggataggactgacatctaaagtagacaagggataggaaccaactcatgctcaaatccaaattaaacaaagcaaaagaagactcaaataaataaccgagcatgatgatttttatgcatagaacatttttcatgaactcaaataaagacactaatgcaactaaacaataaattaatgcatagactagttgcatggaaaatgatgcgcataacattgcccccatcgaatatagacacgacctaatgcataacccccaataaattcccgactgactgtcgaataaactccaactaaaatttttctaaagccctagactgagctcattttttaaaaaaaaatccgatccgaaagaacgaccaagatttttcccgcaaaccaaaggggcaaaactccaaatttttcccgaaacaattccaggtgcaaaaaggcatatgcagatgaaaaaggggttcagagggctcttagggtttccagttggcttgtcctacggtcaaggtcggctctgataccaacttgtcacgcccagaaattctcaaaccagaatttctaagctgaatgtgcattaaatccctgtccaggaccagccagggtacacaaacgacaattgttgacatacagatccacgtcttacaaaaatagaaaagattacaaatgcagcggaaaagaataaaagcgagctaaaccgggaagcttgacttcagcagcgggcgactccactccacaggcaatccttgacggcagcgacgaaaccaactttgacaaaacagctccaactaggaagatctccagctctggtgtgggggaaaaagagagcaagactgagtactacccactgtactcagcaagtcataccggaagaggaggtatgatgcaggatataaccaaaggaagctaggggttcttttgcataaagcaggcatttcaaagcagtagttgaaagcagtaaaacagctgtagtaattaatcaatattaaccaaacactgtccaacgctacaccacgttgcaacaggcccaaccaaccacctgaactacaccagttcattaagctaaactagggatgagactaatcacggtgaatctggttgatcgcccataaccgcgggcacggctattcgaatagttttactctggctagaggtgtacaactgtacccacaagacacgattccacacatgtcgccatgccccgaagtatcaccatgatactgcaaagggggaaatcgtgacaagaccctccacataaccctcccctaaccatccacaccacgctaaggtttcacccccacccctcaaaaggcagtgggcggtcccctcttgcgccgcggtgaatccggcagctggacaaccggacaccccggccgacccaactccatcacgcccaccctcgccaccggtgcctaggaaagggtcgagctatacttcagatcaagcagttacccactcccgcttgtggtaagcacggtaagtctcccagggtttcccgtgaaccggtccttaaccgccatgggtgcgaccagcaaaaccatgcacccacagcccaccattcagtgtattttaattaactcacaccattgcggtggcaccaatctaaagctatgccaaaagacagagtctatgtaataatgtgatccccatttgtgtactagttgaactaagcatggctaagcatttcctaaaccaacatctaatcattttgatacccaggttatcaatggcatatggtaaacaataaatggctgagtaataggacccatcccacatgatattgtaaaagaatgcaacatttaatagaaatacgggatatttgtaaattgggtacaatatgatcaaacgtattgcatgacttgccttgctctcgcactgatgagatcacagcaacgtcttcgagaaactgcggatcgacgaaacggccgaaacctacgcgacaaacaaagcacacaagcaaaacatgctataagactacagaaacaggaaacaaaaccatttttaatggattctttgcatttttcttgatttactgagacttgaatggacttaaacggagctcggatgaattacttatgaattttagaagataaactgtgtttttactaataaagaaaagtccttaatcaatttattgcgcaataaagcccagggctgacgtcagcgaggggagggggtatcgccgacaggcgggccccactggtcagcggcactaagggggggagagggggcggctggcaagcgggccccactggcagcggcacaaggggaaaggagagggaggcgccggcatgtgggccccacgggcagtggctcaagggggagggagtgggcggcgacatgctcggcacggctcaagccggccggccatggcgaggcgacgacggcgcacgaccgccggcggtgaccggcggcgcggggagacggcggcggccggcgcgaaggcggcggcggcagccgaagacgacggcgcacgcgcggagggcggcggcgctcacgggggagaggaaaggaaggaggaaaggggattcctcaccgaggcgatggcggcgaccggcgtgggaagagacgagcggcgatgaccggcgacgcggaggcacggacgggcggcggcgacaccctaggagaagatggagaggcgttaggagaggagacgacgaccacggcggcttgaattgccggccggagatggaggggagggaaaaactcaccggctcgcgaggggagaggtgctccggtgggattccggcgacgcgaggcggcggccgggaaagctcttgcggcggcgaagctaacagcggcggcggtttggcgcggcggcgactctagcggcggcggctcgcggccaaaggcggcggcaagcggcggcgctagcaacaagcggcgcgagcgcgataggaggcacgggagagcgcggcgagtgcgaaaaacgagagaggaagacgcggggagcgatttataggtgcgggagggggcggacgtggccggggaggtggccgatttggccggcgacgtggggagtggagggagagtgagagaggtggattcgaaatcgaatcccgccctctcgagtgcgcgcgcgggccgggagatgcgggggaagaggcggcgacgtgggggggacgcgggagcggcgcggcgtgggcgcgggaagagcggaggaggcggcggcgtggcggattcggcggcggttgccgtcggaggcgggtggctggaggaaggggacgacctgacaggtgggccccacctgtcagcgtcccggagagagggggaaggagaacgggccggcccacaaggggaggccgagcgcgggcgacgggtggactgggccgacggcccaagaagaggaaaaaaaaaggaggaaaaaggaaaaagaaaaagaagaaaggattttcctgggattaaaattgcactttggtgatttttaattggtaaaaattatttccaaggctctaaaaattccactaaaaatcctgttaatatattgtgacatgtggaacccaaaaaaaaattccacatgccgattccgattattatttgcatttattaactagggaattagctcttggttaattaagataatttcttcgggcaatttatttaaccaatttttaaagcaagcaaaggggggaaaacttcagggcgtgacaggacacttcctagccagatgaccaggttgcccacacacaaagcaagtcctctcatcctggttaggattgttgttgttcttcttctgcttcttgaagttggtggtctgttgagctttgtatttccccttgctcttgttctgggccttgtgcacaacattggcactagactgcccaccatcgcccttagacgcggcgtatttttcccgagttttctcctcaacatcaagagacgctatcaacccctcaacggagtattcctgtctcttgtgtttgagtgcagtaccgaaacttctccatgatggaggtagtttcgcaataatgcacccgtccacaaatttgtcgggtaagacacacttaaggagttcgagtttcttagccatggtttgtatctcatgagcctgttcgactacagaatggttgtcagccatcttgtagtcatgaaactgctccatgatatacagatcattgctagcatcagtagcaccgaatttagtatgcagtgcatcccacaactccttagcgtcggtcatatgcatatacacctcgaccagacgatcgccaagaacaccaagaatgcatcccacaaagagagtagtggcttcctcgaattgcttctgctgatcagcagtaagaattccttcaggtttgccagtactcacccagaagcatttcatagccgtcagccatagagtgaccctgatctgccttctcttaaagtgcacaccggtgaatttatccggcctcagtgcatcggcaaaaccagccatagtaaaatcacggcgcctataataaggtttttggattgttgaaattataagcacataatgatttaatttattccataaataaatcatgatattgcagatgtaaactagattgaacgcatcattagatctacacatgtaaactaagcagtaaaacatgaacagatcaaatatgcgcaacatgtcgaacacgtaccgaggtggcggaaagaccggttgctcggcaggaactactcgcggttacgagcgtcgacgaaggcgtgaagcacgcgagcggagaggaaggcgagccgtcgcggacgaatagggagcagtcgcgcaaagcgcttcccaaaaaccttattgccgccttctcccggtgcaggacgtcaaaggcagaggttctggagacctgctctcccgatcaccggtgcacgccggcgagcgggatggagtagtctacgagcgacggcgcggtacatagtaggaggtaaaccctagattgatttcgcgtgtgttgcatgaaggcggcggctcggtttatatagagataggtcgcctgatcacggcgcccgcgtaaaccgaaccggacaagtcgcgcgtaacctatccggactccacgccgtttttcacgcaccggatttttcggaatgtttccaaaacaaaacaaatccgattttcccgtagcaaaacaaaactgtaaaaggaggctgcatctgcgcaagggtgaggagtcaattttgcggaccaccggcgagcgggatggagtagtctacgagcgactgcgcagtacagagtaggaggcaaaccctagattgatttcgcgtgtgttgcataaaggcggcggctcggtttatatagagataggtcgcctgatcagggcgcccgcgtaaaccgaaccggataagtcgcgcgtaacctatccggactccacgccgtttttcacgcaccagatttttcagaatgtttccaaaacaaaacaaatccgaatttcccgcggcaaaataaaactgcaaaaggaggctgcatctgcgcaagggtgaggagccaattttgtggaccattcgatgcgtacatcgtgcacgcgcaccgcctgccctgccaggcgagcgagcgctcgcgtgtgtttcccctcttctctccaccacacaggcttcaagtggctaggagggcatcctcccttttaaggaggtccccctctcctagaataagcaaggtggtactaaactccacatgcatgccatcccatgaggtgggcttttgtgattttccaaagaattaatcttcgaatgggccttagcccatctattaattccaacaagcaatacacagaaaattgcaacttggtactccatatcaaagaatataggcatgtgtttgattcaatggttggaatgggttggattggattgaattgaacacctttcataggtgagatgagatggtccttaatagaaaatactacatccgtcctaaaataagtgcagcagtggatatttgtgcccaacatttgactgtccgtgttatttgaaaaatttgtgaaaaatttgaaaatatttagtcacacataaagtactattcatgttttatcttctaatagcaatagaaatactaatcaaataagatgaacggtcaaacgttgaacgtgaatagtgcaaaaatgcacttattttaggacggagggagtatttcccttagatttgagttaccttatcccttaaaaactggcaaaccagtccaacctatttttttctctcactgatacgtgggtcatcattttttcttaaaaaaacaaagaattgaaggattggtttcaggatagaaacaaagaaccaactccaagttgaaagtgtagagaaagagcaaagcaaagaggctggcagagagccatatctcatgctcctccaagagcctggcgatagaggccagctggtctagggagcatggccttggttattgtgcccctgcctcctccattagcagcgcttcgcgaaggcgcgcacatggctacgagaaggtgagcctggggtccttgatgtccagctccaatggggcggtgcctgcctcattgtcattgaggggtaggagacgaaggtagcaactcgtgtagaggttgatggcggcagcaacggtggctaagctgtggaaggtggcatgctcgccgacgaggttgatcttacctaggccgtggcacaaaccatcattggtgatatgacaaatcctttctgctagtgtcgaatcaaattgatcgatgttgatgtatgcgataagcttattaaattgggactcaatattaccgaagtttggtactccaagcaacaacaacccaaaggcaaccgcttttaatccctttggatacactccttctgactcactttgaactctcgggttttagggcctaaactatgcaaactacacggatgtgtatccctatatatgctattcggcacgtataggccacaccacccatagtgaagggcacactttggtgttttttgcgcttcagcttttgattatttgtgtatcagtacataaaaatggtttttgttttgagacatgggagcaacaaataaaacattaacataggttaaaaggggccacatacttgttttgttgccatgcaaaacgaatgcaatgtgcaacaattatgctcaacactcacgtactcataaagttgtatgacatatacttcttgctggcttggtggcctacagtatatgaagaaaggcatgctaaataaaagaaaacaagttaatacaacataggcttacgacacaattaatttggtcgattcataaataaggaagattcgcaagaaattaattgatcaatagcaaagattttattattgattgcacctgaggtagttgctagatttgtttattcatcaccagcaagaatcatgttgccatatcaatattttacttgttgattcttctttcccctgtatattcaagtaaacggaaaacactagataatactcgtattagataaacaattctatccatgatctgaaaaaaatcaaaatatgccatagtctacatttcattgtagaaaaaaaaggatacaaaggattttttttattttctgaacctttttaatatttaattttagaaataaacctatcgaaattttattttcaagatcttttggccacgctaaccaaactggcgtggcaaaataatactgtcacgcctgccatgatagcgttatttggtcacatggcaaaactgtcacgtccgctataggtggcgtgccagtgttgttttgtcacgccagacaggttgtcatgaccaaaaggttcagattttagaaataagttttgaaaaggcttagttttaaaattaaaaattaaaaaggttcaaaaaaatacactaattcccaaagaagaaccgggtctgtaatatgatgttcttaacttgattttggtcttgaagacactggaagaacatacaaacagaagagtataaattagatagtacatgttggaattaatggacgggccttagcccactcgaagattaattctttggaacatcacaaaagtccacctcatgggatgacatgcatggggagtttagtatcaccttgcttatttaggagagggggacctccttaaaagggaggatgccctcctagccacttgaagcatatgagccacacgcacgcgctcgcctcgcctagccagggcaggcggcgtacgcgtcgaatggtcagtcaaaattaattcctcacccttgcacaaatgcaacctcctatccggttcggttacacagagtggagatcgtgtcccttgcgcagatgcaacctcctatccggttcgattatacagagtggagatcgtgcggacaccctctgtgctgcaccggcgatcgggtcgctcgtagatattactccatcccgctcgccggcgtgcaccggcgatagggagagcagtgcgcgccttcgtcgtcgcccgcaaccgcgagtaattcctgctaaacaaccgatctttcagcaacctcggtacgtgctcaacatgttgcgcatatttgatatattcatgttttactgcctaatttacatgtgtagatccaatgatgcattcatgctagtttacatctgcaatatcatgatttatttatggaataaattaaatcattatgtgcttataatttcaacaatcaaaaactttattataggcattgtgattttactatggctggttttgcaaatgcactgaggccggataaattcatcggtgtgcattttaagacaaggcaaatcagggtcactctgtggctgacagctatgaaatgcttctaggtgagtactgacaaacctatgggagttcttactgctgaccagcagaaagaattcgatgaggccactactctctttgtgggatgcattcttagcgttcttggcaatcgtctagttgaggtgtatatgcatatgagtcgaggtgtatagagccagatatttttttttgaacccggcaaaagctttgtcatttatattaatagagtaggaaaaatggtttacatacagggggttactaaaattcccctcctgcaagaggttttgggctgcagactacgtgatctctcctaaaatatgcaatcctccaagagcaaccgccccagccttgacctaggttcttgcctcttttattttcgccactatcgctgcagtagttgaggcgtggtggcggaagattcttgcattacgctcacaccaaacctcccagcacattagaattatcatcgacttcaaggtctttgtcgaggtgggagtgcacgataggaggaagtgacaccaatcggtccccgaggtaagcctaccccaatcatgcatgagcaggtcccaactttcccatcattggatttcttcccagattctgcaggttactctacaagaagtcaataggtgcacggcagattcctgggtgactcgacataggggacatagttgctgattctgccatcctctcttctgcaatctatccaccgtccatatacagatttggatgaccagccatgcaaaaaatttacattttggaggggcccaacacttccatatggtttcattgaaggtagatcttgtggcgccgatgaattgcagccgatatgccaattttgtcgtgtatactccgttggctgtcagtttccatatgatggtgtcttcatgctcattgaaggccggtggctgaagtagtctaacccaaaggtctacgtattggcgaagatgttccgacgtggagagttcctctgtgcggataacggagatccatactcctgcgtccacggcttccctcacagacctattttttcgtcttgaagcttggaagattagtggcgctaaagacttcggcgttcgaccatcactcaagtgagagtgccagaagctcgccttctttctgtcaccaatagtgctggttgttgccacagcgaacagatctctatcctgattgtcacagggtaccggtgttcctatccatggcttatcgggggctgtccattcgtaccatagccagcggactctgagagcctttgcgaatttgtgcagttccaagatgcctaggctgcccaagtcctttggcctgcagaccctttcccagttgactttacattttcctcctgagatgttctcgccccccgcccataggaatttccatcatagtttgtcaatttcgtgtagtgtgttttcagggatctttagagcagtaaggtgatagattggttgcgccattaggactgactttgttagtgacgttcttcctgttgccctcatgagtttcccttgctagggtgctaactttgttacgatcttgtcgagtatcggctggacgtggatcttttttagcctagagacagtgaggggtagtcctaggtatttcaaagggaaagtagcaaccctcgccgggaacgcaaggaagatgtcatgtagatcgagattcccgcaacggatcgccgctatcctgagggtttaccttcagcctggtgacctttccaaacattgaaaggaattttgaaagatttgtcatatctctggtggttggtgaaatgaagttagcggcatcgtcggcgtaaagtgaggttctcaatctcgccgcccttccattgagagccagatctttggccttggggatctcgtgctcctttaggaacctggcgatggagctggttcaaggagcatggcattggctcccgtgccccggccgccgtctcctcttgcggaaaaaactcccctgagttgcttcacttttctagaccttgaagcccaactcttgcattgcagctgcatgcccacctaagtacctattactgtacaataattcaactttgttatcaaatataattgtttgcataggagtacagaatatttgaacctttgtttctctgtggttctaaaagaaaggacaccaaattcgtcgcaaactattctcagccaaaaagggaaaacgactagtttagatatgattattcatttacgagtacgggttttcagtctttataaactaactggaactgtttgagatcgcttaatcactgacaattatcatgcaaccctatgtgatatgttattaactaggaatatatctctaacattaacactgctaagactagtagcatctaccgattgagggaccaagttggttagtagatgattggaaaaagtacactgaaggtccctcaacttgtcatcgaattacaaaatcatcctccaaccgcaaaaccagatataggacatccctcaacttacaaaaccgttcactttaggtccttcggtggttttgatcccggtttcgtccgatgtggcggctgagtcagcgtgggacccacgtgggtcccacatgtaagggtgtacagtcagcacctctcccttcccccttctcccccttcctcttctctctctatttctctctctctctcttcccctctgcaggatgcccggcgggtggggagctcgtcggggcgaggtgggagaggacatccggcgggccgtcgatgcggcggcggcggcggcggcgtctacgatgcgggagaagggagagcgtcacaggctcaccgcgcgtgcgacctcggggtcgggccgtcagagaggcccgggcggtggcggcgaggacgccaaggcgcgggactccggatggtggcggcggcatacgacgcgctgcgggcgccagtttgggaccaatattagaggagcagagaaaattagggccaggccgtcatctcccgacgatggcggcgaggcagaggaagggcggcgcggcgaggagggctcgacgaagaagatgaggagcgtggtgctgcgggaggccatggcggggctcccggagcacggcgacagtcgcgtgaggtacgacgacacgtggtgacgggcaagcgagggcggcgaaggcgagcccacagcggtgg

SEQ ID NO: 21356 - DNA, 10248 bp, Oryza sativa
gcggcttcgggtgggggcgccgcgccgccggcttctcgtcgcttgccatggcgctggaacgggggaggacggccggagtggcggctcgttggggacggcctcgcggaagagcaacggccggaaggacaacggcggcgacaacacgtcggccggccaactccctcctcgccgtctccatccctacttccctcccgctgtcgccgtctccgtcttccgctcctccctcgccccggatgggagtttcgtcggagcggcatcctcctcctccacctctccactgccattcccctcaagctcccccttcgctctgcccctgtggtctcgccaccgacgctcctccccgctcgcgtgcgccgacctcgtcgaccggggtgacttcaacggggcacgccgcgacgggacactgtgctcgccgccgccgacctcgtcgagcggggtgacttcgacggggacaagagaggccatggcgatgcccgaccgtggcatgctcctctgcaccagcgaccgcgcccgcgcccgccgcaccgtcctgccgcgccgccctggctgctcttcgccggccaccgcccatggagagggaaggagagaggaagtgagttgatggggagggtaagaagtggtgacgtggacagtctaacatgtgagtcccacgctgactcagccgccacgtcggacaataccagggtcaaaaccaccgaaggacctaaattgtaactcgatgacaagttgacggaccttcggtgcactttttcctagatgatttggtcctgcactaccaatttcttattaggatttttagcggtaaaaaaatgagttgttatatatgagctgcagacagcagcacaaaaactggtgttccactattagtttgacttggccgacagagagaggaacacacattctttttagcgagatgatggaaggaacacacattctttttagttggaatggcagtttgcaacacactggattgaagaatcagtagctgtagagatgttcgttatcttaaccaatcatggagttaggtaatctattagaatattcagcttattctgccgcggatgcagatcgtgattgctgttttgttttcgtgggaggtcgtatttatatgtaggctaaacggggtaaggaaatttgagaattacagagtaaagtctatcaccggtccctaaacttgtaccgttgtatcattccggtccctaaactcgcaaatcgaccgttcaggtcctcaaacttattcgactgtgtcatctcggtccctaaacttgcatatcacttgtttaggtcctccaacttgttcagctatgtcaccctggtccctaaacaggatggtctaaaaactttatatcaaaaaataattcataaatttttcatgtgaactctaatgaagacgaactttatatcaaaattatagctctcgacacgacctacaactttgtagttgaaaagtttttgaattaaaactgtttagggtcccaaaatattattgcatgtttatagattttgaaattttaattttaaaattacattttgggacaaaaaatgacttaaaataaaaaaaaatcaactacaaagttgtagatcgcatcgagggctacaagtttgatataaagtttgtcttcattagagtttacatgaaaaatttataaattatttttaaatataaagtctttagaccgtcctatttgacccagatgatattcaaatccaagtttagggaccggggtgatacaactgaataagttggatgacctaaacgagtgatctgcaagtttagggaccggaatgatacagtcgaacaaatttgaggacctgaacggtcgatttgcgagtttagggaccgggatgacgcagcggtacaagtttagagaccggtgaaggactttactctagaatacactagactagagtctagagtatacatagacatgctgcatagtaccatgtaagtggccaatttttttttttggttggcaaaacagattatgtgatatcgccccacaaacgtgcaagcacaagttatatatttgccatcaaacctgcaagcacaagctcaactctagatattgagaaaaatacatatatccggctaataatgtagctacgctttgtgtaattatgatttttcgccactgatgttataactcatgaacagatagattctacataataaatattgtctctttatctaactagatgaaactccgcgcgttgcaaaagtttagtatgataagagcaaataaaaataatatttaagatagctaaacaacataagtttacgtaagttgatgtggtttatataatgatgattcaaaagtaaaagtaagaagatgtagctttataacagaagaaaaggaggcagataatttggactatacatttacgatcaaagggctaaaaataattaaggttatatggtttaatgagagaagaaaacgaggaagataatttggaccatagattaatcatccaaaaactaaaaataattgtgatatggcttaatgagagaagagataaataacatgaactaagtgaggatgaactatatagatatataggatattataaaaaatgatggagagatttaaaatattatgtgatttatgtgacatgatgatttaacatgcttacattttaaagctctaaaatttaataattataaaataagtaatataacattctgtacagatgttcaaatgtaatagttgctagtggaagatgatgtgaccttctttttgcatgttgagttttagattttagtgggttgtaactttatataggataattaataaatattacctatcttcattaacaaattattattattattattattattatcatcatcattatcgtatacaaaacaaatatattcacatataccagtcacattaaaacttactgaaaaaagagtagtgggagcccaatcataccagagctggaatagtctagttttttttctttttttaaaaaaaaagagagagacggagaaagagaattcaaatgacaagctggattggaggcccatcatatcacgcttaaaaacctctcctcaccctcgcgctcacttcctactccatctgctcccgccatcgcagtatcgcaccaatctcaaagcacaccaccatggcgcgacgtcgcatcctacccctcctcctcgtcctcctcctcaccgtcgccgtggcaacgtcgtcggcgtccgcctacggcgccgatgatggcgtgaccgtgatgaggcgcgttctggacaccgccgcgcctgcaccggccccgggccccgcccccggcggcgccatggcgaacacgacgacgagcgggtacatcagctacgacgccctgttcgcggaccgcgtgccgtgctcgctgcgcggcgcgtcgtactacaactgccatcccggcgcggaggccaacccctacacgcgcggctgctccgccatcacgcagtgccgcggctagctagcttaattagataggccgccgcactgccggcgagatcgtctcgtcgcgccatccttttcttctctcctgcagtcaattgttctttctgttggatctgatttggtgattgattcatgatttatcggtgtaatgttgtatacttgtcaaattgttggaaagatatatatatatatatatatatatatatatatatatatatatatatatatatatatcttaattaagacactcctaattcaaattgtgagtgatgttaatttgtgcgcatcagcgcagttaacagagagtgaatgtgaagttggtgccagtatttgaataatggatcaaaaatgctagtaattaatacttccaggcggtcataatccagctttgttctaacatttacggtttaacctggtttaaccatagtccatggttgtaatgagctgttcgggactttggattttattcatgcaattttttctttctggttttgtaatcaaggattttgtattacctctcctgtatgtttgatcagaaccgttgtgcaccaatgcaatcttcggtttattttggcaatcttcaacaattcgttgatcgtaaccactgcagatgatgagaaagcctgacagcgaacgaataatgtatattataatctgggatccttggatgtaaatgtaatttccagagtaaccgacaaaatcatgtgctgcccttcctccaacctctgcgtggttgtcatgctcaaaaaatcacggcagaagaagcggagagagatcagataaaactgtgtagttgttgccacgtttctgcaacgcagaatcaactcctctgacttcatctattcaggtcaatttagacatataaattatgttggtatgacagctgcagaaggaaacatgagtagtggtgatccgtgatcaaagaggagatgcatgcacgctgcccactaattcaacaagatgatgatggcgggaacatgcaaacattctcttagttttttttatatatttttaagaatggcattcttttatttggaatggcagtttgcaacacatggaattgaattgaagaatcagtgtagtgtacattatcaatctatcataatccaatcatatcgattgatggcccattgggatcttcagggaagaagtctcatgtggatgcagtcctagttgacctcaggctttccgtaatccaaacaggagaatttcctcacctggttggtactggagctcaaaggagacgaattttttttatttttaattttttttattaaaagttttacaaaaataattttccattttgaaaattgacggaagtagtcgcctaccgccctctgggaaggcgatttttaaaaatcgccctcccagagggcggcgaaaatgacgtggcagacggccgttcgctctcgggcgacggccgtcaacgaaatttgcaggcggcccccttgccgccctccgcgagggcgattttgtactgtgcggggggccgcctgcaaatgggcggcgagggggggcatggaaatttgcaggcggcccccttgccgccctccgcgagggcgattttgtactgtgcgggggggcgcctgcaaatgggcggcgagggggcatggaattttgcaggcggcccccttgccgccctgggggagggcgattttgtactgtgctctatatttttgtataaatatcaatagttatcaaatctttttatattgaaaactatacaagattaaaatctccaagactggtaaaatacaattttattattttttagggcatatttggattgttaccgtacaaatattttgttaccgtacaaatattttattaagttttagggcatatttggattgttagtgccaaatttttcttcacgaccaaatatttggtaaggtaaaattgcatttgatcatatttggtttgctgccaaaatgtaaaattgtagtgaagaatgttctacataatctcaaatctagattacgtattaccaatgaataggcttccattttcgtgtgttgtgttctagtgggaaagaagatatgaagaggttgccttcagattgtcaattatatagcgtcgttttcactgcaatatatgtgaactcaatgagatacattattcattagatgtgacaagacgatcacgcgtgggcgtgattcactttatgtaaacaggcagcgccgaaagttgatagtgataactcgagctgccgcttttcatgtgtgctgttgtggactgtgcgcgctactggatctgacactaccgtgcagcgccgaaagtgtgttgtcatgagcataagttgttctagcaccatatgaatgaaaagaactatgtagacgagacaaacacaagtagtactgcagtagtaatagcaaaagtagtactgctttacaagtttgtaagccaaaagaaacggtcacataaggactgaagaggtagaacactactgacgaggcctcttacccctgtccctcctaccctgcgccctaatgtgcccgtgggagtacgtgagtcggtccgggggtacggcacggccaacccgtcctgcctgtacaggtgtgacctctggctgctcctgagtgtgcgcctctggagctcctccaagctgagaggagcctagtacgtcgtggtggtctgcaccgtgcaagtcgtcgtcgtagaactggctagtaggaccagtcctaccggcgtgagacgaagaggccccagtaccgaagatcccggctgcaaatcctgctggacaaggaccatcagtttcgtacaggtatttaacagtattaataaaaagtaaagtaccgtgtgggcgagggatcgacgctccgtgagaggaagagctggcgaacgcgcccgaagaggtggcgaacgcccctgcggagctcgtggaagcgccggtcgtgcctgcgaacgcgctcgaaggcagacgaggtcctgcgatgaggaaacgtgcagttaaaacatggtgacataatcgtgcaaaagctgaaacaaaaatgaactaatatctgggctgaactgtaccgtgcgaaaccggtgctgtaggtcgcactgctccgaagctaggggcgttcgaaggcaaacgaggtcctgcgaggatggaacatcaagttacgacggggtgatgttttcgtacaaaaacagaaacaaaacttaagaaacctctgggctgagcagtaccgtgcgaaataggtgccgtaggtcgaggtcctgctccgacggtaggcgcgcgaggccgtggttgtaccggaccagctggaggtacgacgtccacggcgctgcgacaggagaagacgcgcatgaccgcacgcatcttctcctgcatccggtcgaaggtcgtcctctgctcaacgtcagtcaagtgcaaacctctgttcaaccttacttggactgcggtgatatcggcactgatatcccgtgcggcatcagcctatgcaagatggaaataacaaattcagtagttgtcctatattatgcaagataaatgaaataattgtaagaagtaatacaaattggacgtaccgccacgaagtagtcccggtcacggtgcgtgggatacgcgtccgtgacagcggcaacgtgcggctctggggcgtctggagtgaaggtcacacgcgcacgagtgcgaggaaggtaccagcgaaggtagtcacggtagttctcctccgttgtgggaagagctcgttgatcacctcctctttagctaacacccagtcgtcaacgtactgctgtacacgtggagcccaaagtgctcctgctagctgtccccgtcgagtcaacctgtgaagagaggtaaattatatggctcgatgaagtaattatcataaaaagaaatgaacaatccgaactcacgagtggtcggcagggaggacggtcggctgcacgttgcccggaaacacctgcctaagtccgaactgtctcatcacacgctgcgggcagtgaggctcaacgaaaatgtcgaacaccatcggcaggatggtgagccagtaagcctggtcgcgtgtgcacaaggacgaaagtcctagcggtgctctcgcagcgacggcctcttctgtgtacggctcccagatgacgtcgctcggctggagacggtcaaactcgaacacgaagtccgggtaaccacgtctcacctggacgtgatcgtaacgacgctgcaataaacatgatcggaattagacatgttatgtgaagaaaaaaaaaagacgactgataaacttataacgcagcgaagttgcactaaccccacgtcgacaccagtaagtccccatcgtgggaccgtcctctggccactgcgcgctgcgaccaaccccgtagggtgcgctgtccaccactggtcaacctatggcaaacctctcggctgcccaaagctgaagcaacatagggcagccagcgatgatcgctcccgcgtcagtcttcgtgcacgcctcacagagggcacggtacgtggctgctagcacggcagaaccccagctccactgcggcacgtcctgtggctgagcatccgcgatggaccgtgcgtagtggaccagccggaagtccacagcgtgcccgtgggtgctagtgaacatcacccacccgaacaaccacaacaggtacgcctcaagggagcgtcggaccgagtaatcatcagcgtcagggtgcagaaggtccgcctacaattaagaatgaaatgttagtacaaaacactcattcggtcgcaaataagcacgtatgataataacaacttatttacttacagtgaactggagcaaccaagccttgctaggcccgactgtagagtacggaggaagggtggtggtcggtcctaggtgtggaaggcgcatcacctgctcgaagcgcgcagtgatatcctccttccacccaaaaacaccgtccacgggaccaactgctgctcccgccagcggtagcccgagcaggtacgacacgtcctgcagtgtcggagccatctccccacagggaaggtggaacgtgtgcgtctcaggtctccagcggtctacaagagcggcaaggagtgaccggtctgcatcccaccgcttcgctgggtcacggtcgtccgccgcagcctcaacaagcctacaaagtggtagaaggcctggcgcacgcaacctgtatagagcaaacttcaaacataagtacaacacaaagcaaagttgagttgaaatgagaacatacgcgtaccaaggaacgtgacgggggtcgacacgcaaccactcgcgcgacgtgcgtggacggaaggtgccgagctgtgcaccctcgactgctgacaggaacgagcggtggttcctgtcaatcccacggttcaacagcgccggtgtgtcgtacgccatacctgcatcaaataggttgatcagaaacatataaataattagttcaacataagtaataaatgttcataagcgaattactaacacatattaaacaagagtacaaacaaacaaaagtgtttagtccgaacactcatcacgataacattatgatacaacaccgaatagttcgcaatactactagtacaacaatagtcggaggtactcattacaacaacattgaattgaaattacacgatagaagtatttagtccgaacactcattacatcacaacagcattttattttctaaatcgaaagcattgttacaccatggaatcgcctgctgcgcgacgacgccttggccttgcgcgcctgcttgttgttccttcaccaggtggtcgcctaccatcacttgcctgtccagatggactagcatctgcgccgcttggaacttctgcattcttcgggcatttcttgtaagtatggccgcgcagatcacacttgctgcagcgtaaagtcctcccacctgcttctgactcatccatatcatttctgatgcgtctagtttggcgtcgaccctttttcacccttaacttagatggatctggaatataaaaaacttgggcactcagcattgtgtaagatcctgagatcccgaacccatatatctcctcactccatgtatgaaagattgcttctttcctgaaataatttgagacgtacacattgggagatatgccacaatcactggcagcagtaagaacgtgtgagcaagaaaggtgatgaagcttcggcttcatacaactgcaggtacatccaccatccgccttcaagacacattcctgcacggcttgcttgcgatagataccacgtctgctcctatcaacacacattatttcataccgatgcacttgtgtgccttgagcaacaactcgatgtctccgtgcctttttgattttatcttccatgtactttgtcactacgttgccaaacactatgttgttatcggccatggacggaccaattttcttgtatcgatccctaaagtaggcttgcgtgccgtgaaggatgaattcaacaatagcaaccaatggaagtacccgaactcctcgcattacccagttgtacacctctgccaaattggttgtcattatgccataccgagatccatcggtgtcgaacaatagagaccacttctccttaggctcattctcaatccactgagtgaaatttctgatggacgaccctgacctccttctcattgttggtgggtcatcatgtaatgcaccaagaggtatgggaggctcgtcaccttcaactagtggtctgcgagattgcttatctgtttgcttcgttgtcaactcatccaacttgtcccacaactcattaaatttcttctcttggttctgtgcacagagcctcttaaagagctccataagatgcttgttcttgaattgcttgtagaaatttgcacccatgtgacgcatgcaccaccgactccgaacatc

SEQ ID NO: 21357 - DNA, 2006 bp, Oryza sativa
tggcatgtttaatttgatttctctgtacccttttactttgcgcaggtctctgaatggatgaatgccaagggacatgtaaaatttctgccaaaggatcacgctgttcacctggatttgattggtgaaattcatggaagcagtgcagccgagacttacttcaacaacctgccagataaagataagacagaaaaaccctatggtgcacttcttaactgctacacacgggaactcctggttgaaaaatcgttggctcattttcagaagatgaaagagttgggttttgtgttttccacactcccctacaacaacatcatgggtctgtatacgaacctagggcagcatgaaaaggttccttcagtaattgcagagatgaaaagcaatggtatcgttcctgacaatttcagctacagaatatgcattaactcttatggcacaagggctgattttttcgggatggaaaacacccttgaagagatggagtgtgaacctaaaatcgttgttgattggaacacgtatgctgtcgtggcaagcaactacattaagggcaacataagggagaaagcattctctgccttaaagaaagcagaagcaaaaataaatataaaagattcagattcctataaccacctgatttccttgtatggacatctgggggacaaatcagaggtcaataggctgtgggcgctccaaatgtcgaactgcaataggcatattaataaggattacactacaatgcttgcagtgctcgtgaaacttaatgagattgaagaagctgaagtgttgctgaaagagtgggagtcgagcggaaatgcatttgacttccaagttccaaatgtcctgctcactggataccgccagaaggacttgctggacaaggctgaggcacttctggatgatttcttgaagaagggaaagatgcctccttcaaccagctgggcaattgtggcagctggctatgcggagaaaggtgatgctgcgaaagcatatgagctgacaaagaatgccctatgtgtatatgctccaaatactggttggatccctaggcctgggatgattgagatgatacttaagtatcttggagatgaaggtgatgtcgaggaggttgaaattttcgttgatctgctgaaagttgctgtgccactgaactcagatatgactgacgctttgtcaagggctcgaatgagagaagaaaagaaggttaaagatgcagtgtaagcactatgatgaagaagataatgtttcacgagctctcaaggctgctctttggtctgcactgacactttgttcttgctgcatttcttcttctcgtttttttttcttttttaagagaatgtgggtgggggatggtaaccaaaatgagatattatctgacatacagtagttctggtaacattgtctgtacctgagtacctgagtgaacttgttatcactcgattggtcactttaagtatgttgctgggattctcagcaatagttatattgcttgagttataacgatcgtagagccaaaatcactcaaaatgtagatgattttgatcttgattttgcacgtatgcataacaaacgctcatctcacaatcgtttgggagttggagtgaagcaaaaacttccactaaacccatgttttcacatgatatttcgccaaccttcttcgggctttttttgcgtttccactgaacagcatatccatgtatcgattcatccatctatccatccattcaagatccaaccactttctcctaactcataggtgtgttgttgcgtaagctaagctccgatggatttgcatccaaatccaaaaaccggttgcatggatgcatgagaaacagctcatccctattaactctgcacctaataacaaatccaaatctcgccaaaatcttatcccttttcaaaatctctcttttatatacatgtagctctccatctcatttcacaccatcactggacgagcagtaagtaaacactctgtggaacaatggccgccgtccttcccttgctcgccg

SEQ ID NO: 21358 - DNA, 2676 bp, Oryza sativa
taagagccaaaagcacgcaaaaattatgcacacactttacctcctcctttatatacaggcactatatgatctgcgtgccaagcattaccctcatttggctcatgtacaagcttatctagcctgtggtaaaatatagtgaaaaaaacagtgtcaccatcaatctacaaattaggagaactactcatattcattaatattttgtgagttcagaccacaatagtgtccccaatagcctgtaagttgcctaaataggcaaagagaagttaacataagcacaaaacattgaaaagcataatatcaaagtatggcacttacaatttcaatctacttgcaatatttggagcaacattcctaatgtattcttctctctttttcttgcataatggtctgatattcttgacaagctcgtgacagtcaagtttacacttggagcatataccatgttcaatttcaaatagtgcctattcatcaggcaagcattgctttagtacatataacttccatattttcacatatagctggcataccagctttattcataaataatgcaacttaacactttgtttatgaatgctaattgcagaagattaaagaaaaatctcacctgccgtgcaaacctgccactagttctcgatctgaacacctcgaagcaaggcagaccacagaacaggtcttcaaaatattcaggtgactttgcaagccttccactgatcacaaataacaacattgttattttttttcaaaaaaaaaacacagatggctactggaaataaagtgcacaaatgagacatattacttgcaaggtccttgacataatttgcagagaggttcatcgtgaacagtccagccttgagtgtactctctctctctacttgtaccattatgcaaaaccacctttctccattcagcattttctggcaaaggattactaatatcacaccatggtgttacacgcctcttacttcctcctttaagcaacccctatgaagtagagcacaattgacaaaaaataaacatgattaaaccaaggaatgccaagacatattttttttcatttcatgttcttagtttggtacaaaatcagatcctttaaactgtatttcaaatgaaaaattaatacatcgggatgatatgatagcagctcacaagcaaacccttagctacaatgagatgcctagggtagtgtggcactgtggtgggcctagcagcttaaaagctgcagttttattttgctttttttttgtatatgccaaatcaccaattgaatcctccattagagtaatatcctccattagagtaaaagtcaaacattgcaatatcctctattagagtaaatcctgatagaggggatcctctagagtcataagaaaaacttgcataaagaatgatatagatagaacatagatatgcttaatatcatggaagcgttgcttttgcatattttctgcaatatttggaattaaaccaatattcaaattgatcactcaaaatcaagaggaacgtacttttgtgctgtggttgttggtatctttcaggtagcacaactcaaggctcaagggaagctgtaagggctttcccagtagtctcttctgctcaattggtctaagcgccaaccattccttcacgaacgctttgaacgtattgcaaaatgcaggatccctcttcaagagacgattacttgttttcatggtattatcagaacataaaggtgactctacttcttctggcaggaagttttcaaaaagtggtctgggtcttgaatcatgccctggaacacatatgtacaaatgaattcggcctgtgtgctggctaacctgtaaaatacgaagataaatcaaatgaattcaaagaatgaagaccggaatggaatgtaaaatgaaattaacttcacattaatgagacaagtcatgagaacagaatatgaacagagaggacagttaaacctcaaatcgcagaaacttctcttcaatattgcagtctgtagttgcttgaaggcctaaagtctgaaaaatttcagaaagcctccgacgagcctgcgatatttgaggtgatgttgcataggatatagtgcaaaacattgtataatacaagcaagaactttttattacctttactgatttagcgcttgacattgaagggcaaataactgaagcttgagagatagaagaactatcaaaagctatctcttcatgtgctgttggagatggacaattttgcattaccgtatgaaggctatcatcctgaggaggcatagaaaaagaatcagttgaaggatttcataggactactgactgataagtagcaactagcaagtagtaaacatgtaccaaaatttgcaaggaacgcctcttttctacctcaaagtgaagaggaattgtcctaatactgaagaaatctgactcaaaattcatatcgttgaggccaggaaaattctcaatggacatatcatcactttctacattctctcctggtccatgcccacaatctgcatgaggttcaaaaaattcagcctttcatttcacttacaagcatgtaataatgattggtaccaatgcatgaattctctgttaacgatgttcagatgttttaccagcattatgattctccaaaggaagaaatccaagctgtgattttccctcagatttactgctttcctcaaggtggtaaacttgatca

SEQ ID NO: 21359 - DNA, 3463 bp, Oryza sativa
  unsure (1)..(3463): unsure at all n locations
agtgcccatcctaacctccctaaggaacagtataaaatcaaaaattacatgaccctatggcctacctcaatctctcttatagcatctttctttccattcatcaatgatgagacacggaacagactctggttcaaatgaagccaatgtgactcatctaatgtgttctgtgaccaagacaaaacagaacaatttatagttataatttgacaaaattacaaagtacgctacaggaaaaaaaaaaggaactaacccttgcacagaatatatatatgttgacagcatttgtttgacctcgcctatgagctctatcctcagcctatcatcaacaatcaaatgtaccaaacagttagaaacacaataaacaaacactaacagtagggtgcaccatgcatgcgtccaagagagcacacacattaagtgtgcgaaagcatgaaaactcatgcgcatgaaccatgaaatgtagcaatttactgtgcattattgatttgtttcatttaccagataatcttagtccacatcgggataaagaccatgcagaattgcatttgaagcaggcaatagacagattgggtaagaggcgtaaagggatcaaaagagagcaaataggaataagtgtttttaagcaaatagaggagaaacatttcttcttgctcgactgataggggatgacttgacctgatccctatggaaaacatatctgtaaagaaacttacatatatataaagaaataaacccaacaataaaactaattattcttatctctgaattccaattaaagctacaccaccaggcccagtgaataatactgcagttgctacagtacatataaataatatcatagtgcgaattgtgaatggtgggctacacaacaggatggtgaaaaaaaactcaaaagtcttcttgtaccctatggatgaggaaaatgtatgtgcaagagagaaggctaaggacctgaagcaactctgaagctgactttgggagctccacgaaaacaacattctgagcagatgagaaatctaaaccaacaccgccagcagtaattccaataattgcaaccattacctatttggtagaaaataaaagaactagtaaaatagtaaataatggataggcagtttgagaataaaacttgagagcttaacatggaataccaagtatgaatcgaaccgaatggaagggaagggacaacctctggatttaaacggaaagaatcgacagcatctttcctttccctaggagatgtgcttccgtcaatgcggacatacttgatcctctgctctgtgacaaacacctacgtacgaagaaaaacttcagtcaaaagtattggcaaatgtttttcataaagttagatggtatagtttaatatgatataatgctatctaactattataaagtgaaagtgtgcacccgaatatccgattgatcataagtctgatttttcncatgtattcaactgattaatggactatcttgaacatggcggcaatgggatgattgtcttcaatggagtatctccaagtttatcaaccgacttgatgttagcaagtgaggaagctggcctatgtaatttggcggggctaaggggctctccctaattatggaccccagctagggcattttattttagttttagttccttttggtcatgtaaccgcctttgcaatgggttgttttgcggtggtgaggtcttgtacttcttgctgttctttggcgtgtttggactcctattaatgcaatgatatgcatcttgcgtattcgacaaaaaaaacttccaaaccattacgagaacatctacagtcccacagaaagagtattatatgctagagaatgccagaatgctggacatggtactggtggcttctaaaaaacggtgccaatgacatgtacatggccagaccaattttacacatacaccagtgtttctattcatatgagatcctatagtccagcttcttgacacatcatttattttgtttcatttactctaaagatgaaacttctatttcattaggaggaagtgaagcttacaagatatatagaactacaaatagttgaaatgatacttgcaaaatcaaaattacataaagtaacatagttgtgattataaatcttttcttactgttcaagattctattgtcaatcgtgagaaacatagcatgataaactcgcaaaaaaaatacagaaaagaaacctcagaatttacctgaactccatctaggacctttaaatgatgggcgaaaattattgttttctggcaattagactgagagtccagactaccattatcagctggttctttcatgatgaaatgatttaagaaccactcgctgaacccaggtattttcacaataccaatttcttgtgtagtgagattccttggagatttcttgcaaccatcagctgtgggcaaatgaaaaggaaatacaaggaaatgagcacaatgtttataaggagcagacagaccaatcttactaatcttgaaccctgaaatagtagaaaacatgtgctttatcccaagtgttaataccagtgttacatttaacattgttacattaataattgtttatgagaaagaaacatgttacataaggataaaaagaggaaggttgtctcctttaaagtggcacgctactcttaaaaagaggtggttgcctggttgtttgtcaaaaagaaacataatgttttgatcatggtagttcatgtttaacatatcagaatttttttaaaaaaaaataagtacaatgattggaaatggcaagtaatgttcttcacctgtaaaagtacaacaggatattgcacagttgcaccaacatttctacttgatatacatagtgttcttcagaacagaaatcaacaaaaatgctggttatctttttcttgacaaatgttctctgttactatagataagaaaatggctctttttgaaaagaagttgtaaataaatttcgattcagacagtgtcaagtacaataccatactgcgccatattgcattgcttatgtcataaccaactgccaatatgcaaagctgtaaacccatacatgtttggcattgcatatgccacaaatgccaagcaagcttcaacaaaattacagttccatataagttgttgcattttgttatagttctgaaatctaacaatatcaaacattcaaatgcaacaaggtgtgtattatatatttcagcataacaaaggcacataaaattataactgatacaaggaggtctcattatcatatctgccattagctcaatgagtgttaccttcttccatgttcacctcctcagagtcattgctattgtctggcgaggcaattgtaggaatctcatcactagtgttcacccctttgatacaagatatagctgtcttgatatctgatgcattcagcttcaaccaaataatctgtcgacgtttgggaggtagttcattcaacaaatgcttctttcagcgcctaatctacag

SEQ ID NO: 21360 - DNA, 3149 bp, Oryza sativa
ggggcctgaaaagccagggaagtgtgatcagaaaagtttgataagactaacacaatacaatggcattcaccttttccttaccatagcatatttatctgatgatagatgtcaaaaggtctattgtctcctaggagaaaacaaactgtgagatagatctgacaagcaaaatagaagtctccaatcaaggctatcataagtaaaccatacataagtaccaagaaatcagattaatcaagtaaagaaggaaacatataggaatgacaaaaatgtacttgagtgctctaaatctctacggtacaaacagccagacttcgagccaaatatggaaaaaggaagatattgcaagtaacaagtaatgaccagtaaccaatgaacatagtgcagagaatgcatttgaaaataatatgggtaagtacaaatacactagatgaacaaaaaatggttgaaagagtaatagacaaaaaaaaaaactttctgtaaaatttcagaaaattgggccatgataaagttttcatcattcccttttctcaattacaaggcgcaggtagcttggatattgctatccacacccacctctggaattttaaaaccgtttagatgatgtacacaaaatatgtcatatatcatagcagctatctgcatgattggagatccagatatcaaggagtaaaatagcacaatagcataaggagctttaagagaaattcaaccaatatctttaaagttacaaccttgacaaagagggtgtcccagagagcagcacaatgcgactgacatttggcgctagttccagtacagcctgtgtctgtcatgaggtcataaaatagtaccaacggtcacttaccattagtgaaatcaaatgcaatattgatacacaaggtgactgaagtagttggaataaatagtttgagataatttcaacatttgtgcattgcaatattttagaaagcagggagaaatgctgaaaaatataaccagatcaataaaatcaactgggagaattttattttaaaaaaaagtgaggcgtttctagcacaataaaatatgatctaccaaatttacaaagcaccaaatcaccatcatggtctcatggattggagaattcaagagctgaatactttatgttaattgtattgatacataagattgttgcatgacaagctaataatttaaacacctcatttttttcgtgttttttctttgtgcagcgtatgttgtgtgattcatcgataatcatcagtgcccatctcctattcatcatgcttttgcgaagacggcttagcatctgatatgaaatgaccactgcctttgggcaagctcctaaacgttcaagactgtcttggtgaccaaacactgaaaattatacagtgacaaccgaactgttaaaattgtgctcctaattaaaaaaataagtatataacaaaactgaaaggctaaataaagtagtaatatacaattgaaggacaagtgacaagaaatatgatattagccatacttttttaaacagtatcttcagttcttcactagtatagaagaatcaaattattatattgcatatgtgactcagccaaaagttaaaggcactatttaaacctcaagcgcactggtaaacttgagtaaaatacttatgttacctaagtttagggctgaagttcacaattttcaactcaggtcaatacaatcaatctttggttactgcattataattcctttcatactgttcatgaaagcatttcatttttagctagtgcaactttactacaagatttacaaaacctctagctgatcctaggaaacaatgagttcagtaaaatctcaagttaattcaactaaacaaaaaaaaagtagagtgaatcaatcaacaaatagaagcaggtcatctaatctgtaatgttactctatattgaagcatttcaactggattgacgcaatgaatgtagctttctcaatgtccaccattcagaattttcaatacatcaaatataaaatatgcaacatttattaaaaataatacaatctacagtctttggagaaatagaatgtatatgctttttaattgaaaagtgaaaaatactatacttttcatttaaaaactatatttactggaatcaaactagagtaaagagaaagcattgaagaccctaaatgattacagtaatgaaaatgcgggcaaagataaaatcagcacttcacaactatcaaaggcaaaatgagttttatacaccagagctttacaataatcataataccagatttcacatcaacaaactgtaaagactattagaggttgaatgattaccaagatgaatatcttttggcagaaatgaaggatcccatcgttccaattcctctgcccatgtataacgcaaaacagctggacacactattaacactgggccctcatccttgtagcaacaagctattgcaattgcctgcatttaaatgaatgagaatgtgctgctttcacagggaaaaaaggacgctcaaaagcctattcattcaattattcatatgctctaaaaaacatttttttattaagaattgtttggaaatgaaactaaaatggaagttgctatttcatataagctgtgtttctcaaaaacgcaagagagctgtgcttctttgtattatcgaaagaagaagaaaaaaagaccccttacaatgcctcaggcagtttaatattcatataagtctaatttattagtgttgtaaacagtaacatgctttaacagtgtgcccaaacttcagcattatgtaggctccaaaaccttgttttcaacaataatactttattcatgtgcacaatagtcatacagaatagcaatggttgcatgctctcatgtaaaatgctcacctggagagtcttaccaagccccatctcatctgcaataaggcagcgcccatgccttcgaagcccaaacttcacaccttcaagttgaaagggtaggagtgcatctcgtaagtgttgtggcaacttcatgagaagcccgtcaacttctttatcagaagcgcagctttcggcaaagaacttagggagattcttgataacattccttgttttgtaaggtatatcttgcacagcaactccaggcaacttcttcaggcattttaacacgggctcatagtccatgagcttaaatacggagaaa

SEQ ID NO: 21361 - DNA, 713 bp, Oryza sativa
tagggcgaattcgagctcggtaccccaaaaactgattttagtactgtgccacgcaacgaagaaatccgaatcaaactaagccgggatggatctccacgctaccaccacgccgccggctcatgaagcggagggagagagctgagagagaagaaggaatacctccggtgccgaaccgccaacggcggcggcggaacgagcgaggccggccgcgccgcgccgcccccctcccaaaacctgttcacaccggcccgcggcgcgcgcgcgcgcgcgcgggaggaagggcgggagtcgggaaggagtggaggctgcccgaaccgtgcgtgccggagcggccaagctcgccggccgccgcgcgaggaggaggaggagaggcggagcggggaggaaccagccgagccaccgccgggggagagaggaagcgaggcgaggggagatagagagaggggaaggagacgacagatggaaggggaacgggggcattttggtcatcgccattttcctcactttgttagagcagggctatatctatatttctaggtgttaaacatattaagatttgaaaaaaataaaatactataatgtctttatcaaataatttattggtgaaaatggaaaggtcgttgaggggtagaagaaaaagaatttaaataagatgtgagtgataggataagtagtattttagagtgacaagtattgttagacaaaatttgaat

SEQ ID NO: 21362 - DNA, 2195 bp, Oryza sativa
aaaactccgcaagcaatattctactttcttcaggcaagagatcaccatgatgaccctatcattaaaaaaaaaaaaacttctggtaagatagtattcgttatacattttttacaaagaacttttaagcagaatatgcacttggcagtgcccttgtttgaaggaatatttggacagaatgaacagagaagtgaatttataaagacacatttcttaaaagaaagtaagttcagaccattccaaaatccatcagtgagctgaaactgaaactaacaagtgatgattcaagccatttggatatattaactgcaaatcgtcaggataaaaaactgacaaaatgcttcactggttgttatacatttccataatttatatatgagtttggagacaagttcaacccactagcagaaactgaatttggtgtttattcttcctgctggtatatttagtagtaatgcttgagacacttacgatgcgggaaattcgatcacagacagcatggtgcataaggattccagctgcaacagatacattaaaagaatccaccatgcctttcataggaacactgcagtgcaagtctgacaactttaaagcatcatcacttatgcccctgccatagaagtagaatggctagttaatatacaagtagctccacaagtatactgaaaaataaattcccctaagttagtgtgatatactgagtactctctttactttccaaggtataaatccatataaaattcacagtggactatttggaacttctgtagtaaaaacaaacatggcatttctagtttcgaataggaaaacttttaagcgaaccattttgtacaacatacatcaagatgattaagcagatttcttgcaagaggagatgtcagattagttaccccaaagtgattaaaaaagatgtagaaaagtaatgataaagtgcaacatacatgaagtagaaaagaggacatcgtatctgatcattccatttaaatacttttgagactcattataacatgattgcaagagaagatgtgcatctggagaagaggaagagccctacataagttcattgcccacaacaatagcggtaggttgcgaccaatccatgtcgtacacacaaacctacagatccattacgagcatagttattccttgaactgtattacttagatcagtaaatgataaagcatctttcaatgcaatacagagcggaaaaaaagtatattgagaaaatgacagtgtagtattacattgttgcaaaatcccacaaaaggctgaagttaccaattcactaaagaatgtgtatttgggacagataaatatatctttcattctaacctaaacggtcactaatatactctcaaataggagatgacaataatcattctgcaatcagtgatcaacaacattggtggtggcaacgaccacacaccaatctatttcaaggcttttctagcctaattttacaacaaatgtttttatcttgtctatgtaagtcactgaaaatgttcttacttgaaaagaaaaaaaaagagttgtctttcactgcggataacaaatgacaatgcatgtaatgatcacaatcactcttttttggcttactgttcaaaatacgagcgaaaactaaaaaggtgagcaacaacaaattaccgaatcatttcccaaataagtagttgcaatgcgataaccacgcttttttaaagcatcaaagcattctgcagttgagctccataattcgatatcaagccatttctcagcacccatgctcacatgcctattgtctctatacctgcaatagttaagaagtatattcattcaatggtcttgcaagttgagaaatatatacaaattttaaaggatgcaatacgtatataatttcattcagataatcagatatcagaatttatgtataaaaaaactaataagaaagaaaaatgttctgtgttcttcagtaccaatccagtggtctaattaggaaaaaatttagcataaggaatcactctctttgtgttggatattagaactacatgactagatgagggatcatttccttccggtcagtatttctgccatttttgtacaaactactgaatggacaaataaaatgcacaggtcacaaaaaatatttctcatttattttgcacctcaatgaaaaaaagaataataccatgcagtattgaggtaatcaggtattgcagattcag

SEQ ID NO: 21363 - DNA, 1538 bp, Oryza sativa
ctgccgccgcaccccgccgtgccgaagctgccaccgttgcccaagcgtgagctgccgccgcaccccgtcgtgccgaagatgctgccgcaccccgtcgtgccggagctgccgcactacccggccgtgccggggttcccaaagcacgggctgccaccgaagcctgagctgccgccattgcccacggcggagctgccgccggagcacgaggttcacgacccggagccggagaccaagcagccatgatcgtacatacacacacagtattttttttttagacaatggattataaaaaacctggcctctacaccttgtgaggatgtacacagcctaaaagtaacaaacacgagtacacaagactataagactctcccgttacatgggtaaaacataaataagttttaaagatggataacaagcaagaggaactaaaagctaagcttccatcattcttctaaagttccacccaaaagtagagaagatcagctccatcatacacttctctaaaagcttgcacttcgcgattacttcaatgccttcgtcttccttaagaagcaaagaccaaagccttgacaactgagttactttgaaaattacctgtaagaaaaatacgtggttgtagccattaaagactataattcatttatattgagccacaaagcccaacaaatcgctgctatacccacccaagtttgtcttttaagcttaggttcaaaacctcttaaccaattttcaaacaagtgtgaactattacggggttgcttgactccaaaagtaagatagatcgcattccaaatgtatctagccattatgcaatcaaagaagagaggttgaattgactcattagagttacaaaagctacaaagcaagctacccttccatcttcttttagcaagattatcttttgttagaatcacccccttttcaatataccaaaggaaaattttaatttttaaaggaatccttagcttccaaattaaagatttcccaggtattacaccattaagcataagggttttatacatggagttaacataaaacaacccttttttttattgctcttgcaaaagaattggtcttgcttatcattcaaattgatactcaccacctttgaaacaatttcaagccaatcttccaagtttttccctacaattgctcttctaaaagagacattcaaagggacccttcctaacacatcggccactactaagtttttatttctaaccaagctatacaaggttggaaattccaaatgaaggggttggtttcccaaccatcggtcctcccagaatcttacttgtttcccattattcactgtgaagtggccaagtgtctggaagggttcttttgctgccataaggctagcccaaaaatgagaatcccccggttgtttttggacctgaaaaatggatttccttaccaagtattttttcctcaacaaattctgccacactccctattcattaattaacttaaagatccatttactaagcatacacttattttgagtctctaagtcctggattcctagccccccacat

SEQ ID NO: 21364 - DNA, 1475 bp, Oryza sativa
atggtggcggtggaggaggaggcgcgcacgggctgccgttcctggtgctcgcgcgtacggcgttcggggtgcgcagcacgcacttgctggcggtcatcagcgtgctcatcggttgcgggtggttcggcatcgaatcctggatcggtggccgcgccgtgttcctcctcctgccgtccaggctcaagtcgtaccagccgctgctcgcgccagtgccaggcctggggctgcgccgctggagttcgcgtgcttcctcgctttctgggccgcgcagctcggcgtcatcatgcacggcatggagggcatcagcaagctcgagaagtacttggaccatcacgaccaacattcccgccaacgtggtggtgccggcaaacgcgctcgtcagcttgagcccgcggaagttcacgttcgccaaggtggcgctggtcactgcgttgcttcgcatcgccttccagccatggcggctgttcggctccagcgagagcttcatctacacatgcccggtcgagctctcctcaggcaccagcggccgctgggctccccggcgacctataactctgacgcccatgagggcaaggtcgtgcacctgcatcgtcgaggacggcggcggcggcagctcccgagaccgagctcatcgtcgagcacggcggcgtcgccatgtgcgacggtggcgacgccacgttgcgccggccgggcacgtagcagctgcggcgcgacgggggtgggtggatgtcggccaccacgaagtcaccgtcctcgtcatcgtcgtggatctccagggggaggaactccctcctcgtcgccatcgtcgtcgttgtctccggcgagctcgaaggtggcttacggctggcgttggccgtcgggcgcgacttccactcctagacgctctcttgccgcggtggagcacgaggagcaagcccgggggaggaggcagccggcggcgtcggcctcctcgccgaagaagaggaacgaatggtcggccggcggatgggaggccgttgaagctcccggcggatgcggaggccgaccaggaagccgccgcgcgctcccgcacctccgcgacctcctccgctccctcctccactcccccgcgggcgtcgccgtacgtcttcctctctgacctcctcagccctcgagcgctcgctgtggccgccgagttcgcaggaagaaagaagagggaaataacgtgatatgacgccacatctgacgggggaaacgagacggcgtgagataggagatggaaaaaggaacggcagtggcatggttccaattttataaattttcagtggcatgtagccgatatgatgaatagtagtggtattttttaaatttagcaaagttgcagtggcatggatccaattaacccttcttttaaatgccattagaaccatgaatgctctttattaaaccatagtttgaggaactttcatattcaaaatgatccatgaagtgggatgatcttatccatgtcagcaatc

SEQ ID NO: 21365 - DNA, 1479 bp, Oryza sativa
  unsure (1)..(1479): unsure at all n locations
gccttgatgtattatgcatagcgtaaagagaacataccgagtccagtgtggtgtacccatccttacagcaagcaacaacgagtggtcgcaatgaagtgaacggtgagaagagctctgaatcaatatcctcaaagttcccataggtattttcaaattcacgtagggtaccaaaagcccgctgaagatgaccaatggatgaatgagcataaatcttggcaagatatgcctctggcgtcggtgcccttttctggtgcaaggacttacgtaatattgaccaagcagcattcaggagatcagtgctacaagttctggcagcagcacttagagctgagagtactaaaccttcatcaactgaaagatgaagaggaggaataacacgctcagaacgagcaatccatcttgcaagatattccaaagcaaaaagacccagcttgctgttgttagcttcaaaagcagcttctgctatttcaacacaccaggaccatggtggacacaagactttgttctgatctgtagcctgaaacaaaataagtgcaccgttagtacatacaccgagaagattgaaacatatattcgaaaatgaagaatgttgaaggcccattggtagcccacaaacttataacaattgagaatttccagcattggaaattaggagtcctaactaacagtatataaacagtaaacagacttgtcagtctaaaagaataataagtaccttgcacttctctatgactgatgccaatgtatccaatctaccagatcttacacatgcccggacatactcaacaaaaacagaggaagatattgtgtagcctgatttaagcatcaaatccaaatatttcaaagtagagttcaccccggtcagtttaatcagaagatttacaaccaaattgtaggattcgtcatctggtgagtttcctgttgcaacatccctgatttcacaagataaaatcattttcaatgtgaaatctgtagcagtagtgaccccagtataggcaacatatagacaaaaccaaaatgcaagcncttagagcataatacatgaaaatgctatcgtatatcatttgacaatattctgcacaattcattgacaataataacgttcttacagctgcaagaaaaaaaacttaagttcctgaatgttatacacaatctgtaaggcatcttttagttttatgcactaactacatattataaattatgtatgcaatgttgataaagcatctgagatatgttacatcagagaaaccgtaagtgcaatggatccatggcttttataaaacaaaacgttacatcgtatctatgttacccactaagcatcagaagaatgaaaggcgtgcatatctagtaaactagtcgtgtcactaaagacgcaattcaggccttaaaatttgctgcaaacgacctacgaggttccatggttgagttgtacatgcacattatgacaacaatgaatcagggaatggcgatctcccattc

SEQ ID NO: 21366 - DNA, 1200 bp, Oryza sativa
gccatggcggaagaggaggtggggtttggactagggttttagtaaggtgggagtgagagggaaagaagccgccgacggcggctcagaccggagatggaatggaacggaaggagcggagaaatgaagggtgtgtttcgtaattttgacttgttacgagggtgaatatgtaaatttttgtgcgaccgttgcattcagttcgacggtgtatcactgcgataaaaacggtttaacccacggaattaacatcggagtacgaatttcgaaattgtttgtgccaaattcctgtgaagttcgcctgaattttgagcgatgcaaatggggctcttgtctatactagatcaatgttagagatggggctttgtaagaaccttggcagcacgtagctgcgttttgcattttgcaagagagtggcaaacttacaaacatgaatttgaggatcagatttcaactcccagtatgttattgttgccaatcggtttcttacaaaaagattgctttcggtcagttccatacaacgagaaatgttgccgatcatcagtttgcatactactcttaactaaaatcttctacaagtagttcatgactcttgaggatccccggatgcatgttcctcttccaaagttgaacatggcgcgtcggataatcgcatccgttgtgcagaacttcattgccaagaagctgtcagcactgtcacctttgaagatatacagacaaacataaagcacattacttcggggagccatagaaactccttgcagtatttgattgcatggaggtgcctgttgagtgcaggaacaacattaaaatgctaatattttgtcagctgcaagtcccaagcagcaaatactcctaagtatattgatgggacagaacctcaaacagcaagactgaaagactaatatatatatatatatatatatatatatatatatatatatatatgacactcatatggggcaccatggtgcccgggcaccatggtatctaatgcacaaaattactcaaattttttcaaaattttcaaattgtgagtatatacctagttataataatttgattcatacctatacttatcaacaaaacaactcaaatttaactttatttcacaatccatgattacatacctaactaattatatgtatggatgctatatacctagaatcaaaatctaacaaaaacaagttcaaattcagttcaaac

SEQ ID NO: 21367 - DNA, 733 bp, Oryza sativa
tccagttcagccgcgctgtgggcgccacctcgtacggcgaggccatgggcgacgccttcggtgctttcggcagggggatcctctagctctgcgtcgtcgtcaacaactgaacaacgtcggcgtgatggtcagattcactgaacatttcattgtgactctaatggcttgtgttctttttccctgggatgagttcagatccactgaaatacacgccggccgtgtcggttgctctggccatcgtgttcgtggtgatcaatgtcggaatcgccaccatcaagctgatgagagggcagattccgatgcctaagctgttccctgatgttcatgactggagctccacctggagacttcacactgcagctccagttcttgtgagttgtgaccgcctacatttgccattacaacggtacattttaattaccagctaagtttgcatttttctgtgggaatgtgattaacttgccactgcattcagtgcacacaattcacaacgagctcaaggaccactcccagatcaggccaatagtgcgggcgtcactgctgctctgcttggtcgtgtacaccaccaccagcttcttcgacttcctcctcttcggcgaggcgacgctggacgacatgctcgtcttccccatcgtgttccacgcgctgcgattcaacatggacgggctcctcttcccctcagcgaggcccctctcctgcgaggctgcgacaaccggaggttcggcgcgatcac

SEQ ID NO: 21368 - DNA, 552 bp, Oryza sativa
cccttccatcctccccacccgcctccctccatccctccgtctgcctcctcacctccgtccgccttcccgcgcgggagagaaagagagagaagggagagagagaggaggaagaaggaaggaggactgacatgtgggccccacatgtcagtgggcccacatttctttttgtgtgaatgactaatgggtcccacgcatattttttagttctaccgccacgtaggtgccacgtcatcgccacgtggaacgaagactcggtcaatattgccacgtaggcgccatgtggcaccacgtcagcaaaaccgcctcccaaaaccgcccagggagtcaaattgcaccggttttgtaagtttggggagtcaagatttctggtattgcggttgagggatacgatttagattcggtggtcaattgagggagtcaaggtgatcttattccggtgtatgacgacgtcgtggtttgggaaaaagtctactttacatccctcatcggtctaaactgcaaaaaattacagatttttccccggtttccgttaacatgcttttcaaactatta

SEQ ID NO: 21369 - DNA, 1240 bp, Oryza sativa
actccaggaggatggcgctcttcctggccgtggaaccatggagagggaagtatttggttctaatcctcagcccatcttgggtcgcatggttgcgatcgaagattatgttctctgcggttttctccctccaccttctgaatttcttctcctggttttgaatttctatggtctttctcttctccatttgaaccccaattccatcgccttccttagcatctttgtgcatctttgcgaggcctacatcggggtagagcctttccttgatctttttcgcttttactatgaactgcgttggatggaatccaacagggtatctggttgcgtcgggttccgacttcgggatggcctgaagttgcgttacgttcccttccagtgcccttcttctcgcagcaagtggaggaataggtggttttatcttgagatcaagaactcgaaccctgtcttcgtggttcctgaagatcaaccggacaagattccgtcttggaccgcaaagccccccttgaccccctctcttcaatcgtttatcgacatcatcgacgatctccgagtacggggtttgtcgggatatgaagtcgttgcagacttcgttggtaggcggatccagccgcttcaggctcgggcccatccagcttataactattccaggccagaggacgcgacccgggtttctcctcggggtatctttctcgcatttatcttgacatacttgtgctcgcattcctcttgacttatcgaaggttggttctcgattaacaggtttgagcggcgaaaccgtggagcgccgcgtcggccaagtgatgatcagtggcccgaccacggcgagtgacatccctatgcccctttgtgaaaagggggcggcggaacgtgatgaagccatcaatgtaagtatatttgatgaacatcccgcattctcctttcgaaatcactttatgacttgattgagcgtaagcccttcctttgactgatatcatcggaccgctcgcggaccatcaggtggcgtcatctctgaaagttaaggtcgtcaaggaggtgtctgatgctgccaccactagcggtggcagtgttccgacaaagccgaggaaattctcgtctgtaagaaaatggaccgtcatcttctatccatgcaaattctaccatccaaacatacctctcactgactcactcatttaacgctcctccacttactcgctcggcttcgttttatgaatttttaaagtcttataaaacgtgtcaacttact

SEQ ID NO: 21370 - DNA, 3366 bp, Oryza sativa
  unsure (1)..(3366): unsure at all n locations
ttggtttgttgagtccatcctcccgtctcctcctcgctggttccattcctgcaaatgcataattaagcaacccagccactgtttttcctagtacatatatagagacaggccggccgggccatccactcacgtgtgtaggaaattaaacggcgaaaaacattggatgcactcagctaggacaggggcacagggctttgatgtaagtttgtactacaacttaaagaggatacagttgatccagacactgcggagaggtacaggacaacaacaggatatgtgtgagccacacatcccacacaggatggatgaacagttggatgataacttgatcgcaatccgtcccatttccaataatgttctcattccaaccaatcttacttatatcatttttttccagatttacaaaaataaaaaccctgagacagacaactactgcctctgttgtaaatcaatctatgtacaggacgatatctagccaaacttttaaagcgttcaacaatttatagcttcttaagtgcttaatttaaataagcaaaaatatgggtagatttggctaaaaaagtacgtacattgtatttttagagagaagaccttgcggcccggtttatattgaaagccacattacgtcatacggtagagttggtaatgggggttgccagtttacaaaagatgaacaacttaaccaagtgactcaacgagtttggagaaacaccatgcgatcatcatgcaacagggataaaacctgcagctctaaagtagcaagcacctgatgtctcttagatctattacaaaacaggaataatacagaacattagcagaggtataggctacccaacccctgttcttcggatcttcaaagcggttgtcacatttttcaacttctctgcaaccatttccatctccacaacatccttagtgtgacaaagggctctccgcagcaaaagagagatgattcgaaaaggtaggatcagtggagagtacaacggcttggatctggaaatcatattatttctagtggtccataataaccagcaaacaaccacaaatacagcagtaaaaactctagattcaacttggttagaattgttaattagcaaaaagaactcatcaaaatctcttgttccccacccaaaagaatctctacaaatgcaccaagttaaagaggccatgaggtaggtaaaaagaatgtgggtggtcgatacaagtgccccacctattgacaaaattctgagcactcccagttttttttaattcttctacacactgcattttcacatctctcacacctctaaaggccattgcttcatagagtgactttgtggtgtatagtttattagctgataatcctcagatcatgaggtctggtgaattgactagtacaatctcttcaattatatatgtgacatcatactttctatgtcttcaaaagatcttataaaagataaacaactagcactctttgttaccaactttgagattgtgatgtctcgttggttacaaatctaaaaaatctttgggtatgtggtcttaagggggcaaggatcatgccagaaccatatatgtcttccatcctctagaagccactatgaccctagtttcatccattttctggtattcagaattctttctcgaattgtgatcccttttgaccattacattgggaaactcctctatcctaaagatattttttttctcaacaactcaacacacagactattgtatgaggactcaattttcataactcatttggccgatagaacagtgttcagcattctagttttagtcaagccaatacccccaaagtcttttgggaaagccaaatctgtccacctcaccatgtggtattttccgccctgtttgttaccagctagtaatacctcgccataataacttttgatgtaatccctcgaaaacagaaggtacttgtaatatcataaagtattagttttataagtttactttaatataaaatttatggtcaaagtttaaaaagtttggtaagaacttatctagtcaaatatttatggttggcggaagtaaaagaaatggtgcgcattagagaaattacagagcaagtttaacctttatggtgtaaacgtatgtactccactatacagtggaaaataaaaaagacatttcttacaataaaaaatataacgacataaatagatagtcccttcgactatttgagcgatggtagagagggccatggaactaaatattccacttgactagagcccgatcgagaggaacagaaagaagggaaataggagctatggtaagctgcagggtgtgtgtcaccggggccagcggctacatcgcgacctgcctcgtcaagaagctcttggaacgaggctgcatcgtccatggaacattgagaaatcttggtacgtacaacgtactccgatccatctctagctagccagctagagacctctcccaatcactccctgtttccaattgttggagatatggagataatatatctgacaggagatgagaagaaggcggcgccgttgagagagctccccggcgcggcggagcggctggtgctgttcgaggcggacatgtacgacgccgacaccttcgagccggccatcgncggctgcgagttcgtctttctcctcgccaccccgttttagcatgaacccagcagcaaggtatacgtagtcacaagctcgatcgaacacgcagaaaaaaatatcaatgtcatgtcatcatgtgtacgtgggtatttgttgattttgcagtacaagaacaccgccgaggcggccgtggacgcgatgcgcatcatcttgaagcaatgcgagcgatcaaagacggtgaagcgcgtcatccacactgcctccgtcaccgccgcctcgccgctccgggaggacggcggcgaggggtacaaggacttcatcaacgagtcctgctggactccactcggccagtctcacccatacagcagcgacatgtcggctataaatcaagtaatcaaccagcaaaaaaaaaggttatttttaaataattttttttaaaaaacaacaagatatatattgtgataacataagttagtacaacaaattagccctacacttaaagaaagaaaataacaaattttcatttacagtgtatttttttgttattttagtttctccgactgcagatacacgttggaagaatgtgtgcttaaattgctcctaggtgtactaatatcaatgtccatcaactaatggggtgtttagattcaggggtcaaaagttctagcgtgtcacattgggtattatatagggtgttgcatggggtgttcgggcactaataaaaaaactaattacagtatccgtcaataaaccgcggacgaatttattaagcctaattgag

SEQ ID NO: 21371 - DNA, 1148 bp, Oryza sativa
caaatggttacacgagttcattttaagcagaagtcgggggctactatcagggttacgggttaggcataccctttacccttcgatatacgttacatatcgatatggcatacccacgcgcatgtagatatttcctgtatattctaaggaaacctttcacagaatctacagatgggaagaatcctactcgggcagaaccaggtcgttggcgtatcgtatagggtctgatacctccgagttctatgaggaaatctccacatctgcgatataaaaggggccccccggggagggtttagacatcgaatctcagagccaacacaacctccacagcctacgaagccggagcttacgaggagccaagtcatcgagagctagtcgaatcaactcgactacaatctcgccggatccgacaagttcccttgttctctttgtaacctgtgttttctaccatataattccacatcaactggactagggctattacctatcaaggggtctgaaccagtataattcttgtcttttgtttgcttgatgtcgtactacgtagatccttgtatcaacgtaccccaataccctctatatccggtctacgggtatcacccgtcgacaaatctatgatccgatcacaccgttgtattcgttgtaattaaatctttacaacaagatatcgcatgattatattttgataaaagaaaaacatatgtttcaatctgttaatacttattgtttcacatgtgacagcgacatgttacaatgtgtatcttcaccatgtttcataaaatatttaaatgtttcaattgctgttttttttgtttcaccatatataacttaatatttcacttgttggtcaacgctctcccccgcactgtcgtgcgcccgcgttgctcccgtgccgcgttgcttgcctgtcctgcatgtgttgcttgcgttgctgcttgcatactccctctccctctccctctccctctccctcctattacatgtgcctaattttttcctcaaattttaaatatttttctccaaaattatatatctgatctaagtttcaattataccattagatttttgcacaaatacttaattatgttgaaatatttttaaatagacgctacaaatcatacgtgggtaccgagctcgaattcgccctatag

SEQ ID NO: 21372 - DNA, 1081 bp, Oryza sativa
aacaccaagtcaaaaacacattccagaatatttaagacatgcttattgaagtagaatccccttaaaaatcacaattcaaatctgatagttagaagtacagaaaattatttgtcgtaaaaaagatggtactgagattaagaagggatcagcatcccccactaattgtagctaagaattttgatgtaaataatactactgcataaaaataggagatcagtttctcctaatttgcagctttcttccagtaggaccgatataaggcccatctggcacatgatggtagagaccaacaccaaatgcattgtccatatatactggtggctgtgtggatgttgttggaatatcatcttttgaactagaactaataggctgggaattgctcctcttcttcctcctagttatttgtgttttacactgagagaaacagacaacaaattgtgagaagtagcaaagtacaatgtctttatatgataaattagtagtgtactcacattttgagatgaagaactttggttgtcttttccatgctttctgctgttatgaccaaactctttgcagacgctacatctaattgttgtctttgcaaccgaccttccttgaaccctaggttcatcagatgctctagttctctttgtttttggcctccctggttgtgtcctagccacaggtgggtctacatctggaaatggagttttttcccactgtgtctcatcaggaacgggataaatcatcccacaatatgtcctcgcatatgcatcctttgtcaatatgtcatcaacatagctctctggcctttgcttgaaaccttgaatagctgaaacaacatgcaaacatgggattccagttaaatcccattttctacacccacaagtgtgcttgttcaaatccactacatattgattaccaaatgcggacacttgccaaatgcccctaccagcacacacagatttgcaatatcttgcctctctcttctctgcctcaagcttctttaatatatttggtgggatttgccaattgtccctttctacaccttccctcttattattgaaatcagggtaccgagctcgaattcgccctatag

SEQ ID NO: 21373 - DNA, 1305 bp, Oryza sativa
actaacggctatttgaccgttcaaatttgaaaataaccgttgggaggctaaaatattcataaaaatttcgaaaaaattctaaaaaatctcaaatttcgccccgaacggcccgtgggccgcaggcgtgccgtgccggcacgggcacggcccggccatccacgggccgtgcttgggccggcggctcggcacgtgggccggcacggcacggcccgtttcatcagccgtgcctaacgggccgtgccgaaacgggccgtgccggacccgtgcccgtgccgggccgggccgtgccgcccgtttggacacctataagtaatggcgatgaccagatggtgtctatctatctacaatgacacatacgcatcgctagttgttcatgggtaggctagtgtaagccgacaatattcattggagatagaatggcgtgatatatggtaacatcgcatacatcgtcttataataaagtagtggatatttgtctctttgctgccagctgataaattcatccactggacctctttttatgattattgcagattatattgcaggcttttttctgagtggtaggaaagaatttagagctttttcattattgtttggatacatttaattattcataacactattagtttaccactgagttttacctatcgtttggcctacaactaataagttgttttacgatttatcggtaaaataaataacttatgagtaatatttttatacgtgtgcttagtgacttctaaaatctatgtttaaaaaacaaactataacgaaaaaaacctaatatcaactttaagcttaagttttaaagtttaaaatttgatagtggcttataaactgaagagatttgctccgatacctcacagtaccaatcatttcctatcgttggatcttaatgggcattattagatccaacgatcgaaaacgatttgataccgagaggtactggtaccttgagatactttttgttggaccggagcaaatctataaactgcaaggtaaacaatagaagctaccacgtagtttaccagtgaggtctggtagatataccaaatgattattttctaaaatatggtgctggactatgtagcaattgcatgcgtatccatcgttttcttgtaccttgtacccaataataatgaattagtaatgtacagtacgctattaccgcacagtgacacggcaatataacgcatacatatgtgttttatatggatgatctcctggatagttgcaaatgttatggcgtgcgagtgacagcttatttacacttaattctttcttaatcagtctagctgcttataa

SEQ ID NO: 21374 - DNA, 2225 bp, Oryza sativa
agtcgaagatggcgacccgaaccagagcagaagggctatgttggggcaattcgatcatgaagagccgaagtatctcgggcagcaagacgttgcacggaaatcgaagccccgcatcgaaaaatgcagcaaagaccacggtttggttgtccccaggcttcggcactaccgccttgccaagagcaaaggcctatccttcggccatgaccccggccgagaacagcttcgccaactccgtcttatcgataagcgaagcgccgagatacctgatgtgaccttcaccaatcttccccggatcaggaccagtggccgaagcaggagcaggtttacaagggtccatggatgaaaagtctggaaagcccggtataagagccgaggtcacactggtcgaagtaggcaatgaaatctcgtgaacgcaaggagaaacaaagcgataccagccacagaggagatggtaaaagtgactagaggtaaaagtgaaagtgacgctagggggtaagtgtatatataacccacccgcgtgacggttcgcctgccacccagtaagggactgccacgtgtcgccagggtgtacggaacggtaatttcccgttaaggctggccgaacaatgaaacgacgaaagtaacagcacaccggcccatcatgcccattactgttcacgggaatcctaatttattcaaccatttcgccaataataggcgaggaaaggaaagaacagtgatcgctagatctgctaatgcaaaatgctagactttttcgcaggtaaaaaaatataggtttcagcaagaacatcggccgaaacggagcgcgtcatggtataccacacgatttgcaaggtcttggtcgaagctccatactcacccttgcccttgaggggcttgttggaggtataccacaaggacctttggccgggcttaccgaaaccaaggacataggcaaaggcgtaggctggaggcaagtggcgaaggtcgaagggacaacataggtgaaagccaaacagcaaaagccgtagcatcaagttgacaagcttcgccaaagatggaccatgccggagggcatgtgtttcgccaagtatcgaaccttgccaggagaaggcccagcaggccaacacgccttccagaggcttcaccatggactgggccgagtcacttggcccattaggagcccatacgagcaaaagacattgtatgcccataaagatgtccctatcataagggcaaccacgtaaattcctctgtagagcctaaaccctaatggagagtctagggccatgtaacagggggatctgaaaaaatttttactaagcaatacaattgtctttacttccaaccactgttaaaagaactaggtccttcgacgtgacacagttatcaattcgacaacacttgctttgcaatttctgtgcactttgaaagaaatacaagatgggatttcttttcgctttttccataagaaatatacactttcatgggaaggattatgtacacttcttggttttcacgattcctgtaaaatcgatctccagaaaggaatttctaggttcgagaaaaataggttttgggaagacatttctaatgctccaatttgcaagaaaactaggacgaatgataaccataatcctacacttaggcttatgcataaatggattgctataactttgtttcctagaggtgatctacgacccattagaggggatgaattaattgtcatgtttgtcatggttaggaagatcaaagttgctgctgtgaaatgtatgataaggcaaaggctagaaagtataagattttctactcctgtggagtgcacttccttgattactcggataacaaagggactaggggttattaacaatgattagattgcttatgtcttagccgcttgtccctgtatagatgagaattatctagtgcaagggaacattcttaaacatggagtagatggatctttgatttacttcttccccggttgtacatatgaaatcttgttgcctaatgcgggatattatttgaacaactaccatgaactaaccattcccttgcataccatagaagaatctcgtgcaggtggaacatacagggagacacgcaacatggcaagtaatgaacgagaaggttcatcatcctcaacacccgtgaaatgtatgaggcaagttgggagccaactggggatgcacctggatggacccaagctccacgccacagcatcggagtctcaagctgcgcaagcg

SEQ ID NO: 21375 - DNA, 8152 bp, Oryza sativa
ggtaacttgtatcatattgcgtatttccctttccaattgcattctatacacctgaaaacaacataataatttgcaaaatagaatataccaaaaagataggttaggttttatcatgctaggtaagacaaactagttctctttgttgaaatgatgaatagttgctctgttttatatctcttatgtatggattcataggtaagtgctctctcacaaattaaatgtaagtagcccacaattatttgagaacctgaggtaaatgagctgcatttgctaatctaagtctaagttgttgcaacataagagatagtaaataagggttgctatgatcctagtccaagtttgacttaaattccggatgtttgtttttcaaaatgataaatttgaaagtttctcatttgatataaattcttacgagagccaaaaatgtgccattatgattaaaaccatataaattttggttacttgccattcaattgaactttgtcaaattcttgtgacttgtgtagatacttttcatgctctatgatcaagatcatatacccacatatatgcacatgctaaactcctacactgagctagcaattatccattccatttccattctaccactaaataaattcttcatgcttttgtgtgctttcttctcctaaaaagaaaattctttctggaaaaaaaaagaagaaggagggaaaggcatggttatgagaaaaaaagaaaaaataataaagttatgctctttcaagcatgagcatgatattatataaaaaaaggaataaaatggccatgccctctccttattaataaaagaatgacactactagaaaaataatttattgccatgaaaaaaatcgtagcatcaatgctaaaattgtggcaatagatacatgttgccacaatcttaaaatcgttgttagccgtggtaataaatagcgtggtaacaggttattgcaacgatttttatttagttgtaataaaatttgatattgccataaaatagatgtggcaaaaaatatatattgcaacacttcacatggttgtaataaataactattgccaccactctatgtgtggcattagttatacgtaccaaattaaatgtctcaatattaatttatcatcctaactatcttcttttgatatcttgtcatgttcaggattcgaacccaagatctctcccttacgcgcgctctccatgaccaactcacctacgcatcagttttgtttaaaaatgcatacaattccatttgagactgcctaacttagatttgaatcatgaatttgagtatttaaaagatttcaaataaaaaatttaagttgtagatctcatcgagagctataaatttcatataaaatttatcctaatccgtgtccatatgaaaagaataagtcaaattatgagatgataaattttttattgcaacgaactaaatgtgtggcgatagaacatgtttttttgcaatagtaatgttttttttggcgatagctcatttcctattgcaacaaaaatactgaataaaacaacgattgtaaatcgttgcaacaaaatatagttatttgccatagaaaaaatatcattgtgatagtataatatattgccatgaattatttttcgttgtaataaattggtggcgatagctcaaccctcttgtagtgtgatttttgggaggacgtaagcacaaagaagaagcattttctttatttttcttcatattccatttccaccatatatcacacacacacacactttgcatgatcctaagtatgtttagtcatctattttagtctgagtttttgacttagtaataaatgtgaatgcaaatatgccatgtttgatccctaccaagcaccacatatcaaaccttagagtaagaatcaaaatggcaaaatggtgaggaattcttattgatacacttagagagactgagtgaatcatttgaggaactcggctttcttttgcaaaatcatttgaaaacttccggaataaaagttgaacaaagattgggtgattactgctttaattgttgttctgtctttcaaccgcccaaggcaaggagaagcagtgtctggtgggaatcaggggttagggtaagccaccgtgccaaagattatttaatttaagagagattacatatacctttgagatattcagcatagtagcaactcctgattaacaaccaagtctttgtttcctttcgtcctttacttgggacgagcaaaggttcaatcttggggtgttttgttgatggtcgttagcaatcagtttcgaacgtcaatatttactaaatagaggagaactagttatgcttgcaatgcatattcatgttagaataataatattccactagtatttggttcactaaacttttgcagagaataatcataaagtggaggagaatcgacatcaaatcaaacgataaatcaatcggacgatgtcgagaatcagacttatgcatgaatgggccaagaactcggaaatgacacgacgaattgggccaaaattcacaagtctacggagaagagcacgagaggatgccaccagccgtaatctgggctggttgggccggccccaggttcagccgaaccctcctcagcaccgtttgatccaggtcttttctagatggtgtagatcagcccccaatggcggttggagggtatttccgaccattccaaccgtcacaaccgtcattaggaggttataaaaggagctctcatcctcacttcactcacacacctcaagcaaagctctcccatattctctcaagtttagtttagtgttcttaagctagtggagtaggaatagaatagaaatcagagtccggaagccttcggaagagttcggttatggctctagtagctctgcttcactcttttgtaagctttgtactttatttagaatactcttctttatacatttatggtattgaaatgctttccgagtatatgaatgccaactttactttatgttcatgttatgctgattatactcctagtttatctgggagatgcataggtacaggtataatgtttgcttatgcaattactctatgtcatgatgatgatattagagtagtatctggtagtttaggcgtggtgtctagattacgggatatcattatttggggttagatgctgcggatgagaggtgggccgctgaaggtgatagctcagtacgggtattcctccgcgcatgtatataatcctaagttaatttcctagggagggtactgctccatatttaaccccggttgtatggtcataacgggctgtcgtaaggaactcagcagtcaggggtggcttctcgaagtaccacgagtgcatcggaaagagggtattagctagttaatcgtataactagaatgtatatacactatgtatactagaagtataggaatagattcttttctattttctttccacttagcttaggtaatttagtacgagaatgagtagctccatgcatgtgtgtcactctacccattgatttatcctaatccctccttagactatgattattacaagtaacatataaattattagtacatttctctctactatcatcttcccacgggattaaataaatacgatacccttggaatactctcgggtgaaatgctacaatggtatatccgtgcgcttgcggatgaactctgtaaccataatataccaagagtatttctgcgccattgctggagattatatttctagtaatgtcgttaagaaataccaagactccttcatcagtcttgtcgaactctatgctactcaggcacaagatgggcactaaatttttgctccactgtcatctcccaatcatggtatttctcagcatcataataacccgaaaaagatggtattttaaacttaaccttagcataagggtcatcgggcacacgattattattaccttgttggtggtggtcatttgaagtgccacccatacctgtgcggtatgtgcatagacgacgtcgtagtcgtgcttgccttgtagcttctgcatcaatattgccactaaatcatacatcgtgtcctcaggatggccaccagcgttgctgccactcacttcctcactggaaggttcttgtgtctccaacgcagcaacccgattagctagcgtggatatccgcttgtccagcctctccatgtggtttaagaagccacttttattgatggcatcttggacagcctttgtaacggcctccgtcatgtcattttgagcaattttctacactagttcgtagttgctcttgacagactgtcgatatttcttaacgacattactagaaatataattcccagcattggcgcagaaatactcctggtatattatggttaaaaagtttatccgcaagcgcacggatatacaattgtagcatatcacccgagagtattccaagggtatcatatttattttatcccgtgggaagatcatgtagagagaacttgactaataatttatatattacttgtaataatcatgttctaagcaggggttaagataatccaagggtagagtgacacacaagcatcagctactcattctcataatatattatctaagctaagtggaaagaaaaaagagatcatctattcctatacttctagtatacatagtatacatacattctagttaactgatatactagctaataccctctatccgatccccttctggtacttcgagaagccacccctgactaccgagtttcttacgacagcccgtcatgaccatataacctgggctaaaaatggaggagtaccctccctagggaattaacttaggacaatataaacgcgcggaggtatacccgtactaagctgtcaccattagcggcccacctctcatccgcagcatataaccccaaataatgatatcccgtaatctagacactacgtctaaactaccagataatactctaatatcatcgtcatgacatagagtaatggcataagcaaacattatacccgcaccaaagcatctcccagataagctagcagcatattcagtataacatgaacataatgtaaagttggcattcatatactcggaaagtatttcaataccgtaaatgtataaagaagagtattctaataatagtacaaagcttataaaagaggaaaggaaagctactagagccatacctgaactgttccgaacgcttccagactcctgattttctactctattcctattccaccagcttgatactactaaactaaacttaagagaatatgagagagctttgcgtgaggtatgtgagtgaagggagaaggtgaagtccttatatagaggtagttatgacggttttggaaggggaattgtccgaagtgccctccaaccgtcattgggatgcaatcctggacgtccatgccgaaacctgcatccaacgacaccaggatgggttcggccgaaccatgggcaaggccatccccagcccatcttcggctggcggcctcctctattgctcctttatgcagacttgtgaattttggcccaattcatcgtgtcaattctgagttcttggcccattcatgcataagtctgattctcgatattatccgaatgatttatcgtttgactcaatgtcgattctcctccactttatggttattctctgcaaaaggttagtgaaccaagtactagtggaatattattactctaacatgtatatgcattacaatcatcactagttcacctctattttggtaatattgacggtcaaaattgatcgataacgaccgtcaacactgacacagtcagcaaagtcctgggcagtcctctcatcatcgtcacctgccattgaaacaccaaaacaacaacaaatgtgaaggttatccataataatctaccaggcaggtgcagtggtgcctctcaactactctcagcaatatgaagaaccttaccaagcccttaccaagcaatggatacctggaaggcgtagtcagcgattgtagggatcaagaacatgtgctgtccagaagtaatatgtggagctaggaaggctaaatatatgtgagtggtacacaatccaatgacagatagtaatgctaaataaaaatcccaagtcacttgccactagttgctggtctactcgtgtcctagacagtagtggtaacaatgatggcgcaaatgaaggactggcaggcaagcttcagcgagtctcagcaaaaacagcaaaaccgcaaggctgataagcacaccacgaagttacagctcaagcagagttgatatgtggcctatggaattttctgaagccactataaagaatgtgcagaaacttgtgagctcgaacagacaattttgcaagccaatttttttctgagtctgagtccgtatgcaaaagttatggctgtttgaagttggggcttccgtgtaggttttccagagggtatataaactagtctgtttagcggtggtatgggatatggtggcaacggagtatgtaggatgttctagtgaggtgtggtgatctggataggtgtttatgatggcagaaacggatctcaaaagatgaaccctaacacacggatgaaaggtggcggctatggttacaaaggaaaacacacgactagactaaaacatgcactagaccatcaacaagaacttaagctaggactcaaactcaacactacaaactctgaaaaggattgtgcaaaggccaaacacggtttgggttaaggacactaacgactacaacttttttttttggcttttctttagactctaggataaatgcgaaaacaaaaactaaactaggataaagaatccgagcgaacctgacggtgaacctagagctctaataccacttgatgttgactaggtttcccgatctttcgaaaggttctgataatcaacgatttgggcggagtcgcgacacaaatcgatccggcttcttgaacgaacacactattgagccccgcaatcgcagcaccacgtctcctctggttatcacccatgtcgaaacgcggatgacctcgccgagaaggctaatccctatttgcgaatcgaagaacacacacaggaacaaagaaggacgcaaccaaaaatgcagatgaatgaataagctcacaagttgggtcttacaaaccgatctagcggtgaaactgttctcgacagaataatctaagcaaaacccaaaccctaaagatgacgacaggtactgatatcaagagtttagggtcatgcaaccaacccttaacgcaaccctaataggttccaacacgatacacggcccgaaagcccaaataggatgatgcagcaccgggatatattttggatgtcaacttattcagtcgattcccgttgactcggaaagaatttggacgtgtgtccaaaaccattggaaaggatatcttcttagctttccatccatatagagaacgccccaatctggtcacgtatgcgacctgcgtgcccattttagtgcagactgatcctagactctgaattgcactcgaagccgacttggtttgggcctccaccttgacttggatgtcctcgatgatcctccatgactctaagtcctttcccaagtgtctcctttccccttctattgttcctaatcacaatataatcattaggtagcaatctattctcaaattcgtacaaaaaaagcacataggaacgagctcacctctaaattcaattgtcgcgcgcgagcgcttgttatcggtccttgaatgaccggtggaggattgttgtgtgtatccgaaggagtgatatccgcatcacgtgttttctcatcagtttataatcttttaggttgaactatttggtgcatgaaatttaataacatttacaatctttcttacattgaagacgctagaaataggaattattcctaaatcctgataacatttgcatatgaaagtttcttatcaaaaccgttactcacatagcgaaacttacaatgacctaaatgtattaaaaaattcagtgtatgaagcaactcagtgtagtggtggaatggggaataaaatgattacgacttgtttgaaaactcgagggaagatgattggtagtttcaacgagtaaattgatggtgagattaacatggaaatttgatttttagtcccaatcttttgtttggtagaggtggtgggaattgatagatgattggtagtttagttgaagattagaagttagaaaaaaaac

SEQ ID NO: 21376 - DNA, 26384 bp, Oryza sativa
  unsure (1)..(26384): unsure at all n locations
actacagacaacggactactggtgtatatatagtgtgcaaagaaattctcaatcgggccaaaaaatgtcatttctaacgggcgcacactaatctctaactggtacaaaatgaagcccgacaccgataagagtcatcggtgacgggctccaaagaaggccctattgagatggccttaatgcctgtcaccgatgactcttatcggtgtcgggcttctatttgtaccagttagagattagtgtgcgcccgttagaaatgacatttttttggcccgattgagatatactttgcacactatatatactccagtagtccgttgtctgtagtttatcccactgttcactattttggtgggaggttgaagggggcgaatttttgtaatttttttgcaaacaaaaacaggaaaaatcataaaagtaagtaaaagggtactaatcatttcctattaatttagtagtacttatgttatgagatgttaactaatattttgttcattgttcagcgatggatcgaagttggatgtacacgactggcttgaggcgtcattacaaggagtatagagatggcgtattaagttttatgaaaaccgcagaggaggataggataagaagaaacaacaagtacatgtgttgtccatgtagcgattgcaggaatgagattttgtgggaagatgaaaaggaagtacacgctcacttgatacgccggggattcatggagagatacacatgttgggtgatgcatggagagcaagatctgggtactaatggtgcagcagcagacagaagtggtgcagacaatcatgaagaagtagatgagaagagcatgacatgtttgtcccatctccattgggcggtgaattggttgatgtggaccctgatatgcggcaagacatgttacgtgacgttgatgacctagctatgaacgagagagattccatgaagttcagcaggttggtcagtgactcggagactcctctatacgcaggatgcaagccaaagcacaccaaattatcagcaacattagacctaatgaagttgaaggctagtagtggatggtcagacaagagttttacaaaacttttgggaatactgaaggacatgcttcctcaggggaacacattgcccgagacgacatatgaagcaaaacaggttctctgtcccctagggttagaggtctggagaattcacgcgtatccaaacgattgcatattgtaccacaagcaatacgcggacttagatgcttgtcctgtctgcaaggcttctcgatacaagcgaaagaagagcgcgggcgagggaaagaagtcaaagcggggtggtccggcgaaggttgtgtggtatctaccaatcattgatcgtttcaagagaatatttgccaaccccactgaagcaaagttagtacattggcatgccacagagagaaggaatgacggtttgctaagacaccctacagattggattcaatgttggaatatcgatcgaaagcacaaagagtttgctgccgaccccagaaacgtgaggatatgtttgtgtacggatggcatgaatcctttcggagacatgagcagttctcacagcacttggccagttctcattgcgaactttaacctcccgccatggttgtgcttcaaaagaaaatatattatgttgtgcttattaatccaaggtccgagacaactcggcaatgacatcgatgtgttcttggagcctgttatcgatgaccttgagattctgtggaaagagggtgtggaaacttgggatgcatatggtcaggagaacttcacactacaagttctattgttctgcaccattaatgattatcccgcgctgggtaatctttctggacaaaccgtgaaaggaaagaaggcatgctctgactgtatggaacatacacacagtaggtggctaaagaaatcaagaaagatggtttaaatgggtcataggagatggctccccctacggcacgcctttagaagaaagaagaaaattttcaatggtaagaaagaacttgggtctgcccctgcggatttgtccggagatcaggtacacaatatggtgaaggacattactaatgagtttgggaagaaaagaaaacgtagcaaggaggacaagaataggttgtggaagaaaaaatccatattttggcggctaccttattgggaagatcttgaggtccgtcattgcattgatctgatgcacgtagagaagaatgtgtgcgatagcttgctagggctattgttgaatatgcctagcaagacaaaggacgggttgaatgcgcgtctcgatctataggacatgaacattcgtagtgaacttcagcctgttacagatgagaagacaggaagagtgtacctcccaccagcttgccacacattgtcgaaggatgagaagatcgcaatgctatcatgtctggcagatattaaagttccttcgggctattgtgcgagaataagtaagcacgttaaattagaggatccaaagctggttggaatgaagtctcacgattgccacgtgctaatcacacagatattgccagttgctataagaggcattctaccaccacaagtccatcacacgatccaacggctttgtgccttcttcaatgcaatcggtcagaagattatagatccaaaagacctagatggcttgcaggccgatattgttagtaccctgagtcacttggagatgtattttacactagctttcttcgatatcatggttcatctcactgttcacctactgaagcaaacaaaaatatgtgggccagcttttatgagagaaatgtggccatttgtcatgaccggaaataacccagcgggcgttccttacgtgcgtgtattattccttgtcccaggaggcaaggtacaccaaaaattgatacaatacagagtttaacaagcggaagcgtaaacaattaatttattacatgggcggtgaaggcccagcacacaggaagacaaacaaaaaacagcggaagactacggcgacgaccacaggcgcttgacggcaggcacgagctagacaccaaagccttcatcttccaggaactcctcttctgggtttgggaaaaattgagcaagactgagtacaaccaccgtactcaacaagacacacccacgagtgcagaataaatgcaagggagtacaagggagttataatataagggattagggtttgtagtaaacagcattaaaagacacttagttgctcaaagctattttgtaaatacgatcctcgagctatgcaatattattaatcaaggccgtgaacccacacgaacctgccttaacccaaggcctacgatgattcagaccgaactggcaactcgaccctgggtcccagctcgtcccaagccaacccaggccaaccattccacattttagtcgttaagaaggttttaagaattgaaacactaacttgggtacattgctcggcttgcccataaccgagggcgcggctattcgaataggttatactctaatcaaaggtgtacatctttacccacaagacacatcttcctcacgtgtaaccacgtgccacataccaccacggtatacggacggaagacatgacatagtttccaactcatcctatccatagacaagagtaccgacccaaccccacctacggccggaacctccgggacaggtaggcaggactgagcccctagcagcaggacatcggccctctgccctgacatctcgactaccgggccgcagctcgtgtagccttcatttgccctagagatgtccatcgacccccgacttcgtccatctccatccgtgtacttttgtttataaccagactgagccacaaactaagccttacccactagacatgtggaagtacggtagtgctttgcaacagaggcccggagaccggtccttatatggccgaggtgctactatcaaaaccatgcaccccgagctcagcctgaagccattttcaggattttgaatagagggggaggtgtgaatccaattccacaataactcaaccattccataatgtccaagtgatatgaatattcccaaagtctagagttgtaaaaccacctaatgttgcctaattaaccagcgaagcatctacctaaattcatactaggggaaccttgagtagagtgcacagtagttggggttttgtttattctagggtgaacaaggtaataataacaatagaaataataataaggtcataacaaaggtaaataggcatggctaaataaaacagtgataacgcgggaatttaaataaagcgataatgcattaatttaaatcaaaataattttataaactggaattcaatatgttcaaggatgatgtgacttgccttgctcgctttcccaaacgtcggcttcaacctccacgaagagcggatcttccgaagctgcagtgtctacacgaccaacggaaaagcaaaaggcttttactctaataaactccatataaaaagcaggaacaaagcacaaaaatggattcttgacttcttaaggaaaaattagagacttgaacggtccaattccgagttcaaatggccaagttatggccatttgaagtttatatgctctttaaatggatatttgcgaatttctttatttaaattttaatttaaaaagggtttattgcgtcagccgaggggagagggcgcgcggaccgggtccacgggagtggggcccacgcggcagcctcacggtccacggtggaccgggtgcacccgggctcacaccggccagcgccgtgggtcccacgcgtcagccgcacccgagggcacgggcggctgacggccgggccccacgcggcagccgctcggcgcgcccgaagacggccacgtcggcgcggccggcgggaggcggcgcgcccgcacccctatggtcaccggcggcggccataggcacggcggagcagcggccgagagaggggaagggaagggggaaacgaggcggtggtccacagctcaccccggggcgatggcggcgacagaggaggcggccggagcggagggaggcggtggcgcggctcgggtcaacggggtcggcggcgctccggcggttggcgaccgaaacggaggggtggacgaggtcggcgaggatgcggcgaagccgaaggaggcggtgccgaggtaggaggcggtccggggcgacgacggcggcggaccggagctcggcggcgacggcggagagagagagcgacgtcgcgagctcgaatccggcgaggaggaagggcggcgagaggcggaaacggacggaggaggtgcggggagggtttaaatagggttggaagggggagtggccggccggagaaggaaggaaactggcgcggcattctcgggctccatcaatggcgtcggcgggattaggggagaggttttcaaacgaatccaagggagagaggaggaaaaattggggggaaagggagaggggatcacggggaatatttccccctactttattgcacgcggggacggcgggaagctgcgggattcgcggcggcggcggcggcgctaggcgcgggcgagacggcgggaacggcgggaggaaggggatgacgggtgggccccacccgtcatcgagggtggcgggcgggcccgcccgtcagtggcgcgcgcgcgggcagaggccgagtgggccgcggggaagaggagagagggggagggaaatgggccgagccggcccaagagggggagggggggattttaaggtttttctttttataaaatcattttaactttgtatatttcttaataattattatttgtgctctgaaaattccactaaaatttatttacacattttaggcttttaggaaatatacaaaaatcctctaagccttatttgacttttaactttgcagattttaatttttggaggctttcacacggattttaattattctaagcataatttaaaggatgtattttagggtcgttttgggacgtgacaccattcgagagatacatgggaattctgaagtcctacgttcggaacagagcaaaaccagaggggagcatcattgaaggttacacgaccgaggaagccattgagttttgtatcgattacatggccgagactgatcctatcggagttcctatgtctcgccacgaaggaaggttggcaggtgtcggcacaactggtagaaaaagaattgttcccgatcaagcttcctacgcgcaggttcatttcgcagtgctgcaacatatggctgaagtaaccccatactttgagaagcatttagcgaaggtccgacaggacaatattggtcgatcagatatttggatcaacagagaacatggtgctcgcttcaacgaatggttcaaggatcgtgtagcacagtcgaccgatggcccaagtgagatattacaaaggttggcaaggggtccatcttgggatgttgacacatggcaagggtacgatatcaatggatacacattttacaccgtcacacaagatgagaaaagcacagtgcaaaacagtggagtccgtatagatgcatatcaggatcaagctggatcgagcacatactttggccgcatagagcagatatgggagctgaactatctgaacttcaaagtccctttgtttcgttgcagttgggtgaatatccgcacaggtgtcaaggtcgacaaggaaggcttcacattagtggacctggccaaggttggatatgcaaacgaaccatttgtactagcgaagcaggtcgaacagattttccacataaaagaccccgcaaacaagaagatacacgtcattagggatggcaagcaaagaattgtgggggtgaacaacgtcgtcgatgaagaagaatacaacaagaatcttcatgtcagacctcagatagaccttgacgatgatcccgaagacgaagtggcttacgttcgttcagaccattcggaaggcatatcactgtgaatgatcatctatgaaaataagtgcgttgttggatcggaaaatcagttggcataattgccaaggaatactcgcaacaaggattgttgtagacatgtcacaagggccttcagccgaacctgccgaaaccatcaaatcagcgagacgccaactgagtccacgaggttcctctcaagcgaagccaaaagacgaagtcaggagggttcgtcaccaagttcgaagggctcaccatcaagtttcccatccaggtgaagaagcaagaagggttcgccaccaagccgggagggctcatcgccaagtctccgctctgggtgaaggcctcagggtgaagcacaatgggttcgccccatggaagatgggtttcgctagggagaccagctagcagcatggcccatgaaggctgttcacctcttacgggccaggccaggggccaatcaaaggtcccatagttagaatggatactgtatgccccttttaatgtccctatccatataaattcccctgaacatattgaaccgtagagggtatgggcctgtagtaaggctataaatagcccaatagggccatgtaatgggggatcccctaaaaatttcataaattagcacgttgtttactattcaaatcattccaccaagagagccacgtcctttgacgtgaagttcttgtcattttgacaacaaggattagaatttactgttacaattaatagtttctttagttagggatctttgtagtgatttatgcaatagggagcaatgatattggtagaatcagatatttaccttacagtttgaaatcatcattaagtattgtttttgattgatcgtggaaactggcttgagtactgctcctgggactattatagtgctaagctaaataaagcccgtacaacgaagattggtacatgacttgtctctatcagtctgttgcatgaaatttaacgagcatgcttaggagttggagacgagggagaaatttaaatgatgagtgattggaggaaaaaataatactctagaattagacttacttttacaagttttgaatcctatgaaattacaattaatttattattatgagaaggatggagtaaataatggtccacggtacttgaacattgatagttcaaatattataggagcaaaatcaagagatagtaagtactataatgtgtgtttataggggtaaatttatgggcgctatcagcacatgcgtttgtaccgtgtattaaaaaaaatgatcagcataggtactcactggtgagtaagttgtaagccctcaaaaaagtgtgcaggggatgttccaccgccaaagcgtgttttcccgattcaatcattccatgtggttgttacgtgcatgcatagtgcgcaatagtgtttctgttgcttgtgtatttttttaagctctccaaacaactaaaaagagttttcatagagagcccaaataatgtgattaatgattgtcccattatgcagtctgaacatattagatgtacaccgaaatgcttgaaagaaaattatatttggtcgattaaaatctaaaaatcagttggcataattgccaatggatactctcaacaaggattactcaaacctctatgttgtaaggaggctacactaaatattttattattaattggtccaattagttgccaagccctttatgtatatgtaaggatattttgtgcattttttttaaaaaaatgtttcacgatcactataacatgcatggagtagaaacaattgacatactcatttgtaatttgtgtgtgtgcccgtatataagcatgcatacattcatggtacatcaatttggcacgtaggtgtagtttaatgcaagaattaatctgagtgtacgggtaaaacaatttgcatggcgggtacgaggttggtacaataacttaagaaataatgcaacaacattctttctatacacattcagtttttaagtaattattttgtcaatatacatggactaatttgtactaatatacttaaattttgcaattctagtaactaaagtcacttaaattttgggtttatagttgagagtgaaaaacaaattggtggtgcaaaaaggatgaggaacataattcttatatattaaattccagactgtaagctaatatccttcgaattgtgtaatgtcatatctaaagaagtggaagctgaaacatttcttgaaaaaagacgcgtccacgtcatcaataaaccttaaaacgtccggtatttttgtagatcgatgtgagccatcagattacctaaatggcgaaagatcataaatgtccgtcttgaaaattctattcatttgatattttactattttcccctccactcccccatccaccagtgttaaacggctcctcttctcctgccttagctgctctctccacaccgccacttttgcatcccctcgccgccaccgccgcctgcagccgccgcctctgactcctatccatcgcgccttggcagcaggctcctcgtctccctagccatactgcctccccatccaaaccgcaccgcgtcccccgtcggacccagacgcgcggagctcaagggcgctagactcggctaggctcacaacggttcaccgcctcagcctactcgcccacaagctccgacgctgcctcctccccatctaaaccgcagctatctcatctcatcttacaccaacagcctctctcctcatcgccatcaatggcactgctgatccggacgatttctcatccaaatggttactatgcaagagggtttcttgaagagaccgaggaattagtgcatactaatcaccaacccgtgcgttgcatgggctattattattaatattataatattttagattctaattatagaaaattcattagatattttttaattatatcggtttaaacttaaagatatataaatcagatgtcaattacaacatggatagtataaactgaagaatcaaaagtattttcagtagtctgttattaactacaatagcctattgttaaatagggcattgttatttaatttttaatcgtacctatggtcatgataatacgatccaagtaagtactgaccagatttataattaatgttttagctcataacgagtgctctattagtttggtacactactacgaaaaccatctttcgtggcggtcattttgggtttccgctggcagaaatcgcagccgtcacaaagcaaaggccagtgaaaatgtcgatcttcgctagcagttatttaccgccagccaaaatgcatcttcgctggcggccgagaaaggaacgcccgccagcaaagagatctcttcgctggcggtagccttaggacggccgctagcgaagccaccgaagacatgtccttgctggtggcggacataacgcagccgccagcaaagaagtatctccgcttgcggtagccttaggtcggccaccagcgaagataattctttctttgataggaaacatattttcaaacaccaagtcaaagaagatagtagttcccatcccgggcaggcatgaattgaaataatagtttccatcccggataatagtgaatacatcctagcatttgccggcaagccaagtaagcgtgatcagcgcttacccacaggaacatgaataaagatccaaattgcactcccatgactacacatgttccttgaataattgaaaactagaatcaaagaaccaaattgaaatcatattgcgcatccatggcaagcatggaacttgaattatttacccagaaccagaatccggaatattgaaacaagaataatgtcgtaaacataggataaacatgaaaacctaaatggcgtgaacaacaatatgaatataagcggtcacatgtcacatagaaatatatcggaaataaatagatagagcaaacaatccatgaatcacacaattagttcatcatacacttgcctccaaagaaaggttggtatcatgcacaatctgaaggaccactacctaatcacaaacaaaacctcagcaaacacattcaaacatgcatataaaacaatgaaaaaggtgaacctactgtcccatcccatcaaaacgcaataacaaagaacgccgtttggactataaacaagactgctgcttcaaaccttcatatcttaaaatatgaaaaggctatggccgcaaataaatacattttggaaatacgaaaatgctatgccattaaaatggtctaatttgcgctcgaaagaaggcttcacaatctgtccaaaatttcagactatccgcaccaaaacaatcaaaactggagttctactcgcccaatcagggtattcctgaccaatatggaaagctaagaaacacctctacaactttgtttataggcggcttgggtgattccactgtttaacccatccaaaaactattcaatctactactatccaaattatgacataaaaacaacagttatactaaaaaattcatatcgtctaaaccagttgagataaaaccgctctctttggtcagaagatagacataaatattatctacaacttcctaattatatacactttcacaaaaaatatcatttagtcctccgaaacttcgaaaaaccgaaacactgtaaatctgccaacgtgcagaacagccaattcgaaccacaacaacaaaactccttctctaaccttctttatccaggaattaaaccactaaaactaccatagaacaactgatacaacaaggggataagcctcacctagggttttccttctatatcccatgggaaacgacgaggaaactccgatctaacccctcctccttctcatctctcctcctcttcgttccgtttttccacattgcttcttgatccaagctatgaagatggagatctagggagggcaatttgttgtagaggggagatatgcgaacacatgaggaacaggaggaaggaggcgctggccagggagaggggtgggattcggtttcctaggttttaagggagaactaatgggcagggtttatgagccttctcatgttggcccacttataaagatatttttcttttatttatttctattaacatatttattttaacaagtcaacccaaactaaaaacctaaatatatttttttaatatacggggtattacaccttttcatgatgcctttgtgctatgtaagttttcctctcttcgggactcatcgcctttgtcggtgatatgggcatggggtctcaagaccagagggaggaggccaccccccaacaccacatggccctccctcgaggggagtctggcccgaggtggggtggcggccactccttcctagagactagatggaggaagctgccccccaatgccacgtggccctccctcgaggagagtcangcccgaggtggggtggcggccactccttcccagagactagacggaggaagctgccccccccaatgccacgtggccctcccccgaggggggtcgggcccgaggtagggcgacagccactccctcatgtgactaggggtcgggttcccccgacgccctccgcgagtcgccacgtgcggtgggttaggtggccaccttcgagcgctcacctacccgcattaatggtgacctaagtaggcgcgccacgccacatttaatgtggcgtatagcacgcctaaattggtctgtgaccggtcgaatgaccgacgggacccagggtgtcaggcgcactatcgcatgtgtcagggggcgtacatcccgtcctgtccagtcagtcatgatgatgagaggtcttagcctcccatcccggccagagtcggttcattcgctctggtcaattagggttcccgtttcccagtgcaaccaggagcccagaagactacacaccttaaatggtggttgacaggggcaccccccgtgttaggcggcaagatttggcaggcctcatcatcaagatggtatgcgcttgcttcccaagtcaagagacaagacaggcatttaatgcaaagattgtaatccttctccactaagttgtgtttttgggcccatgtggtaaccccttgaggtataaaaggaggtccaggcctagtaagagagagagagcttatgcccctgatgatcaacaccttctaccccaacaaggagatcttgtaatttctcacaagatcagctaagcacagaagtagggtattatgcttctcagcagcccgaacctgtataaaccccttgggtcagatctttttggggggttcaaccccatcttcacacatctacacaggaatctcgaatctcacccgctgccaaaccaaaaaagagggacctcacggttccctggtggaggagttcacctttcgacagccttgatgtgttccggtagcttcttctcgtctagcgtgtatgtgtggttcggcttacttatcatgcacgggtttaggtaggcaacaggcttttttatcacttcggcctccacgtaattcatcctgccaacaatggatgatcaaatgagctacgcatataggtgtagtgatctattaaaacgttcaagtctagcacttacagacaccagatggcaatcaaattggcgtccagcctcttcctacagtagagggaatgcatatcggagaaatggacttagagtagacaaagacctctctagaagatgttctcccccacagcaactgtgaatgatgaaatgcctttcatggtgcttgccctaatgtaccaatcgtgccgccttcttagttgccacggtccttctcttagtttccagtcgtaaatgaatggtttgtcattctcaaactcgtgtggctcatctagagaattgatatagttgagatagtgataaaaggtatgtttgaacccttttaattttcttttatcaaactcggcatttacgatatctttctcctttcctcggaatgccgttaccatatactgtttcttggacgcactttttgctttgtgcttgtgcgtccttaccatcactagcacatcggcatccttaggttcctctggttgcgatggctctggttgatcaggcattgtctgttcaggcaccgcttcaatttcacccgccgctagctttgtaggctccgcttgtacaggctctgatggttgtgcggaagacatttgtcgtattgctagctgtgattgttgctttgcaagcaccgattgttcttatgcatcctttttagtcggaggtgatgcaacaggaggctctgatcctggaggtgatgcaactggtggctctggtctagggggtgaagcaataggactatccctcggactagctacgactagtggacgtgatgataataccgatatccttggtggacaatcagttccttcagttgaccctagttcaatatcattcttgtgccatagtatgaattggtcgacggcatctccaaggtacacaatctactcagtagttggaaagtcgagcgcgtgcatccagtaagcctcaatgaccgtccggacctctaccttggcgtagtcatccggaatgtcttggcaatgaaacctgcgacctggtatgaacctcccagttgcaacgagtattttctttcccgccctgccgaccggaatcaagagcttgcacggagtatcctccgttacatcatcgaaaggatagctcagctcaggctctaaaacagcagcaccgtgcatcattttctgactccagtatatattgcattcgtcacgagctactgccctagcctgagagtcaatctcttccctgtagcgatcacgcttcttgtatgtatgagcatcctgtttgaatccatccttccagctagtctttgaggatactccccgtacacggccagagtgctccggtttgcccaaggcataggtcagctcgtcccagtctctatctggcacaaacgtccaggcctgttgctgcgtgatgatgttcttcatcttgacagctacctcctggagcttctgatccttgaatactacatccccctcagaggtgaaggccggtgttcttgcacgcacccagttcctgcttcgtgggttgtgatttttcataggaatcggtttcccagccttctccatctcttcatcttgttttgccatttcttcaccgcttgccggtaaccggtcgatcccaaatgatgtggatattcattccttcttgctagctcagccatcttctagctcttctccttttcttccgccgatgtcttaagggcaatgaactcatcccactgggcctgtgttatccttccgtagtccttaaacggcgtgagtcccttctacatatatttcttatttaggtctattttccagtttcgccacagcttctccatagtcttcaacgcatattccttggctttatcgtcgtctgtcccctctggatattcaaacttgctttgcagtgacgtccaacagctgttctttctactctctagaactttcttccaatccttccatgtgatctccacaacattccttaccaccgccccacattggttgctatacttcgaatatgagtcttccggtgacaagggttcccctgtctcactcatccgtgtcagcacacttacttccttcaatagcattttcttccctcgctcgcccctccatttcttgggtttgcttgaagctgttgtgcgcacgacagctgtagcttcagcttcaggttcggttgcggcttgggatttccttttggagcgacgtggagcattcttctatgtttgcaattcacgtggtttcaattaaaatccatagttcgtggttaatatgattggaactaaacatatattatatgctacgtaccaccggttcagggggaacatagtcagagtcaacttcattgtcactaccgccctttctcttctttgcaggagaaggatgggggtcactcggtgagtgatacgatctactacctggttcacttgagctcgacgaagattcctccgcgactacttgcgtgcaaatttcttcctcgatgacggcctgagtttccttgcccttgtcacccgtgggttgctcttgggtgggtttgtccattgatatcctttgaaggtgaatatatgagattggtaacgacaactatattacgatggttgaactaaattatcatcgtacatctcatggttgaaccaaacatctcacaatgtttaattatcaaaaaacatctcaccatttcaaactacctaattaagttccttaattatcaaagaatgacagatttcgaagtgcatggaaaattttggtgtctaggttggttccgtgcatggactaccctgaccaatccaaaaaaattccccatgcacttcgtattctgtgatggcttgataacctaggaactacattaaatctacggccaatctatcaattcatccatttgaactaaattttaaaccctaaacctaattaagttccttaattatcaaagaatatcttcactggtgtcagcttaagagggccgccagagaagatatcctatcttccctggcggccatcttaagttgatcgctagcgaagatgtgtttccgctggcggcccttgaccccccgactccaagattttctatgctggcggtttttccacatagccgccatgaaaaatattttccaaacgccatgaaaaatcgattttctagtagtggtataagcccgattaatagattttatatgtcgcttaaatattagagaactactatatgcaataaaagaactctaaatctctaccatttgactcaattagttgaaggttaaagaaaattaatattaaatgacactgtgccccatatttgtgtttgagaatgtttgtaagaaaaaatttgtagatatatcttttcctatataatattggcttgaaaatctatctagcatgaatacaaatgggtgcctgagggccacaaatattcatgactaactgaatcgaagcaaaccttcaaatagtagtatttcgcattttatttgaattattccgtagaatccgagactatctgtctattatatactaaaagtccatgaaacttcctagaaacgctctcaagccgccatgtggcgttttacaaacgctcctaagggcagtcccaacccataacactaacatagacactacccttccaatgcaaacaccactattccatacttcaatttaatgctacttatctcacatgatgtcttggatgttgtgtagaaccatgtctgatgcaagacatgatttccttctcttttctcatttattcacttgccacatcattttttatcctaggtggcagcttatttaatactatggacaccatcctagtcattgggttgggaatgccctaagtcgcctattagatcgatctcttcccttcccctgccgtacatgcatgccactgtacgtatgtacgtatatgtgatgcgtattccatatgccctccccttttctcctattttctaacaactcaatacaaaatagtttaaattttaaatagctaaataagcatgattctcaatttatatacaacattaaattcatttgtgctatttttatttgtaattaaataaatacatcaagatcggtattgcatatattttgcgaaggtaaaggaaaaactgaaatacgtttggacatagaccctagcgtcgcagtcattaaacaatataaaaaaatgacaacaactatatcatcttaactcattctatatataaatatgcacattaaattaaatatcatgtaggacccaaaccatcaccctgcacatcttaaaaattaagaaatcactactacgaaaatatctttcatggtggccattttaggttttcgctggcggtttttgcaaccgccacaaagcaaacgccaatgaagatcaaaatctaccctagcggttatcggccgtgagcgaaaattgattttcgctggcggttgtgttataccggccgccaattcaaattattcccaaatccactcctcgattcacaaattcacataaatttacatcaacaatttacaataaaaacagtcaaaatttttcattcacaatcaacacaaatccacacaaatcataagatattttccattcacaagccacataaatccacagaaatccgagcaccaccgcccgcggcccggtggcgtccgtcgtgacgaggtcgaggccgatagtcacgctccaccgcccgaggccccagggccgtgctccccgcgccgcagccagggcggatccgtcgttcccctgtccgtcctccccggtggcagcttcctccccttagacagatctgggagaggggagaggatgggatgggagggcgcggcgccccagtagagctagctgcggctgctctccttcatgtcgacactcatgacatggaatctgaggtaggccagcgagtcggtgaagcacagcacgcacaggatggtcgtggtcgccatcgtcgtcacttccttcgtgttcgtcgtcgctgcagcttctttcgtgatcgccgtcatcaccgtcgccagttgacgtcgtcaccatgcacatccatgccacgcccctcccgccgtcgtggtcgccatcgtcagcgcgcgcccctccggccacgcccctcccaggtggaggaggctgggggcgcagccgcgcagggaaggaggagggtctcggtgggggaggaggaggagagggaggtgggtggagagggaggtgggtgggtggagaggagatagagaagagaggggacagtgggtggttgaagggaatatctcagcgcgcgtgattttaaatgacgtcgatttttttttagcgggctatgttttttcgctggcggaactgtttagtaaccgccagtaaaaatgttggttttcgctggcggacatttaagaagtacgcctaaaaaaatagagtattttttatagcggacgtcttaacgtggttgccaggaaaaataggttttcgctgacggtcctatacccccacccctcttgatgtttttgctggcggttttagcatatatccgccagtgaaaattatagtgcgacgccatgaaaaattgttttcctagtagtgaatatcgttgaaattctataagaaaaaaaaagcaaaacatcctaatatcattttacacttaaatcggcaggcgtattattttcacccattagatatatcattctactcccataagccgctacttgtcacatgttaaaaattaatagaaattacatgtattctaaactaagagtccataaaactttctagaaatgctctcaagccgccatgtggtgctctacaaacgctcctaagtcatcatgtggcgctttaataaattggaaaaaaatcctaaaaattttaagaaaaaagaaaaacatctcaccattggttttagtggacccattatttttaaccattagatcaattttaaaggaatatatactcaatccaacctatgggcctattagatcgatctcacagaatatgtagccttcccttcccctgccgtacatgcatgccaccgtacgtatgtacgtatatatgtgatacatattccatatgccctccccttttctcctattttctgacaactcattacaaaatagtttaaattttaaatagctaaataaccatgattgtcaatttatatacaacattaaattcatttgtgctatttttatttgtaattaaataaatacatcaagatcggtattgcatatattttgcgaaggtaaagaaaaaactgaaatacatttggacatagaccctagcgtcgcagtcattaaacaatataaaaaaattgacaacaactatatcatcttaactcattctatatataaatatgcacattaaattaaatatcatgtaggacgcaaaccatcacccttcacatcttaaaaaattaagaaatatcgttgaaattctataagaaaagaaaaagcaaaacatcctactatcattttacacttaaatcggcaggcgtattatttttagccattagatatatcattctactactcccataagccgctacgtatcacatcttaaaaattaataaaaatcacataaattctaaaagaatgaagcatccgacctcgataaaatcattatttcagccattagatctatatttaaagaaaaactttaaaaaacaaagtgccatcccattccccctccccctcgattaacaaagcgccatctttatattctgaaattataaatatatagtaaatgaataaatatatcgttggagtatataaccatactaacaaaaacagggagtagggaaattgtcattaattaactcaagttgcacgcattagatttttaacttatgtggtatgaaaactattctacatggaccaatgggagtgctagaaaggtccattaggacacttccaaggttacatgtggccgttgatggagacaaccattaataaaaattcatactgaaaagcataattttatagcagagagtacatgtctaatatcatatcacgaaaagacaaccttgcatgagaaataacatacaaaatataacttaaatgattatctcaactctccattgtactatgttaggagtaactttgtctaatgtggtcaatattgtggatggcagtaacatccttaactctcctaagatttatttcgaggcctaacaaattagaaaacaagccatagcacaatggggccatagtaagaatgcacggggtttgtgcgagtcaggaatcccgacaatggaattgcctaagcatcaactctattttatactaacaaagaattacattggactctagcaaatgagataaaagtccgggcatggccggcgttgtattaataaaattgccaaagtatcaactcgatctattttgtattaataaagaattgcatagcaactaactccactgttgaaaaataagtttgtcgtaaattcaagattccacaattttggcgaattttaatttagattttatgtgttttaaggatcgttacaaacaaaatcataaccatatttcagagcaatcccaaatagatttttgagagaagtatcataggtttaaaatatgataaaaaatccaagtaaaaatcagccaaatttatacattcataaatctatctatctattatatactaaaagtccattaaacttcctacaaacgctctcaaaccgtcacatagaactacaaacgcttctaagctgccacatgacactctaataaattagatttatttttcttaaaatatgatggtcccattattttataccataaaaaaataaaaaattgaaaggcccacattcctctccttccgacctgtacgtgtagtacgcacgacatgctaccatacgtacgtacgtagatgtattggcccctccttcctttctgtttctatctctcttatttttcttattttgatgacccttctattcctatctctcctattttgatgatgtggtagattgaaaacatattgatgtgttcgctggaggaagttgggaacctatcactggtggagaaaccatctttcgtcggtcggccgatttccacaatagtcccggatgcaataaaaaccggggctaaagatgatctttagtcccggttcaaaagggtaacgggcatatttgatctttagtcccggtttgtgttaccaaccgggactaaagatcatccttagttccggttcgaatgctgtcaggacctgttaggcccccccgggatctttagccccggttggtgctaccaaccgggactaaagtcccacccctatatatatgtcttcttcctcctccagctgcccgagcaagcttcaaaatttcttcaaaaaagaggggaggtcatgccaaaatttctattgaatttattttggtgattacatacaaatcggaggtgcctaaaaggtttgcaacttcatcctccaatgtttttttttgtcatactacatttgcacctatgttttgcacactttttttctccaaaatttagttgtaagttgatgagagagaaaatgtgtgtggggaagaaagaatatatagaaatttagttcatttgctaaacaaggttttataaaatagttgagaaggaaaactctagtgaaagttaatattaaataatagaaaacaaactaaaataaaaattaaaagaagtaaaacacattaaaattagtttaaaactttacaaatagtttttaagaattatttggtgtaatattttatgatttttgtatgaataaagatatcttataattattgtatgactgtcattattgtaagaataattatttgtgtgcggtttttttgactcatgtagatggatcggcaatggatgtacgctgaccggcggtccaaagagtttattgacggcgtgcactattttttgagagtggccgaagctaacaggcaaaggggttttatttgttgtccatgcaataagtgtaagaatcagaaggagtattctgcatccaggactattcatttccacttgtttgagtcggggttcatgccaagctataattgttggacatcccacggagagcaaggtgttgaaatggaagaagatgaagtggaagacgacaatattccggactttgctcagtatgttggatttgaaggaaatcaaacgggcgaggaggaaatagctgctgatggtaacgacgttgcggatgatcttggtcagatgttgcaggacgccagggaagactgcgaaagtgaaaaggaggcccataaattggacaagatgttggaggaccagagaacttcgttgtacccaggttgcgagcaggggcacaaaaagttggataccactctggagttgttgcaatggaaggccaaaaatggggttagtgacaaggcatttggcgatttattgaaactcgtcaagaacattcttccggggggaaacaaattgcccgagacaacgtacgaggctaagaagatagtctgcccgttaggactggaggttcataacattcacgcatgtccgaacgattgtatcctatatcgcggtgaggagtatgagaacctagaagcatgccctgtttgcaaagcactacgatacaagattagacgggacgatccaggagaagttgacgggcagctaacaaagaagagaattcctgctaaggtgatgtggtatttccctataataccacggctaaggtgtttgttcaggaacaaggggaatgctagaatgttgcgatggcacgctgaagagcgtcaacaggacgggatgctgagacaccccgccgatggttcgcagtggcgaaacatcgacagaaaatttaaagaatttggaaaggacgcacgaaacatacggtttggtttgagtacggatggcatgaatccttttggagagatgagcagcggccatagcacttggcccattacgatgtgtatctacaacctccccccctggctatgcatgaagaggaagtacataatgatgccgattattattcaaggccccaagcaacctggtaacgacatcgacgtgtacctaagaccactggtagaagatcttaaacagttgtgaaagaaggaaggtgtccccgtgtgggacgaggacaaacaggaggagtttaacctacgagcgctgctgttcgtaaccatcaacgattggcctgcacttagcaacctatccggacagtccaacaaggggtacaaggcttgcactcactgtatggatgaaacagaaagtacgtatcttaagcactgtaggaaggttgtatacatgggtcatcgtcgattccttgcagcaaaccacccggtacggaagaaaggcaagcacttcgaacataaggccgaccaccgtacgaagcctaaacatcgcagcgggaaaacagtgtttgctatggttaaagatcttaaagtagtgttcggaaaggggcctggaagccagcatatagagagcgaagatgatcacgcggcgatgtggaaaaagaactctatattttgggagttaccatattgggaattcttggacgtacgccacgcaatcgacgtgatgcacctcactaagaacctttgcgtaaaccttcttggcttcctaggtgtatacggaagcacgtaatgatctgaagcatatggaacaacgcggcgaccttcacccggaaccaaaggagaaaggaagccattacttgagtccagccagctacactcttagcaaggcagagaaggaaagtatgtttgaatgcttggagagcataaaggtaccgtctggatactccacgaatatcaagcgaataataagcacgaaggagaagaagttcacaaacctaaagtctcatgactgtcacgtgttgatgacacaactgctaccagttgtaataaggggtatccttccagacaatgtccgggcaacaataacaaagctatgtgcattcatgaacgcaatttcgcagaaggtcatcgatccggtagattagaagcccttcagaatgaagtggtgcaatgtctcgtcagttttgagttgatatttccaccttcatttttcaatataatgacgcatctgctttgtcaccttgtgaaagagatccgtattctcgggcctatgtacctacacaacatgtttcctttcgagaggtacatgggcgttctgaagaagtatgttcgtaaccgtgctcgtccagaggcaagcatcgccaagggttatggaacagaggaggtcatcgaattttgcgtagaatttatcgaagaccttcgcccaatcggggtacctgaatcacgccatgaagggagactacggggaaagggaactctcggaaggaaagcaataatgacggtagacaacaatttattccgtaaagcccatttcactgttctgcaacactcttcattggtagctccttacatcgaggagcacttggctctagttcgcgccaggaacatcggtaagtccgatgcatggattacacggcatcacattgatactttccccgcgtggctacgacaacatctcatgggtaacgagtcgatcaaccaataacttgccttcctggcgaggggaccgtctgggtcgatcgcgacattccagggatatgagatcaatgggtacacattctacacgagagcccaagacatgaagagcacgaaccaaaacagcgctgttcgtgtcgatgccatgggacacgatggaacaactgccacgtattacggtgccatcgaggacatatgggaacttgactatggtcctctcaaggttcctctgttccggtgccaatgggttaggttgactggtggaggcgtaatgattgatgacagtgggatgacaactgttgaccttaacaaggttggatactcggacgaaccttttgtccttgccaatgatgtaacgcaagtctttttcgtgaaggacatgtctagcaaaggaaagaagggcagagggcctgatgagcctaagcgtcaagtggttctcccaggcaaaagaaaaatcgtcggagttgaggacaagactgacgaggattacgatcagttggatgggcaaccccctttcacggtgacgattgaccctagcatcctcctatcaaatgaagacaccccttactcacgcagcgatcacaaggagggaacaatagtgaggagaaagtacgtgcggtcaaccgtcaccgccgatgtaatgccgtaattattgtgtacacgatgtaaactattttcgatgtattgattatccatataaatcaattgatgtatggcatatgttaattacgcacgattattagaggtttcaacaagtttaaatcatgtatatgttagttatatgtgatacttacaatttttaaaagttttaaatcacacaggtggcaatttcatatgtatgttaattagagtttttaacatttaatttactagcattcatatgctaattataattgactagaggatttttaaaagttttaaatcacgcaagtggcaatttcatatgttaattagagtttttaacatttaatttactatcattcatatgctaattataattgactggagaatttttaaaagtattaaatttaatatatttttaaaactatcattcatatattagagtttttcacaatttaatttactatctttcatatgctacttatatatgactattcgaatttttaaaaggtttaaatcatgcatgtggcatttacatatgttaattagagtttttagcatttaatttaatataattcctacgctaagtacatatgatgattacaatttttattaattttaaatcatgcagtatgtacattaatatcttaattagagtttttaccaatataataatatcattcatatatatgctaagaatatatatatattggaatttttattaattataagtcatatatttgcttattacgatttatccacttaatttattacagacaaaaataatttttcgaagtaattgtcatcaatctttgtactttaaataatgttaatgcattaacttctattttataaacacatatgtaagcgaaaatcatatgcaatgctataatcttcagtcccggttcttaaccctaaccgggtttaaaaagaatttcgaaatagcgggaaaagatatttactcccggttggtgagaacaaccgggactaaagatcttttctttactcccggttgttctcaacaaccgggagtaaagattttttctttactc

SEQ ID NO: 21377 - DNA, 8690 bp, Oryza sativa
ctttagtcccggttgttgaaaacaaccgggagtaaagatccaggggtatatatattcccggtgcgccctcggcttcttcaccaacacttaaacgttttcggccgatcgatctctctcggcccctctccttcgccgccactgcatagggcaaatccccgcgccgacgccgccatatctcgccgtcgtctcgagctcgtcgtcctcgccgccgcctccgcctcctcccccgcctccgcctcctccgctgccgccgcatctctggggtgagagccgccgcatctctggggtgagagccggcgcatctcccttcatgcatctcgatctctccgatctcgatctctctccgtcgccttcgacgccgccgccttcgacgccgcgcaacgccgccgccgcatgccaacgccacgccgtcgccgccgtcgccacgccgccgccgccttcgccgccgcgcgcgcaatgccgccgccgccacgccacgccgccgccgccacgccacgccacgccaccgccgccacgccacgccgccgctgccactgccccacaacgccacaccgccgccgccgtcgccacgccgccacgccaaccgccgccccgatgtcgccacaccgccgttaacgaacgagaacgagaacgatcgaacgaacgagagcgagaacgaacacgtcaacgtacgttgccgcgacaacgtgaacgagaacgagaacgatcgaacgaacgtgaacgagctagggaacgtgaacgagcgaacgaacgaggacgaacgttaacgtgaaatgcaatatatatatatatatatatacatgtatatatatatatatatatatatatatatatatatatatatatatatatgttacttcgcatttatcctaatacattttttttatcttgcagaaaagacgtgttgtcggagtcgtccgtcaagcctgagtggaagagctagccctagaaggaattggagcaggcaagtgacgtaataatataaatgattgttatatttgtaatgcaattaattaagattattagacctgtaattagacttatcatataagattgtgtagtgttctaatattatttgagttttaatataagattattttattgcaaattagacttagtatgacattattgactacggaattggtgcgactcctaggaattgactattgtagtcttaattagacttagcatatacgcacgaaacacttagcatacattactattttagtcttagcatgtaatattatttgagttttaatataatattactttatttgtaattagacttggtatgtaattattgactacggaattggtgcgacaagtagcaattgactattgtagtcttaattagacttagcatatacgcacgaaacacttagcatatacatgactattttagtattagcatgtaatattatttgagttttaatataagattattttatttgtaattagacttagtatataattatttactagctagggttgtataatatacgtcacctagacttagcttatatcacgatttgtaattagacttagcacgtaaggttgtgtagggttctaatgtacgacatttacacttagcatacatgacttagattgttaaaacataaatgtctcgtgacttagcagatgtttcttgtatcaacagatggctgaccgcgatgaggaacagatattgtacgatacaatcgcggagggatgcagccagtactggaatgaagaagaggggaacgaggatccaaaccagtacttgaacgaggaagggaacgtggagagggatgcggaggggaaccagcaggggcacgtggaaagggatgtggaggggaaccaggaggaggaggctagtggtagtcaaccctccgttggacagaagagggcacgcgggcaacgaggtgcagcgaagaagcttgagggtcggcacatcataacggaagtggaagaagatggacgtcctagtgccccggccgaagccgccaagaactatgtacgtcacagcggttgggttgtgcgggataacgtgcctgtcagtacggtgtactggcgaagaacaagggcacgcggagatcatgagagctttgtcccagattcggagaaagagatgctgtggaccacaatgctcgagacattcacccttcctgcgggtacagaggacaaagtgaaaaggtggactctaaagaaaatggcagaacaatttcagagcttcaagggagatctgtaccagaagtatatactgaaggggcagacaccgaacttcgacacattcccaaagctaagggatcactgggacgagttcgttgcatataagacaggtgaacaagggaaggcgatgatggaaagaaacaaagaaaatgccgccaagaagaagtaccatcaccacttggggtcaggaggctatagtgtcgcgatgccgaagtgggagcagatggaggctagcttgattgagatgggtatcgaaccggcaacagccaattggccggaacgatcgaagttctggtactatgctcacggtggaacgctcaacccagctgatggctcactggtcttcggctatcagatacaagaggctgcgcgacgactaacagatgcagtggaagcctcctctcagggcacgttccgaccagacagagatagggacgagctgacactcgccctgcagactccagagcatccaggacgaactcgagggaaaggggtgattccttggaagattggtttcaaggaggacatccacacgtacaggagtcggatgaggagcaagagagataccgaggcgaagattgcagacctagagttccgggtatcgagctacgaactcaacatgcaagaggagatggcaaggaaggtcgatgaacgcatggccgcacatcggtcccatgatccccaccgaccattcctcctgcaatggtgagcccatcaggaaaccgtagcagctgcgcctcaacggggcaggtaggatcacagagcatggacgccatgcaaacacaggacgaatcgacctgtcccgttgatgacatcactcagcggacaccatgtgagctgcatattcctttgaagaacttatcaataaaggtaagatttagccattccgctagttgctgcttatatatgttgattactaataaataatctctcacaacatgaaggtggcgtcgggcatggccatcccaacggacccttcaggtacttaccactgcaggccgattccagcaggatactccaaggtcgaagttgagttggtcgaaggcgcgtacgaggacctcgagctggattaccctggaggagacggtgagacgcatctacgagacacatgccatgccattattctatggcgcaggcggtacatcatcctccctgggcgacaagcggcgtctcgtgcaccatctcctccggctccaccatctcctcctcaggatcctgcaccgtctcctcctcatgctccgccagcaccgtctccaccttaggctccagcatcgactcctcaggatcctgcaccgactcctcctcgtgctcctacacctactcccccgcaagctcctcttccggcaccttcaaagtcaagggcccccccagctccaccgcttgcccacacaagggcaacaaagaaggcgaaagttgacgccgccaagatcaaggacccggggtacgattgcacgcaagaggagcttgacgcttacgttgcatcagaagtcaagagacaattcaagcctcgaagtccagaaaagaagattcctatagaccccagtgtcaggaacttcttcaggggtatgtctgcatctgtcaaggaggccatcaagctatcggactatgagcgaacgctgaagaaagcatcttctggaaagtccaaaccagtccctcagcttggagagcaaccaaaccaggagatcgagccgttggtgaccggtaaagaaatgacgatagaacaatttattactgacaccggtctaactacggatcaattgctaggagtcgcaccaatcgaaaaggcggaagtgaaatacatgtacgaactcggtaaaccgcttgtcaagcctgagctgctgcagtccctacccacacaaatgtacaagttccatcagctgtacatggagatgagcgccaccggtagagagatgatcggagcgaggatcagagacacggacttcttgcaaggagatgacattctctggatcaatttcaggggaatctacgaactataccagctggacgccctcgacgtctctattatgagttgctggattttgtaagtatatcgttcagttagatttcttactatacgtctcctttaattaattaggtccttgtatataagtagaccatagaaaataatatactcccttttatcgttgtagaatggagattcaaagggcccgacggcggagggttttcgatactggattcatcgaccctcggaaagtaaacgtcgcaatgctcgaccaatatccacaagaaacagaggacaatctcgtccatctcctgaaggcgcagcattacaagacgttcatactgttgccatacaacacagagttagtttaattttactgtcttcctacataccaaatttcattcccgtacgaacttgctaagtgtttcatatgtaatgcatcccacgcacattgcagattccactgggtgcttttactcatcgacctggaggcctgcaccgtcaacgtatatgactcaatggataaaaaagagtctacgtttgacaaggttttcgaacttatagacaggtaccgtcataagttcctttgttaattaagaaaatcttgttatgttaattgctactacgaatcatagctttaaactccatgtaggacttggtatcggttccgtcatttggtccgcggcaaatagagagaaagacttaggcggaagttcaaatttccagtgagtacacatgctctacatttatatttctccgattcaaatacatacaagtgtatattaattagatctctcgttgtttgtcatttatttgtagtgcgcaaagcaaaagcagggaactaacttgtgcggctattacgtgtgcgagtattgccactgccttgcagaccaaatcatcaccacaagagagctcgatgtacgtacaaataaattcaaaatttcattacgtagcgatttcttgtttaattactaatcaatttcatacattcatatagtttattcgcatgagggataacctgaccacacacaaggaatttatcgcggcggttcaagaacaactcatgggattcatcaacgaagaaatccttgatcccaagggtgaattctactacgacggaaacacaattcaccggtccttagcttctgagctagcagcgagtactactacgtcgaaatcgtagctagctaggacatataatggattgtaattaatacatgactacatatgtttctatatgcatgtgtacacattttctataatgtaaatatattttgttcatatatatatctatatacatatgcatttgcataacatatatatgtataaatacatatatatatgtatgcatatatatgtattgaaacatatatatgcatggtttatatatatatatatatatatatatatatatatatatatatataaaccatgcagcaagaggggcatgcaaaaaaaaaaggtcagctctatctttagtcccggttatttcacccgggactaaagatagcgatctttagtcccggattggtactcccggtttggaaaccgggactaaaggggggttacgaaccgggactacaaagggtttctccaccagtgtatctcagctcacggaaaacggagtggtccattagcgcgtgattaattaagtattagatttttttttcaaaaatggactaatttgatttttttaagaaacttccatatataattttttttttacaaaaaacacaccgtttagcagtttgaaaagcgtgctcgcagaaaacgagggagaagggttggcaaaatggggtgccaaacacacccataagactatacaaactaagggcccctttgaatcgtaatcgtaggaatgaaaaaacggaggaataggaaaacataagattctgacaggaatgtaagtataaaatagagaattgcaaaacacaggaaaaatacaggaatgatcgtttgattggaccacaggaaaaacacaggaattagatgagacactactagaaaaataatttgttgccatgaaaaaaatcgtagcatcaatgctaaaattgtggcaatagatacatgttgccacaatcttaaaatcgttgttagccgtggtaataaatagcgtggtaacaggttattgcaacgatttttatttagttgtaataaaatttgatattgccataaaatggatgtggcaaaaaatatatattgcaacacttcacatggttgtaataaataactattgccaccactctatgtgtggcattagttgtacgtaccaaattaaatgtctcaatattaatttatcatcctaactatcttcttttgatatcttgtcatgttcaggattcgaacccaagatctctcccttacgcgcgctctccatgagcatcttacctacgcatcagttttgtttaaaaatgcttacaattccatttgagactgcctaacttagatttgaatcatgaatttgagtatttaaaagatttcaaataaaaaatttaagttgtagatctcatcgagagctataaatttcatataaaatttatcctaatccgtgtccatatgaaaagaataagtcaaattatgagatgataaattttttattgcaacgaactaaatgtgtggcgatagaacatgtttttttgcaatagtaatgttttttttggcgatagctcatttcctattgcaacaaaaatactgaataaaacaacgattgtaaatcgttgcaacaaaatatagttatttgccacagaaaaaatatcattgtgatagtataatatattgccatgaattatttttcgttgtaataaattggtggcgatagctcaaccctcttgtagtgagagagatagactcaaagaattcttaccaagaggttggacctcttgctaagctttctccaaaacctatatgcaataagccattccatatgaattttggaggatttggaaaacttcaatcctttgaattaaagggctacataggaaaaattcctataggattcaatcctatgaaattctttcataatttctttgattcaaatgggctctaaaatcatataactatttttttatgcacttctcgtacgtttgttgcataattcaagacccaaatcaactatatttaacaagtaactttggactagctattggacactcgagacacaatttttagggaaatcatagagtttaaaacacttgattgatagcacctagcttatattagaacatcatgaaacacagagaattaattaataagacttaaatattaagtagtagaaaaaatatatcattttggttcacgaagattatatttatgtttaaatatatataactctaaacggtaaatccgttaattggatctatctcaatctatccgtagcctcatctcccatataatttatctgttaataaacaatgatagtctatatcaatcttactgcttaaagataaaagattattggatttattttttttagaaaaatgacacataaggtgtaacactatcactatgtatcatatagtaaaatttgaactgaaaataagatttgtataaaataacatagaaaatagaaaaatctccatagagtgtaaattgaaccaatctatctatcactacaaacgttctcaagccaccacgtggcattctacaaacactctaaactcgccatgtgtcatgtcctaaaaatcagaaataatcttataaattctgaacaaaatgaaacctatcagcatcagttttaagttccattatttatataagttagaaaaataaatcgcatgcacctcctcgcctactcatatgcacataccactacctgtcccctccctatttttagctattaaacaataaatatataatcaataatttatatgttagaaaaccataatatttaagatgcacgtttgatttttttctctagttataattaaaccaagaatttaagatccgtatgcttatattttcttatatacaaagtatgccattcgcccatattcgacctacatgctttgtatattatacaaataaaattgaaataccttaaacaaattggctgcatatattacgtcattatacacgagtctgcaaacaagctaaattaaataaatagtataactacaaaactatttttgtagggtgaacacccctgcccttttacatgttactggaattgccgtaaaagaattatgaaataatccaacaacacaggttgcatcatcatatgttgtttttgcaaacttgcatagctaaattaggtagacattatctaagtaaatagaactaactaaaatatgaatagcaaatccaatgcccatagttagagaaaacaaagtccaattatttcgtgaattttcttaaatgtgctgaaataatgcaagccagctaaatgatctttcgtgtatttgctctaaactatgttaccatcaaattaacattgtgtgtggttgtggctttctacaccttcctggtaattctgtttattttctttgtgcatagaccattcaaaaggtaaatcaactatatg

SEQ ID NO: 21378 - DNA, 2329 bp, Oryza sativa
ttctctttctgtgtgtagtgtgtgcaactagaaggcttgttccatactagtttgctaggtcatggaaaagagcgagattttcgtaggagcacactcatatgcagctatatgtgcttttacactcatcataggatggttagctcactgggtatacagatggataaatcctccatgcaatgggaggcttcctccgggctcaatgggcttccctattgttggtgagaccttccaatttttcagaacaagtccatcaatagacatgccaatttactacaagcgaagactggagaggttaggattcaaatagttaataattaactttttttggaatcagtatgctatatatagttaaactttaggagaaagaacattgttgatatgaagacactattgctctaaatatgaacaacacacacaataaatctaagttcggtgtactgaactatcaggtatggacctatattcaaaactaacataggaggccagcacgtggtcatatcccttgatcccgaggtgaaccagttcatatttcaacaagaggggaagttgttccaatcctggtttccagaaaccacactaaacatctttggaaagaagacactcaccacgtataatagaactgctcacaagttgatccggagcttcgtatgcaagctctatggccctgaaaacgtgaaaaaatcactcctgccagaactagagaactccatgagggaaagcttggcgtcatggataggaaaacctagtgtcgaggtgaatgatggcgtgtcaaatgtaagttaacatctgcatttctacataagtattcacaattgcacagtgctcataaaatcatcatgatgttttactatgattaatttctattgtgcagatgatcttcggcctagctgccaaacatttgattggcctcgacatcaccaattcaggagaattgaaaaagaactttcaggaaatatttcaagtgatggtttccatcccattcccaatatattttccagggacctcgttttaccgatgcatgcaggtaggtctttatatcatccaaatagctttatgaaaatacatattttaagaatattaataagctctctaaagttataaaaattgtgattcagttaccttgattttttttttcattcctaatgaagggtaggagaaatgtatggaccacactaacaaatgtaatgaaaaagaggctaagtgcacctggaaacaaattcggcgaccttgtcgatctgatagttgaagagctacggagtgaaaatccaacaattgatgaaagttttgctatagacactctatctgggctcttgtttgctagctttgcaccgctatcgtgcaccttgactacaacttttaagttcctcaacgacaatcctgaagtttttgacaagctcaaggtatgtatagttctttaggagtgaatattttacatgtatattgaataattaaagaggatcaaacattgaaattttgggctgatcctaaacaaaaaaattcgttgcatctaccattccaggaggagcacgaaatgatactgaagaaacgagagggtgcgaattctgggttcacatgggaggaatacaagtccttgaaattcagtactcaggtgatttcaagttaatgtatgcttggattgaagcatcattggtgccaccctgatgcatttggcaatggcttttaaattgagcttgtttcaactgcaggttgtgaatgaaattaatcgaatcactacggttatacctggtggtttcaggaaagcactaacagacgtgcaagtaaacggtaaaaacttttttttacaaaaacaataaggaaaatgttgtgcatgtaggtcatgcaattgattattagagtatttgcttttgcacacaggatatacaattccgtctgggtggctagtcatgattagccccatgggagtgcatctaaacccaaaattgttcgaggatccactcaaatttgatccatggagatggacggtaagtgggaatattacattctaatcttctcaatgggatttattaaatcggtctacgcttaggttatatcataacttatattaaaactaatcacaaatacaggaggagaagagaatctcgatgcaaaggaatttcatgccatttggaggaggaatcaggatgtgtcctgcgggagagtttaacaagctttttatcacactctttctccacatcgtggtgaccgagtataggtacatacacaagctcgcattcctttgttgtacattatattatgctcacttttcagcaaacacgcaagaaagttgcacaatttttattaaggaagaacattgaataggctgggaatg

SEQ ID NO: 21379 - DNA, 7285 bp, Oryza sativa
agtgcatctaaacccaaaattgttcgaggatccactcaaatttgatccatggagatggacggtaagtgggaatattacattctaatcttctcaatgggatttattaaatcggtctacgcttaggttatatcataacttatattaaaactaatcacaaatacaggaggagaagagaatctcgatgcaaaggaatttcatgccatttggaggaggaatcaggatgtgtcctgcggcagagtttaacaagctttttatcacactctttctccacatcgtggtgaccgagtataggtacatacacaagctcgcattcctttgttgtacattatattatgctcacttttcagcaaacacgcaagaaagttgcacaatttttattaaggaagaacattgaataggctgggaatgaacgacagagaagaaataacctagaaaaaacagaggaaaacagaaggctataatcttatgccatgaattgaaaatgctcgacaagatgatcacccattcattaaaaaaaaacttccactgaaatattctaacactattttcttttcgtcaacctggtgaatagatggaaggatatcgacggagggaatgtaaagcgtatctccgaggttttggtcgctcaagagtatcatattcaactagttcctcagacgtaacatacctatgggatattcatctataaaaaaccaagtgtcaatggatcctacggagctattcgtacatgtacttcaatattttcatcatatggtcctcttatgtgtgtgtgtgtgcaagtttgaatttccatatattgttccatacttccattaaagtctcatatgattttcctcgaatttgatgaactagccgccaaaccgtgcattgtatcacttttcatatattgttataatatcattaatgtattggttatctatatcacttttcattgttctaagtcagatcgtgataaagtactggtagtttcattcaagttatacgttgaaagcatgtcacgagggcctttgactgaacctgccgaaacaacactggcgaacaaggcagagccattttggtgaaacaagatggcgaagcaccaaggagaaggcaaagacaaagctctttgccatcgccaccaccgtgccgaagatatacggtgccaagaatgggccgaaccgtcaaggacggcccacttagcagcccaactaggggcccatgaccaatttgtttttaattaagagcgtctgcagcataaacataaaatcgattttacagcaaaagaactgaaccatgcacgttgtagctatcgaactgtatgtgtcggataacaaatcgaactccagattggagtcgaaaggaactagtacaaacctattttactatgcatacgtgcgtgaaaggtagactagtgattggttgattcattttttgcgggtcccacaaagcaattttaacgctacagctatcaaactgaaattttattcggctcttggatcagatcagtcgaaccaaatactacagatgccctaaatatcgctatcataagactaaccatgtaaattcctctataatatgtaaccctagggcatgtaatctataaataggcccaaaggggcatgtattagggaaatcccaaaattttcaatcttaataaactgcttttgcttttccactatgtgaaccctgccatttagtaaacacagttgttattcgacaacagctggtgacgatcatggggaaccctagccgaaatcactgatgccaccaaataagtctgtgagtgagaaagtggtgcggatgaggtgtgagagcgaaggagaagtcgaggcgagcaagggcaaattggccgcaggggccgaagctgaagccgagtcatgaagagtcaaagctgggattcagcctgccagagcagagggcgaagctcgagtcgaagcgaccacaactcaagtgactgcttcaaccatagctgcggtgactactttcgttagtccagaagtcgacgcttcagcagccccaaccatagctgcggcgactactttcgttagtccagaaatcgacgcttcggcagcccaaggagcggagatttttttagagaaggatattttttacccggcctctatatcctaccggataaatgcagtatttttcaatttagaacttagcctatcaaatagggaacttaaccctcaaataacccaatctgaaatttgctcttatgaagatttgaactcagaaccttatggtgctacccaggtcactgccaccactaggctacatgcctaaggaggggagatgaaaaccatgcggcaagacacactacgccgaatgcaggagcaacaccaggcgtacgaagcagctatacaagccaagtcaacagcttctaccaggccagctgtcacttcattggcaacgaccactgtggcattgactgcttcgacgccacaagtttcggctgcaacaacttcatcgctattgccaatcaatgcctcaagtctctccatactccaaatcactatcgcgcaatcgaccatggcaacatgcacaacttcaatcgaccacatcttccgcattttcacttctgaaaattaactagtaatttctgaactaatttgtgcataaaattcttgtaaaggaatcattgagataaacaaatcgataatttaatatatagattcatcaataactaaaacgattgaatgcttacaaagaaaagaaacaacagcgaacaaacgatatagcgacggcttcaactccactcccacaggcatccccattgtggtataagccaaacgtgttctctttcacaactttcttcaactgaggttgattgattattgcaaggtgagtacatcgaatactccgcaagccacacagcaaatatggaagtgcacagggatgcaaaggatggaataatagggttcatttgtaaaagcaacatttggcaaacatttgagaattgtaaaacattagagtaattaattatcaatattaatcaatcattaagcatcacacccatactacataggcccaactatctatgaacaaccattcccgattgcactgatctaacctctaaactaagaattatccattccaaaccatgagctaacagttatcatcaattaccatcttattattattattactagtaatttgcccgtgctaacgctatggaattttttttaatcattcgggtataacgcacgttatgaattaaatttaacatttgcaagaatttattatcttttgaagaatcaatgtctagactttgaagttcctaaaaagggataatacatagaatccagaataatcgaccaaaattcataaatattagatagacgagtttctgatttgttgtttacatagccaccttaaggactctattgtcaggttaaggtatgtcagaatatgagacaataggatcacagtatctagaatttctaccatcatatgtaacaagataatagtacaatagttataattcttttttttacaaaatcaaaacataaaatcattatagtaaagacttattagccatcaagctcatgccgttcgtcactgtacatctacaatactcaacaagtctaaaattataaggaacttcttttagccttgaatgcccagtagaatttctatagaaaaacgcgcatctgctgtttgtcatagtagattggatttggcaaacaactaaaaattctatccaaaaacacacatttgctaaagcacaatacatgttaagattgttagtgatatgccctagaggcaatcatagagatgattgtatcacatactatgtttaaatatttatccgacattgttccttgaaatagataactcattattggttaatgaatatgtgattctttcatgagactctttatgttgtttgttactatttctaaaggatccttgatcaaatatcatatgtggaacaaatatgtttaaatgatcagcacatgtattaattgatgatcatgtctcatggatcatggcatagagataccaaattaataatgtggacacatgttggtgaacatgttgttggatagacccaacatgagacactgcaaaagccatatgtgttgtgtcatcagtgatctcatcatggttcctaacatgtgtagtagcttacttagggactgctaaacgctactctaattctagaggttaaatccagtaagttattactgaaattctagaggttaaatccagtaagttattactatctctaattaactatttatgaaatcaagattcatcttacagggtcttttggtctttactgaaccttaccccacataactatttatatatctagttttgaagcccaacagcacaattaccatatttcttagcaatataaaatacttcttgctgctagctacatgatgatacaaataattttgaactataactaatctttctacttgtgagctaaatcaaaatatttataccctattgtttacacatgttctgcagctgaaattattatatgatccttttactgatttcagagatattcttgttcatattatgatggatgagaatgcaacacacaactcctacacatactagtatatgcatcacacaagaatcatgtcatgatatgatttcacttccattttaatcttctaattacctgccatgctttagggtgactgatatgttattcccttctgactttgcagctgctcctctaaactatggttcaagggttctcctgatggaactctgctggaacaccacttgctccttcttcaggttggtttctctgctatctcacttcagcatctccttgctgctttggtttatatggtaagataagtgaaaatcttgattggcatctggatttgctacttcccttggttttcctggagtttatcctctttcttgatttctgctccatcttgcttgagctactaatggttgcttctcctactactcctctgacctctcattcactcaccctagcctctcctggctgtacacacaaggctgctacggctgtggtgaagcatgggtgagatgttgaactactgatttgctagctgtgattatttctctttagcttgagttgaatccctagctgaactgctggtgttgatttccgttgcggcagctgctgctattgctctactgcggcaggtgcttgaggtggttttccaaccgatgcaaccgaggctggggttcactgaatagcttggttgatgtatatgtgaatttggtgaagactaggtgactcacctactttagttttgatggttgtttactgactgacacctaagcagtgcttgatcggtggagtaatgtgggatttcactaaattttttctagttagataaattctgatacaattaggtacttttacacttgagtccctcggggtctctaaaattgaaggttactctgagattagggactgatttgtaattgttctagaactcaagagtttttctgaaaactaaatgattattgaatctttgactgaggtgtttcagtttatgatatggtatcaataaacaccttatatatgcacaatatatgcgatgcatactgtataagatttctagagtacaattatatgcatatatgtatgcagacctgtagtggtaaattgtaaataacgaactgtggtttctactgtgcacatgtgtagctcacttcgtgacgactaatctatgctataatttaaccaaaactaaattatcccactcctcactaggtctactctaactaaaaataatgatgcatatggatatgacttgataaataaatgacaaggaaacgatcgaaaaatcatttaagatccataatagaacaacaatcaacatatttataggtcctagccagcatcgtggctcaatcgacaccgctctcagccagtgtgaccaagtcatttgcgtgactaagactatagctgatatgatctttatgtatgtccggtgggtcaatacgttctgctaggggccgctgttgacatgtggaccgagaaggagttttcggtttacagccgagtgtacatgaacctacagggtcgcacgcttaatgggccaaaataaggggattggatagagatctaatatgagcttaattcggatagggatccgaataggagtcctacgggccttggaggcccgagtgatggattctatatattcgtgaggggtgtgaccggcggaggtattgcatcacgtgagaaaccctagctgccattttcctccctgagcaaaaccctagttgcgcgcgggtgctagcacatctgcgcgtggcattccgtccctatacgtgtggataccggtagaggcaccgctggtttgcggtgctgatcggcgtgggagtacggcgaggaggacgcacgaggaggagaaggtcgagccggtgcgattgactacttcctctacatcgacgcgcgctacatcgcgagggttccttcgactccttagcgctttcttccactgcgcagcgcgtcgagtggtaacgatctatgatctaatgcttgcatggttcctggtttacgcggtagaaaaattttgatttatgctatcgtagcctacgcatatcccaacagtggtatgagagccgccttgtattgtttatgatctagatcattgcatatagttgatatgcgggtgtagtagatgagatctattatattgtatatgagttcttagatgtcacgtcctgataaattcatcccgaaataaaaatcattctctaaaaggaataatagaattaattaaaattcgaaaagaaattggcaaacactaaaatacgtacaagaaaaattcaaatgtggcccggagaatttttgttaaattctccttggtctaaaaggagccctcaatttttggtggaattttcagagcacaaataataattattaagaaataaacaaagttaaaatggtttcataaaaagaaaaaccctaaaaagtctttcccccccccttttccctcttgggccggctcggcccatccctttctctctctctcctcttccccgcggcccatccggcctcctccccgcgcgcgcgccgctgacgggtgggcccgcccgccaccctcgctgacgggtggggcccacctgtcatccctgtcctcccgccgctcccgccgcctcgcccgtgccctagcgccgtcgccgccgcgaatcccgccgcctcccgtcgtacacgcgcgcaataaagtggggggaaatattccccgtgattccctctctctttccccccatttctccctctctctaccgcgttcaaacgggcggatttgcccccgcaaatctcgccggcgccattgatggcggc

SEQ ID NO: 21380 - DNA, 6832 bp, Oryza sativa
ttcctcctcgccggatttgagctcgcgacgtcgctctctctctccgccgtcgccgccgagctccggtccgccgccgtcgtcaccccggaccgcctcccacctcggcgccgcctccttcggcttcgccgcatcctcgccgacctcgtccacctctccgtttcggtcgccgaccgccggaacgccgccgtccccgtcgacccgagccgcgccgccgcctctctccgctccggtcgccgttcccgtcgtcgccgtcgatccggggtgagccgtgggccgccgtttcgcttcccccttccctcccctctctcgggcgccgctccgccgcgccggtggccgcgctggcttggccgccctcgggcgcgccgagtggctgccgcgtggggcccggccgtcagccgcccgcgccctcgggtgcggctgacgcgtgggacccccggcgccggccggtgtgagccgggtgcacccggtccaccgtggaccgtggggctgccgcgtgggccccactcccgtggactcggtccgcgcgcccctcccctcggctgacgcaataaatccgattttaaattaaaatttaaatgaagaaattcgcaaatatccatttaaagagcatataaacttcaaatggccataacttggccatttgaactcggaattggaccgttcaagtctctaatttttccttaagaagtcaagaacccatttttgtgctttatttctgcttgttatatggagtttattagagtaaaagccttttcttttccattggtcgtgtagacgctgcagcttcggaagatccgctcttcgtggaagttgaagccggcgtttgggaaagcgagcaaggcaagtcacatcatccttgaacatattgaatcccagtttataaaattattttgatttaaattattgcattgtcgctttatttaaattcccgcgttatcactgttttatttagccatgcctatttacctttgttatgaccttattattattgttattgttattattaccttgttcaccctagattaaacaaaaccccaactagtggatactctactcatggtaccactagtatgattttaggtagatgcttcgctgtttaattaggtatcattaggtggttttacaactctagactctgggatattctcatcacctggacactttggaattgttggattattgcggaattggattcacaccgccccctctattcaaaatccccaaaatggttttaggctgggctcggggtgcatggttttgatagtagcacctcggccatataaggaccggtcttcgggcctctgttgcaaagcactaccgtacttccacatgtctagtgggtaaggcttagtttgtggctcagtctggttataaacaaaagtacacggattagagatggacgaagtcgggggtcgatggacatctctaggacaaatgaaggctacacgagctgcggcccggtagtcgagatgtcatggcacagggctggtgtcctgctgctaggggctcaatcctgcctacctgtcccggaggttccggccgtaggtggggttgggtcggtactcttgtctatggctaggatgggttgaaaactatgtcacgtcttccgtctgtataccgtggtggtatgtggcacgtggttgcacgtgagggagatgtgtcttgtgggtaaagatgtacacctctgatcagagtataatctattcgaatagccgcgccctcggttatgggcaagccgagcaatgtacccaagttagtgttttaattcttaaaacctgcttaacaactaaaatgtggaatggttggcctgggttggcttgggacgagctaggacccagggtcgggttgccagttcggtctgaatcatcgtaggccttgggttaaggcaggttcgtgagggttcacggccttgattaataatactgtgtaactctaggatcgtctctataaaatggctttgggcaactaagtgacttttaaatgctgttttctgtaaaacttaacccctatattattatccccttgtactcccttgcattaattatgcatctccggtgtggcttgctgagtactgtggttgtactcattcttgctcaatctttctccccctttcagtaagagaagctttggagaagatgtcttaggtggagtcttggcttataccccagttgagcgcctgtgaagttggagccgtaggcccgcaagtccgctgctgtttatttttgattgtcaggccttaagtgcctttgtaataatgtaaatattatcgatataataaagatgtgtcttttatatcatgtttgtgtggtgtaccccggcttttcctgggacggggattaatacactagcgttcgggaaaaggaaattttctcggtcgcgacattagatgatcggaacatgagatgaaccgatagccgcttgggttgatgagatcaatcggtatgtgtgttggtgacttcactggaatgtctagtactcaccaaggccgagcgcaattgtgttcatcggatagtccgatgtccacaagaaccgcacgccaatgagaaaaacgagccaatgagattgacttggtttcggcataattcgattactccgttaaggttttgacatggcgaatcgtagatgagatctatgtacacggctagcgggaccgccgtgtgcgttgccccttagatttcgcttagggttttatatctatcttattttattgctgttgtatatttgatatgacatggtaggatagattccctcagaaaaattaagtgtaatttatgctcttccaataattgcacctattacggttgtgatcataagtgataggtttgccatagcaaagtgtcactttttatcatgataaaataggatagatgtcggacatctatctgcggagattattggtttacttgacaaggagatgtcaccccaacagcacgagagtcacatatgatgtgattagcaaggtgttgcttacctattttgatagttatctagctgtgatgccaaagctcactagacactaataaaaatgaggatcttgactcactatgttattagagggaattttgtttcacaatacatagtgggagtatctttcgttaaactgtttaatgaaaggttaaatgtagacatggtgctgattttgcctacatatatttctattgtagatcatggcagctcctgcaccatccagttttaacttgcggtctattcttgaaaaagagaagttgactggaacaaacatcatggattggtatcgcaacctgagaattgttctcaggcaagagcacaaagagtttgtgcttacacagccttttccagctgacttgcccaacaatgctcctgctgctcaacgtagggagcatgaaaagcgatgtaatgattatcttgatattagctgtctcatgcttgctactatgtcccctgagcttcaaaggcaatatgaggcattggatgctcatacgataatcacgggactgcgtaacatgtttgaggaccaagcaagagctaagaggtttaatacctcaaagtccttgtttgcgtgcaggcttgcagaaggtaatccagtgagcccacatgtgatcaaaatgattggttacaacgagactctggaaaagcttggttttccccttagccaagagttggctactgatttgattctccagtcgctccctcccagctttgagccgttcatattaaatttcaacatgaacaacatgaacaggaccttgacaaaattgcctgggatgctaaagactgccgaggaaagcattaagaaaaactccaaccatgtgatggttatgcataagcgcaagcccaacaacaagaagagtggttagaagagaaagctaaactctgatgagatcacgagtactagcaactctaagaccaaggttcaaaggacagggcctgctaaggatgcagagtgcttcttttgcaaggaggcaggtcattggaagagaaactgtaagaaatacctagagcagctcaagcagaagcagcaggatggaaagagttccacctcaggtattaatgttatagaaattaatcttgctacttcctctactgattcttgggtatttgacaccgggtcagttgctcacatatgcaaatcgttgcaagggctgaaaagaagtaggagcttagcaagaggcgaagtggacattcgcgtgggcaatggagcaagagttgctgctgttgcggtcggcactatgccattatctttaccgtcaagattagtttggagttaaataattattattgcattccagctttgtgtaagaacgttatctctgcttcttgtttgcaagcagagggttatggttttagatctgtggacaatgattgttcagtctattataatgacattttctatttccatgcacccatgatgagtggcttatacattgtgaatcttaatggatattcagtctataacattaatgcaaaaaggcaacgtcctaatgatttgaatcccacttttatttggcattgtcgcttgggtcatataaatgagaaacgcatggagaagattcatagagatggacttctacactcttttgattttgaatcatttgagacatgcgaatcttgtttacttggcaagatgacaaaggcacctttcacgggtcaaagtgaaagggcaagtgaactattggcactagtacatactgatgtatgtggaccaatgagctcaactgccagaggtggttttgggtacttttttacctttaccgatgactttagtagatatggttatgtctacttaatgaggcataagtctgagtcctttgaaaagttcaaggaatttcataatgaggtacaaaatcatttgggaaagacaatcaagtatctacgatctgatcgtggtggagagtacttgagccttgaatttggcaatcatctaaaggagtgtggaattgttccacaactcactccgccaggaacgcctcaatggaatggggtgtccgaatggaggaatcgtacattgttggacatggtgcgatcaatgatgagccaaactaatcttctgctaagcttttggggttacgctctagagacaactgcgttcacactaaacagtgttccatctaaatcggtggataagacaccatacgagatatggacagggaagcgtcccagtttgtctttcctaaagatttggggatgtgaggtctatgtaaaacgtttgcaatcggacaaactcacacccaaatcagataaatgcttctttgtggggtatcctaaagaaacgaaaggatattatttttataatcaggaagagggcaaagtgtttgtcgcccgacacggtgttttcttggaaaaagagtttatttcaagaaaggatattgggagcatggtgcgacttgaagaaattaaggaaacaccggaaaatgcttccacgtccacacaaccacaacaagctaagcaagatgttgttcaccaggttgaacaagttgttgttgaaccagttgtggaagcaccggtttcgcgaagatccgaagaaaaagacagatgtagatggcaatgttcacatctacaaggcacgattggtggcgaaaggtttcagacaaattcaaggtgttgactatgatgaaactttctcaccagtcgccatgctaaaatttatttggattgttttagcgattgctgcctatttcgattatgagatatggcaaatgtatgtcaaaactgctttccttaatggaaatctggatgaggatgtatacatgacacaacctaagggatttgacgatccacaatcagctaaaaagatatgcaagttgcatcaatccatttatgggttgaagcaagcatctcggagttggaatattcgttttgacgaagttgtcaaggcgttgggctttgtcagaaacgaagaagaaccttgtgtatacaagaagattagtgggagcgcactagtgtttctaatcttatatgtagatgacatattgttgattgggaatgatatttctatgcttgaatccgttaagacatcgttgaaaaatagtttttcaatgaaggacttaggggaagcagcatatattctgggcataaggatctatagagatagatcaaagaggctaattggattaagccagagtacatacattgacaaggtgttgaagaggttcaacatgcaagattctaagaaaggtttcttaccgatgtcacatggcattaatcttggcaagaatcagtgtcctcaaacgactgatgagcgaaataagatgagtgtgattccatatgcttcggcaattggatccatcatgtatgctatgctatgtacacgtccagatgtttcatatgcacttagtgcaacaagccgataccaatcagatccaggtgagagtcactggatagctgtaaagaatatcctgaagtacttgagaagaactaaggatatgttccttgcctatggaggacaggaagagctcgttgtaaatggttacactgacgcaagcttccaaatcgacaaagatgattttagatcgcagtctggatttgtgttctgcctgaatggaggcgctgtgagttggaagagttccaagcaagatatagtcgttgattctaccacagaagccgaatacattgccgcttctgaggctgtttggataaagaaatttgtttctcaactgggtgtgatgacgagtgcttctagctctatggacctctattgcgataatagtggtgccattgcgcaagccaaggagcctaggtcgcatcaaaagtccaaacacattttacggcagtatcacctcattcgcgagaagtgggtagaggagatgtgaagatatgcaaaatacatacggatttgaatgttgcagatccgttg

SEQ ID NO: 21381 - DNA, 6407 bp, Oryza sativa
tgaggcacacactagggcaatgggtataagatacattcatgattgactctagtgcaagtgggagactgttagtgatatgccctagaggcaatcatagagatgattgtatcacatactatgtttacatatttatccgacattgttccttgaaatagataactcattattggttaatgaatatgtgattccttcatgagactttatgttatttgttactatttttaaaggatccctgatcaaatatcatatgtggaacaaatatatttaaatgatcagcacatgtattaattgatgatcatgtctcatggatcatggtatagagataccaaattaataatgtagacacatggttgtgaacatgttgttggatagtgtggaccctcgtttttataacaggaatcaatcgtgtaaacagtactatttccctggatcaagtagtctggtacacacgagttcatagcctggtgctcctcttccagctgaagctgctgcactgtgaggtcagtcacctcagtctctaactctcccacacgcctctgctggtcgtcgatctccaacagagcctcctcgtaaaagtcgtctactgcctcagcccatcgtgacagtcgggtcactatcgggttgtagcagcaaggtgtgtcctgaactgtgcagacggagttgctctcctctcgaaacaggtggtgagcaaactcagtactcgccaactcagctcggtggatagagctaagtcggaggaatgcctcccgggctgcatcctgcatcgcagtctccggtaagtcgcgacggtggcgggtcgggaagcggtagtctgactctgaaggaactcgtgtgtgaacctcgacccgagcctcccaaacagatccacactgtctcactcggtagatcggaaatctggggtatcgcagacgcctcatcagccggttagctcaatgacgtatccctctgagcggggtacgcccatctcccaggtagcggatgaatcctgatctgccatctaattttaaaaaacccaaggtcagctaagagtaaaactcgttttgtgaagaaaatagttaagagtaagatgaaaatcgtacaaagttttgtaaacatagcgtttttatttttgaaagtattactaaatgggaatttctcccttggccaacttagaaaaggggtggggcgccttttggtcttttcctacagtcgtatggctctgataccagctctgtggacccctgtttttataacaggaatcaatcgtgtaaacagtaccatttccctggatcaagtagtctgttacacacgagttcatagctgaaataccaaatgcacacacacgaaagtctagtgcgaattattacatcaaaagcccgcaggcatagtcttaaatcatcggaccgagcggtctagaatacattccaaaaacagaagtagataaggcagcggagttaaggcagcggcacgccattgccacaggcaacgaccgtaactaagacctagcgagtgccatcgtcttcatcaccctcctggtagtaagtgtagggatcctccaaagcttcatctccgacctctgattaagtttgtatattgcaagggtgagtagcaaccgtactcaacaagccaccacagcaacaatgcacatgataggggtattcaaaggatggctatggttcttttgcgcaaagcaagttttataattcttttcacaaacctaagacctatcacaaactgatcaaattttagtaccagtgttcatattaaacaatgacggttctgtccaccatccattgtgagtcatcatggttttctgaggacgtccacattcccgcctctcaggaagtggtttcatcagtatagaaatcatcatgcaatatcccatcccacacaagttaagaatttagagtctagccaagtgtaatacatgtcccggtgctcaataaccgtgagcacggctattcgaatagatttggtttactcacactgcagtggatgtacactttacttgcactccgcgactgcccaacacatgagcctcgtcccaacacatgagacgcgtcacggcaaagcttttcgataacctcgccttggcagtacccgctccatgaactttacatcctcatgcactctaggcgtacacggtttctagcagtgagaggagttctggcgcacccgggaagggaagactcatgcatgcattaagttataattatgtttagattctcacatggcagtcctaccgatggcgacaccactgtagacacccgcctcgcggttctaccaatggttgccccaccgtagagcccctgcctcacacatcaagaaaccactatgcatggatattacctccgctcagctatctactccgctaggtctatacccatacgagaagtgcggttgtacgggggtcgtttcatgcttaacttcatggctcagtccttaacttgccaaggacggcactagccttttccggacaacacccaaatcttccgtccgcctcagtcgaaaacagttgtttaattttatttctcctttcacaaatcatgtcatcaacatcatggcaatatggcgctcctgtccccacatgccgcatctcaattaccttcccaaaggtaattgcccaagcatatagcatttgataaatatgagtatgcatgattctagaatagcatttctaagcaattgtcataattaactagggactcatacgtaaacatggttacgaagccataaggggtaaacaagaatcaaggcatggcataatcacaagtaggatgttcatcattgcatgtagtttatttgtaaacaaaataatttcgcaattgggatcaacatgttcaaggaatagtgatgacttgccttgctcaaagtcttgcgggtcttggccttcacttggatccgcaactcccttgggctctatagttacgtgcaaaaattgatttgaattcggttagaattcaaataaaaatccaaataaatccaaatggaagtcgaatgcgaaagtcgattcttttatattaactttactattcgcgaactagggcaaacctaatttcaatttatacatcctaaactatttttgcggggataaatattttgttatcataagtttttaatttaatgtacccgagtattatatccatataataggttagaaatttctatcgcgagctaaatatcagacggaatccaaaaattatcttataatattatacgatttaatttagtctatgactaaacgattaaatataatatacgtctaaaattcctattaattaaatccgagtacctaccgtgaattgatcacctatagagattaccaaaataatctataattatattaaatttttgcaattctacgactataattgatctataattaaattccaattattttaaattttctaacttccctaatctctctctaatttctatttatttattcttttcttttctttttctctcctcttttctttcttttcttttcccttctttcttttctttctttctctcctttttctttctttcttcttttctctctttctctccctcccggcttcttctccctcctctctctctctcagctctctggcgacgacgaccgagcaaggagaggaggcggcggcttaccgacgacggcgacggcggtgatgacggcgcaacggcggcgcacggcgcggcgccacgaaggcggcggtgcgagggcggcgcgacgacggcgcacggcgcggtggcacaaaggcggcggtgcagcggcgcgatggcggcagcgcggcggcacgaaggtagtggctcggtggagagggaagagcggagaaagagggagatggagtggggcaaatggagagggggtgtggagtatttataggggagagggggaagaaagagagggggaggggtggccggcctgacgcgacggcggcgcggggcggcgacacgacggcggggacgcgacgggcggcaacgtgatggcggcgcggggcttggggcggcgcagggctcggcgcgcggtgatgggacggcgcggcgcggcgtggggctcggcgcgcggcgatggaatggcgacgacgacagcggcgcaggctcgaggcggcgatggaacacgcgtggcgacgggacgggcggtgatggggtgcgtgggcgcgcgggtcggtgggatgacggcgcgccggctcggggcgtgaggcgcgcgcagcaggggagatgggacgggcgcacggctgggaaggggcgcggggcgcgaggcgacgacgcgacggcgacatgagataccttgtacatacgccacactttggttctagtcctcttttcagcttcatccaatatccggactgggtgttctggatacatgagatcattgctaatacgaatttcttccaatgtagcttgttcttccggcactcgcaagcacttctttaactgagacacgtggaagactgggtgcacatcggcgatgtttttcggtagctgtaactgatatgcaacttctcctcgtctagcgatgatttggaatggtcccacatatcttggtgctagttttcctttgaccttaaaccttttcgttcccctcatcggagaaacctttagataaatgtaatctccttccttaaattccaggtttcttcttcgggtgtcggcgtaactcttctatcgtgattgtgccacttttagatggtctcgaatcaggcgaaccttttcttcggcttctttgataatgtcaggtccaaatactgcctgttcatctgtctcggaccacatcagtggggttcaacatcgtcgaccaaacaatgcctcattgggtgacatctttaggcttgcttgaaagctgttgttgtaggagaattcggcgtagggcaaacatctctcccagtctttgctaaaatccaatgcacaagctctcagcatgtcctccaagacctggtttgttctctccgtctggccatctgtctgtggatgataagctgtgctaaaagcaagataacttcctaggacttcatgtactttttcccagaaatgcgaggtaaactatgtgcctcgatcggatataatcctcttaggcacaccatgaagacacactatcctggtcatgtacaactcggtgagtttagcactgctatagtttgtcttgacggggatgaatcttgccgtcttggtgagtcgatccacaatcacccagatggaatcgtaccctgttgcggtcttgggcaaccccgactatgaaatccatacctatctcatcccatttccattcggtaatcctaaggggttgcaacagacctgccggtctctggtgctcagccttcacctctggcatacgtcacagagcgctacgtattcggccacatctctcttcatattgggccaccagtatccttccttcagatcctggtacatcttggtacttccggggtgcaatgaatatgccgattcgtgagcttcctttaagattaatcctctcagtccaccctgttcgggtacatagatcctctttttataccatagaacatctttttcgtcggttgaaaattcctttgcaaatcctgcggctaggcgttccttcacctctcggatttcctcgttgtccttctgggctttttctatttgggttctcagaagaggttgaatgtccaaggtgtttatctgtccacgaggtactatatgtaggtttagttgggccatttcctccttaagctcaggagccatcccttccgtcctcagatgattgcaatggctcttccgactcaaagcgtcggccacaacgttggccttgccggggtgatagtgaacctctagatcatagtccttgattaattccaaccatcgcctttgcctcaagttgagatctgactgggtgaaaatatacttcagactcttgtggtcagtgtagatatcacaatgatttcaaatcagataatgtctccaaatctttagcgcatgaaccacagctgcgagttctaggtcatgagtagggtagttttcctcatgtggtcacaattgtcacgacgcataggccacaacttttccgtcctgcatcagtactcctcctagtccttgcctcgatgcatcacaatatataagaaagtctttcctgttgtcgggaagaaacagaataggtgccgaggtcagcttttctttgagctgctcaaagctttcttgacactgttctgaccatacaaacttcttttctttcttgagtagttgtgttataggtcgggctatcttagagaacccctcaatgaacctccggtagtatccggccaaacctagaaaactccgaatcttagtcacagatttgggtgccttccattccgtaatggcctcaactttagcaggatccactgctactccaccggctgagattacatggcctagaaaagcgacttctctaaccagaactcacatttactaaactttgcatataattt

SEQ ID NO: 21382 - DNA, 1135 bp, Oryza sativa
tccgtggtagtgggtacttgtttttgaaagttacttcgttcagtgagcggtagtccacacacattctcatgctaccatctttcttcttaacgaataacactggggctccccaaggtgacgaactgggacgtacaaatcccttttcttgcaactctctgatttgctttttaagttcttccaactcattgactggcatccgatatggtctcttggatatgggagcagttccgggtatcaggtcaataatgaactctatgtcacgatctggtggcattccaggtaaatcttctgggaacacatcaggaaatcgcttcactacgggcattccctttaggggtagcttggtaaatatgcctctggcacgttcggttagtctaggatcttgatccacggtcgctgtcatatccgatccccaaggtgtggtcagggtaacttccctacgtctacagtcgattactgtcacaccccgaagttttccccccaagccaaaattttaatttataaatgaccctataaagatgccggtgcaaagcaagagtaaacccttttaaatcaatgcaaataataatcggaattggcatgtggaatttttcttgagttctacatgtcgaaattcactaacaggatttttagtggaattttcagagctctagaaataattttaaccaattaaaattgagcaagcaatattttaattccagggaaaatcctttttcctttttctttttctttttcctctctttttcctcctttttttcgaatgggccgccggcccattctctcctttcttccccctcctccctgtagggccggccgcaggccgaggcccatccaggccgtcccgcctccctcctctctcggggtcgccgacaggtggggcccacctgtcgggcccgtctccatcctccagccgacgccgcgcccgcaaccgccgccgcgtccacgcctccgcctcctccgggccacgtcgaccacgcccacgcgtgcgccgcgtttcccgcgcccactcccctctctctcccgctcgcgcccgcgcccgagatggccgggattcgattttagaatcccgcctctctctcctcccccacttcccccacgttggccggcgaaatcccgcctctcccggccacgtccg

SEQ ID NO: 21383 - DNA, 673 bp, Oryza sativa
caccggtgcatgcactcggcgagctgcgtttgcatcaagggacacctcagcgaggacgcgctgttcctggtctttcgtcacatgaactggaaccccaggctgatcgccgtgctctcgtgcgtgtgcaagtggttcgacgaggtcgcgaagcaggtgctctggaaggagttctgccacgccagggcgccgaagatgatgctggatttgcattcgggtggcagtcacattgtcgacgggaactggaaggcgctcgggaagcttctcatctactgcaatggctgcacaaaagggggcctctttaacaacattcatgtccctgggcactttgtgttcaggacacgcttttcgaggaccgcgggcaagagtttcctgccccagcagtgtaggaatgatgtcttatatgtctcagatccatgcgagcatcttgatcaaggggatgaaggtgacttgggtttcttccgtggtatcttcatgtcgttcgccacctcaaaggttaagaagatgttgattgagaagcgggcaaggttccatccaagcgagtcatgtccctactgtaaggctaagctgtggagcatgttggaagcaaatatgtcgccggggagtttttctgccaggcttggtgcttacgaggattctgtggagtattttggatgcctggaccgacatgtcattg

SEQ ID NO: 21384 - DNA, 24379 bp, Oryza sativa
caactgaggtttgatgattattgcaagaatgagcatatgacatactcaacaagccacacagcaaatatgcaagtgcacaaggattccaaaggatggcataatacaagctcatttgcaaaagcagcatttagcaaaacatttaagagaaataaaacagtgaagtaattaatcagaaattttaatcaacactgaacagcacacccatgctgcacaggcccaaccatcctgaacaaccatacccggctgtacagatctaatctccaaaccaggagctaaacaaattattaccaggtataacatccataattattgtgagaggtgtgagactaatcacgaaaaacattgctcaactcgcccataaccgcgggcacggctattcgaatagttttactctagccagaggtgtaccactgtacccacaagacacgatttcgcacatgttgccatgccccgaaataccaccacggcattgcaaagggggaaattgtgacaataccctttgcacaacacaactcaaaacagtgcaccgttcctggatcataatcaccccctctacaatcagaggcatggactccccagcgacccccatggacttctcgccacttcacagtctggcacactataatgaatcatgctatacaaaagataaagccattgcccatgctggcttgtggttggtacggttaatgtttcacaacagtagctcgcgaaccggtccttaattgtcatgagcacgactctcaaaaccatgtgctcacaacccaccattaatcatattttaattaccaattaattatcataacacgattaaccatcgtgagctaccattaaaaataaccataaataataatgtagtatatatgattcatcccattagtgagctaatgtttctaagcatggctaagcaattatatctaacatctagttgaaccaatatatataaagctcaactagtcaagttataataacccaaggtatcaaggaatagggtaatcaatgcaaactggccataataaaggaataggttcacaccacccggtgacattcaaaaataaatgcacagttgaaataaatagagaatttaaatatagaatcaacatgctcaaaggattgtgtttaggatctgtgtgacttgccttgcaataatcggtcttcaattaatcttcttgatgacttccgacgcactcacgaacctttgcaacgacggaaacgacaagctaacacgtaaaacgaagaaaaagactaataaaaaccaaataaacagtacataacaagtaaacaaacacgtagatcataattttagatgaattatgagacttgaacggcctcattctgaattcaaatgaatttattatgaattttacaagattaaatctaattaaagcccatttaaaaagaattaaataaatttaatttaatttatggacaattttaatatgtagatctttattttagaaaaatttagcaacttgaaccacctgaaacggatctacggttatttacttatgatttccgaagatttaatctattagaaaaagggcaaaagaaaagatgatgatgtcacgatgacgtcatcgacggcagccacggcatgggtggcgacctcaccggagctagagaggtcggccgggctatctaagggcatctacacgtagacgacgacgacgcgatctcaacgatactcaccaacgcaacgaacgacgacggatgacggccggcggcgagcttgtgcggcggtggcgactcggtcgtcggcggcggcgactctccggtgaccggcgacggcggggagggggcggccgagcttcccctcttccacgcgcacccgacggcggcgagaggagacagcggcgacggccaaaacgacggcgcgaggcggctgttcgtcggccggcgacggcggcggctaagacgacgtggcggcagctctacggttgacgagagagctcgggagatggggcaaaagaaagaggagaactaggggatgctttatatagtcttggactagagagatcggactccaaacgagaggaatcgatgccggaaaatcttcgggttagtttggagagataaactcaaaacgaattttatttggataaaatacaaggaattaggttccgattcttgggggaaacgaaagaggaagataaaggaaatatttcccctcaactaattttgcaaacggagctcgggatgcggcggatttggtggagaaagcggcggctgcacagggcacaggacggcagctcgggctctgtccagagctggaagatgaacagtagtagagggaggaacagtagacttttctggctgggctgagaggagaggaggcggctcaggttgggccggcggaagagagaggaaggaaaggaaagaatgggccgaaaatggcccaagctgaggaggaggattttattacttttccaattaaaataatcacttaaatgatctttgaattgttaaaaatacttccaatgctcaaataattccaagaaaaatcctgaaaatacttggacactcaaagtacttaccaaaattataattagaccatttaatgattaatttaatatgtgggtaattactgaaatgctctttgtagattaaaattaataattgagctccgaaaaatccgagaaaattccagagagtataattaaccatggagaatttaataaaaaattaaatccatccatgctttatatttaggaaattttatttcccacatttaacttcacttgtaaattaatgaacatttaatataaattctaataataatttattaaataatctataaatcctgaaaaaatcaggatgtgacaccgtccacccctcctccgtcgaggttcgtcgccggagccctcgttccctcgcactcgggtgagcaccacctccaccgccgccttcggccatggtttccggtcgccgtggtccatctctctctctaatccctctcttctccttccttagggcaccccgaagctcgtccgcccaccgacgtcgtcctcccgtggcttgccgtcgccgttcgccatcatcttcttccgcgccggccaccctcggtgaggcatccctcccctcttttccccttcctctcctcctagtgccgcgccgccgcttcgagtcgcatgccgtcgccttcggccgccggcgccgcctcccgtgccgccggtcgccgccgtcgttggccgcatgccgtcgccgctagacctggccggcaggtcggctttgatgccgagccgagccggcggtcgcctttaacgccgcccgtcccctccccttcctagccgccgcttagcgtagccgccttcgcgtcgccttttgcgccgtcgccctcgccgccggttgccgtcgccggcaacgcgttcgcgcgcgcgccgtcgccgtcgccgcggccggtcggccggccttgagccaagccgagctgggtgccgccgccccttttctttctccccgccgctgaccagtgggcccgcgtgccggcgcccttcctccctctcccgagccgctgaccagtgggcccgcgtgccggcgcccttcctccctctcccgagccgctgaccggtgggccccgcatgtcggcgccgcttcccttgtgctgacgtcagccctggaatatattgcgcaataaatgatttagggtttttcttttatagtaataaacacagtgaatcttctaaaattcataactaattcatccgagctccgtttaagcccattcaagtctcagtaaatcaagaaaaatgtgtagaatccattaaaaatggttttgttccctgtttcagtagtcttatagcctgtttgcaatgtttgctttgtatgtcgctagattccgattcctccgacgctccggtgtactttgagatagtcgccgaggttcctccagcagcagagcaaggcaagtcatgcttgtcacttgaacatgttgatcctatattgcaaatgctctattgttttctttcaaatattgcattgttttataatattactatgggatggttacctattgttacagccatgctttttggataccatgctcctttgttagcttggggttatgacatgattagagtttggactaggaattgcttagctatgcttagttcaactagttcacaatggggaaaatcatattaatgtttagactgttggttctaatggtaatgttggattataccaccgctctggtgttggttaattaaaatgaatcatatggtgggctgtgggtgcatggttttgctggtcgcacccatggcagttaaggaccggttcgcgggatgccctggaagaacttaacgtacttaccacaagccagcgtgggcaacggctgggcttgtagtgtagctttcctctagccgacgcatccaggcaagggtgggcgtgatggagtttggatgggccctgcgacggcctatgcggcttccagattcacctaggcacgagaggggactgcccgctgccttgcgaggagtgggggtgaaacctgaggtgtggtgtgcttggttagagggggttatgcgaatggtcctgtcacggcctctttccggtatgtcgtggtgacatgttggcgcacggaaacgtgtcgtggggctgtgtcttgtgggtacagttgtacacctctgatcagagtaaaactattcgaatagccgtgcccgcggttatgggcggtcaaccagattcaccgtgattagtctcaccctagtgtaatcttttgaatttggatagtttaggtggatggttgggcctgtcgcaacgtgggttagcgttggacaacggatgattaatatgaattaattattacaactgtttaaatctttcaatttctgtttataaatgctcgctttatgcaaatgaaccacttcagctcttctttgttaattccctgcatcatacccctattccggtatgacttgctgagtatagtgggtagtactcagtcttgctctacttttcccaaccccagagttcgagttcgggtcagatgaaggtttctctgaggagtaggcttcgtccgtgccgtcgaggatgcctgtggagtggtgttcccgctgcagtttagtcaaggcttagctcctgttgtctttcttttcttccgctgcatttatgtaagactttatgatgtttgtaagacgtggatctgaatgtcaacattgtcgtttgtgtaccccggctggtcctggacggggattttaatgcacattctgcttggaattctattcgggaatttctgggcgtgacaacatccagggtctggggtatcaaaaccataaggttggagggaaacaccacaaccctaagacgaataggtacatctatgcaagcatgactcacagttatctcgcccccaggtgagtgtactatcataggctttctaagtcccactagggttaagttgtgcttttgactagccttcagagatatgaatgaatgcgatgcaccagaatcgaagaggactttaaccggggtagaattgacagagaacatacccattagtacgccctgatcttcctgggcctcttcagctcgaacatggttcacttgtccgcgtccaaatccggtagcggtcctgttagtttgcggagtcttgaatagacctcgtccggtagtaggggtagtagttccacgaacaatcattgcattagcgccagtacggacaggagttttgtgtggatgagggcagttgttggcgtagtgcccatactccccgcagttcaagcagtccacattcttcttggctccaggggcagccagggttggtgtaggggtgcggttctgaatcgcaaccgacctgttgaatttgctaggtgcagcggggcggttggttgccacaataggggttttccacccagacgaagtggcttccttgagtcgctgaggcactccctgaggtaggcgattcatagaaagcctccttttgcggttgtgctctacagtcctttgatcgttctccagcctaacgaccttgttgattaggctctggaaactctcttgatcttgcccaatcataggtccacgcaactcatcattcagcccttctatgaacttgtcgatcttttcttcttcatctgcgaggtctccaattgcatagcgggccaactgagtgaatcggttcagatattcctgcaccgttgtgttcccttgtcgcagccttctaaactcgttcctcttcatacgcattaccgcagtaggcacgaagttctcgcgaaatgctgcagtgaactcttcccaagtgggttctccatcatcctcttcccgagcttccttgtaagtatcccaccaatcaccagcgggtccctccagttaatttactgcgaagatcactttgtcggcttcgcgtacccggacaagggtcagtttattctctatgatacgtagccaatcttctgcctccataggctcgtctaccgtagcgaacgtgggtggcttggtcctcataaactctccaaagctcgatccgccgcggttgccttggttattcgcaatggcttgtagaagttgggtttcagtggccataactctggccagggtggttaggtcaggtgtcgaagtttcttcattgctggttgacgcccgacgtcggcttgccatctgtgtaggccgattaagtaagtatcctaattttctaactagctcttatggttttatcccattaagggagttgtttcgatgtgaactttgttttgcaagcatggtggaataaactcatttataacacaacaacaataatatcataaataacatcatagagttccacaaatagtacataaatcatgatgcaatcgactgcacacatacgcagtccaaataaggttcatccaaaagatgcatcgaactaaccatcaagctactcgtcaatctaggtaagggggggtgtgtctcgcatactatccaaaaaccatctgaagcgagatcgaagctgcaataatcctccagtctagtcatccaaccatccgcaggatcctggggcaggtagagggtggtcgctggcacgggcaaacctgagtccccacggctcggaagtagtggcctctggatctggcttgggcttcttgctcgggggtcgggtgctcttgcgggcagtgctgagggtgcgagggcctccgaggaaggtgatgcggggaacaggggtctcatcctctgaaggattagtgatgtctggctcgatctctggctcggtgtcggtcccctctgtctcggagtcgacttggatcggagtctccaaactggaacccagctgcggagaaggtgtagggatcagtggagtgtgcacaatctccggggcaggtggctgtgtcactgtcgggtccaccaagtaaggtgctgactcagtagccagcataccaacctctcccaaaagagcgtgcaacgctggtgggtatggcagggtgaggaaaaagtagcggtcacgtcctactgttgtggaagtagaagctcctatggtgctgaccgtggctgctcgaagctgctcctccagctagctgacgtgctcctgactctctctcagctgctcctcaagtgtatccatcatcccgcggctgtcgttgtactggtcagataactgctggaactggtcgccgtggacctggagctgtgcctttagtgagtctatctcactgccccaagcctggtgctcctcttccagctgaagctgctgcactgtgaggtcagtcacctcggtctctaactctcccatatgcctctgctggtcgtcgatctctaacagagcctcctcgtaaaagtcgtctactgcctcagcccatcgtgacagtagggtcactatcgggttgtagcagcaaggtgtgtcctgaactgtgcagacggagttgctctcctctcgaaacaggtggtgagcaaactcagtactcaccaactcagctcggtggatagagctaagtcggaggaaggcctcccgggctgcatcctgcatcgcggtctccggtaagtcgtgacggtggcgggtcgggaagcggtagtctgactctgaaggaactcgtgtgtgaacctcgacccgagcctcccaaacagatccacactgtctcactcggtagatcggaaatctggggtatcgcagatgcctcatcagccggtgtagctcaatgacgtatccctctaagcgaggtacgcccatctcccaggtagcgggtgaatcctgatctgccatctaattttaaaaaacccaaggtcaactaagagtaaaactcgttttgtgaagaaaatagttaagagtaagatgaaaatcatacaaagttttgtaagcatagcgtttttatttttgaaagtattactaaatgggaatttctcccttcgccaacttagaaaaggggtggggcgccttttggtcttttcctacagtcgtatggctctgataccagctctgtggacccccgtttttataacaggaatcaatcgtgtaaacagtaccatttccctggatcaagtagtctggtacacacgagttcatagctgaaatatgtcacatcctgatttttgtttcaggatttataaattatttaataaattattattagaatttatattaaatgttcattaatttacaagtgaagttaaatgtgggaaataaaatttcctaaatataaagcatggatggatttaatttttattaaattatccatggttaattatactctctggaattttctcagatttttcggagctcaattcctaattttaatcatacaaagagcatttcagtaattacccacatattaaattaatcattaaatgctctaattataatttttttaagtactttgagtgtccaagtattttcaggatttttcttgaaattatttgagcattggaagtatttttaacaattcaaagatcatttaagtgattattttaattggaaaagtaataataatcctcttcctagtcttgggccctttccggccgatctccctcttttgtgtgcacggccgtgcagccctagtcggcccagccgagtttcccccttctctttctttctttgctttgttttcagccagcccaagacgaaaagtctaatttgcgtccctcgacactgtttatcttctacctctagcagccgaactgagaccgatttggctcggtttttctcctccaaatctgacctttccccttgtgtttttctaaaattagttgaggggaaatattcctcttatcctcctctatctttacccccaaaaaatcggagctaatcgttgagtatctcatccgaatcgaactcgttttcgagtttatctccaaaaccgagtttttgatttcccggatcgatttcttgcgggaggagtccgatctcttcaatccaaggctataaaaaggaccccctagtcctcctctttcgtttgccccctctcccgtgatcttccgtgcctcgtagcgccgccgccacgtgctccaccccgccgtcgtcgccggccgagctccatccgcgtcgcgccgtcgcctccgtcgtcgccgccggtcgctgtcaccgccgtaaggtgcgcgggagggtggagaagcccggccgcctgacccccgaagccgctgatcaccggagccccgtcgccgccgtcgaccgaagccgcgccgccgctagaccccgtcgccggccgtcgtcgttcgtcgtttggttcgagggtgagtaccgttgggttcgtctcgtcgtcctctacgtgtacatgtcctccaaagtcgcagccgaccatccaatctccggcgaggtcgccatcttggtccggccattgatgaggtcatcatgacgtcatcatcgtttttctttttcctgtttttctaatagattaaatcttcagaaattcataactaaatcatcttagctcggatttagttggttcaagtctctaaatttttctaaaattgagatctacatgctaaaaatatccacatatactgttcatgcttgtttatgtgctgttttggtgtttttgctcttttctgtttagattccgatgtttccggagagtccgttttcgcaggagaagaatttgaagagttccaaggccagcaaggcaagtcacacagatcccaaacaaccctttgagcatgttgaacctgtttaaagctattgatttatttcaactgatgcattgttttcgaatgtcattgggtggtgagcctttcccctttaattatggccgaagatgacttgggatttttctatgggttataatttgactagtatggaccttatatattggattggttcagctagatgttatttatagttgcttagccatgcttagaaacaatagctcactaatgtgataatcatgcttcactatcacttatggatatttaatggaagttcacgacggttgatcgtgattggttaattaattacttgtcaactaaaacctgataatggtgggttgtgagcacatggttttgatggtcgtgctcatgacaattaaggaccggttcacgagtttcggttgtgaaacatttaccgtgccaaccacaagccagcgtgggcaacggctttaccttttgtatagcatggttcattgcggggcacccgactgagaagtgtcggagataagcccacgggggtcgctggggagtccatgcctctggtttttgagggggtgattatgatccaggaatggtgcgctgcagtggattgtgttatgcaagctcctttccgaggtaccgtggtggtattgaggcacatggtgacatgatgtggggctgtgtcttgtgggtacagtggtacacctctgatcagagtaaaactattcgaatagccgtgcccgcggttatgggcgggttgagcaatgtttttcgtgattagtctcacacctctcacaataattatggatgttatacctggtaataatttgcttagctcctggtttggagttagatctgtacagctgggtatggttgttcaggatggttgggcctgtgcagcatgggtgtgttgttcagtgttgattaaaatttctgattaattactccactgttttacttctcttaaatgttttgctaaatgctgcttttgcaaatgagcctatattatgccatcctttggtatccttgtgcacttgcatatttgctgtgtggcttgttgagtatgtcatatgctcattcttgcaataatcaatcaacctcagttgaagaaaaaggatccagaaggagaagacgtttggcttataccccagttgagctgcctgtgggagtggagctgaagccatcgctagaccgttattccgctgctgttttcttttcttttgtaagtgtgtaacgttattattatgatggatttgtatattaaattgtcagtttgtgtacctcggctgattcctggacgaggattttatgcacaaataagttcggaaattactagtgaatttccgggcgtgacaaaataccaaatacacacacgaaagtctagtgcgaattattacatcaaaagcccgcaggcatagtcttaaatcatcggaccgagcggtctggaatacattccaaaaacagaagtagataaagcagcggagttaaggcagcggcacgccattgccacaggcaacaaccgtaactaagacctagcgagcgccatcgtcttcatcaccctcctggtagtaagcgtagggatcctccaaagcttcatctccgacctctgattaagtttgtatattgcaagggtgagtaccaaccgtactcaacaagccaccacagcaacaatgcacatgacaggggtattcaaaggatggctatggttcttttgcgcaaaacaagttttataattcttttcacaaacctaagacctagcacagactgatcaaattttagtaccattgttcatattaaacaatgacggttctgtccaccatccattgtgatcccaaggatagcttcctgccattgagtcatcatggttttctgaggacgtccacattcccgcctctcaggaagtggctccatcagtatagaaatcatcatgcaatatcccatcccacacaagttaagaatttagagtctagccaagtgtaatacatgtcccggtgctcaataaccgcgagcacggctattcgaatagatttggtttactcacactgcagtggatgtacactttacccgcactccgcgactgcccaacacatgagcctcgtcctaacacatgagatgcgtcacggcaaagcttttcgataacctcgcattggcagtacccgctccatgaactttacatcctcatgcactctaggcgtacacggtttctagcagtgagaggagttctggcgcacccgggaagggaagactcacacatgcattaagttataattatgtttagattctcacatggcagtcctaccgatggcgacaccactgtagacacccgcctcgcggttctaccaatggttgccccaccgtagagcccctgcctcacacatcaagaaaccactatgcatagatactacctccgctcagctatctactccgctaggtctatacccatacgagaagtgcggttgtacgggggtcgtttcatgcttaacttcatggctcggtccttaactgaccaaggacggcactagccttttccggacaccacccaaatctttatatccataccaattaagtttttaatttaatctacccgagtattatatccatataataggttagaaatttctatcgcgagctaaatatcggacggaatccaaaaattatcttataatattatacgatttaatttagtctatgactaaacgattaaatataatatacgtctaaaattcctattaattaaatccgagtacctaccgtgaattgatcacctatagagattaccaaaataatctataattatattaaatttttgcaattctacgactatatttgatctataattaaattctaattattttaaattttctaacttccctaatctccctctaatttctatttttttttcttttctttgtctctcctcttttctttcttttcttttcccttctttcttttctctctttctctcctttttctttctttcttcttttctctctttctctccctcccggcttcttctccctcctctctctgtcggctctctagcgacggcgaccgagcatggggaggaggcggcggcttaccgacgacggcggcggcggtgacgacggcgcatggcgcggcgccacgaaggcggcggtgcggcggcgcgacgacggcacatggcgcggtggcacgaaggcggcggcgcggcggcacgaaggcggtggctcggtggagagggaagaggggagaacgagggagatggagtgggggaaatggagagggggtgtggagtatttataggggagagggggaagaaagagagggggacgggtggccggcctgatgcgacagcggcgcgggggctcggggcggcgacacgatggcggtgacgtgacgggcggcgacgtgatggcggtgcggggctcggggtggcgcgcggggctcggggcagcgcggggctcggcgcgcggtgatgggacggcacagcgcggcacggggctcggcgcacggagatgggatggcgacggcgacagcggcgcaggctcgaggcggcgatggaacgcgcgcggcgacgggacgggcggtgacggggcgcgtgggcacgcggggcggcgggatggcagcgcggcggctcggggcgcgaggcgcgtgcggcaggggagatgggacgggcgcgcggcggggcaggggcgcggggcgcaaggcgacgacgcgacagcgacggcgatggcgcgcggcgcgtggtgacggcgacgcgacgcggtagcggcgcggggcgacggcgcgcggcggcaggcggcgatggctacgtcggcgcggctcggggtggctaggggcaggcgacggaggaggggcagggctacggaaccacatcgagcaccttccgcgcaatgaacagtgctagttttcattttatccttatttaacctattctctatataaatcttattcattaattccaaatttttacgcaaatgaagtttacataacatttgtgttatttcaaccaaaagattcactctagattaacattacccatattttatttttatctaattttcttgaatttaattaattcttatttcatcgtactaaaatttaattattgctaatatggtcgcgataatattttatttatttccaacctcacctaatctttattttaatttatattttaattatttatttagccaatttgatttttagggtttattcctagttagttattcattattcacgattaataaattccgagatcaaaatccaatgaaataggcgaataaaatcggcatgatgcaatttatttaaaaagtttttgaaggtccgtatttttagagttttgatttttgtcggtcgaattttcagggtgttacagatagacccaacatgagacactgcaagagccatatgtgttgtgtcatcagtgatctcatttagtgttggtgttgaatccttagacctgagattatcatggttcccaacatgtgtagtagcttacttagagactgctaaacgctactccgtaattggatagttataaaagtagtttttgggtatgctatgaaacatgtagtgggatatgaataatcaagatgggatttgcccctcctatggagagatatctttgggcctctcgatgttatagattataaaagtgcatggccatgccaaaggtgattgaggagtcaatcacaagttatataatctatcacaggttcgagtgaatgattgagctattagaggatggcacatatctagccttgagcttaattgatatcgtggcaaaagggttcatacaagtatacactagaggttcagccgatatgatctttatgtatgaccggtgggtcaatacattctgctaggggccgctgttgacatgtggaccgaaaaggagttttcgggttacagccgagtgtacatgaacctatagggtcgcacgcttaatgggccagaataaggggattggatatagatccaatatgagcttaattcggatagggatccgaataggagtcctacgggccttggaggcccgagtgatggatcctatatattcgtgaggggtgtgaccggcggaggtattgcatcacgtgagaaaccctagccgccattttcctccccgagcaaaaccctagtagcgtgcgggtgctagcacatctgcgcgtggcgttccatccctatacgtgtggataccggtagaggcgccgcgccgttggtttgcggtgctgatcggcgtgggagtacggcaaggaggacgaacgaggaggagaagatcgagccggtgcgatcgactacttcctctacatcgacgcgcgctacatcgcgagggttccttcgaccccttagcgctttcttccgctgcgcaacgtgtcgagtggtaacgatctatgatctaaagcttgcatggtttctggtttacgcgatagaaaaattttgatttatgctatcgtagcctacgtgtatcccaacaaagaccacatcattgatcaaataaacttgttcaagtgtcaatgcacctggtaagagctgccagcctactccatacatgcatattttgcttgcttgtagaactgaaaacagaaacgcataacacaagccagaggttgttgctatgaacatatcagattcccggaacaagggaaaatttcatgaggcataatggaagctgtcacctcatgagcgtccagccccaactgagactttcatgaacaaatcaagaaaactctttctaaagaattaagaaatcaagttttacacccattcccattgaaaacaagcatgagaatgaaaagaaaaaaaaagtgttttgttctgtgcaccagcaccgccacctcgcccacatccacattttttaaacgaaaaacccatatccacattcaccagcccgaaaaatagatcgattgaaactttagaaatgtgttaaagttttgtatatgtgagagataagatactacggaagatgatctattttaccaaggatggaggctagacaaccttaatttggttgtgacctgcgactgttattggtcagaaaacactatatatccattgaaccatacatgttacagagtttctaataacatggttaagctgtagtattgctccaataactgaacaatatttaattcattttgttgaaaacctagatgaagaaaagggaaaagaagatggttgttggatttattcagaagctgaaagtgggtatcacagagtcgccccgtagaaaaaaagaagaagaaagtttcacgtcttatgtcaggtaaatgaggcaatcaagtcatgaactccttatcaggtggcagctagaaacacatgaactatcacttgcacaagttttcacagttcacaggtgcaaaatacaaactgtcaaacccaaaagcaaggtgcaccagtgaatcacattgcactatccaatatagagagttctaagcataacttccattctctagccacttatttgctaaaagaaatttgttctctgagctgctaaatagtaagtacacaatcaatcaaaaggcaggcaatcaggacactatggttgcaaacctttataaataattttaccagttaattaacaacaactttaatttggctcctagaactaattgaagttatacatgttctaattttactacacttcagctttctaaataataatagcaaggaaattttacttacaaaatacacaccagtgatgaaatacaatataactgtgatccttctaagtgctatctactgtccacaaatcgtatagagaaatgcatattttctgcaatatatatgatatatgagatcaggtgaagaggcaagaataacaaaggagacctgcaccttactgtacatgagaatccttacaattgcactggtggagaaaccatctttggttggtcgcccgaaatccacaatagttccggttccacaaaaaaccgggactaaagatgatcttttgtcccggttggggctacaatgggcatatgtgatctttagtcccgattctaaagttgtcaggccccccgggatctttagtcccggttggtgttaccaatcgggactaaagatcctaactttagtcctggttggtgctaccaaccgggacaaaagatctccccctttatatatgtcttcttcctcctccagcccgagcaagcttcaaaatttctccaaaaaagaggggaggtcatgccaaaatttcttgcgaaatttttttagtgataatatacaaatcggaggtgtctaaaaggttagtaacttcattcttcaatgttttttgttgttataatacttttggagctatgtttcacacattttttttttgtctctaaaacgttgttgtaagttgatgagagagaaaatttttgtggggaagatgaatatatagaaattttgtttgtttacttaaaaagttttattctcatagtttaaaatataatgaaaattaatcttaaaaatagaaaataaaataaattgaaaattaaaagaagtacaacattaatattagtttagaacttcaaaaataatataatacaacattaatattagtttagaacttcaaaaataatataaaagaattgtttgttggattattttataattattaattgtatgagtaatgatatgtcattattgtatgactgtttaaagagtttttaattattttatcattattgtatgactgtcattattgtacgaaaatttatttatgtacgattttttttcatttcatgtaagatggatcggcaatggatgtacgctgaccggcggtccaaagagtttatcgatggcgtgcattattttttgagagtggccgaagctaacaagcataagggttttatgtgttgtccatgcaataagtaagaaccagaaggagtattctgcatctaggactattcatttccacttctttgagtcggggttcatgccaagctataattgttggacatcccacggtgagcaaggggttgaaatggaagaagatgaagtggaggatgagaacattccggactaggctcagtacgctggatttgaatgaaatcaaacgggcgaggtggacagggatgatgacgataacagcgttgcggatgatcttggtcagatgttgtaggacgccaaggaggactgtgaaagtgaaaaggatgcccataaattggagcatatgttagaggaccacagaacttcgttgtacccaggttgcgagcaggggcacaaaaagttggataccactctagagttcttgcaatggaaggcaaaaaatagtgttagtaacaaggtatttggcgatttattgaaactcgtcaagaacattctttcggagggaaacaaatttcccgagacaacgtacgaggctaagaagatagtctgccctctaggactggaagttcagaagattcacgcatgtctgaatgattgtatcctatatcgcggtgaggagtacgagaagctagaagcatgccctgtttgtaaagcactacgatacaagattagacgagatgatccaggtgaagttgacgggcagccaatgaagaagaaaattcttgctaaggtgatgtggtatttccctataataccacggctacggcgtttgttcagaaacaaggggaatgctagaatgatgcgttggcacgctgaataacgtcaacaggacgggatgctgagacaccccgccgatggttcgcaggggcgaaacatcgacagaacatttaaagactttggaaaggacgcacgaaacatacggtttggtttaagtacgaatggcatgaatccttttggagagatgagcaacggccagcggccatagcacttggcccgttacgatgtgtatctacaacctccccccttggctatgcatgaagaggaagtacataatgatgccgattattattcaaggcgccaagcaacatggtaacgacatcaatgtgtacctaagaccactgttcaaagatcttaaactgttgtggaagaaggaaggtgtctccgtgtgggacgaggacaaacatgaggagtttaacctacgagccctgctgttcgtaaccatcaacgattggcctacacttagcaacctatccggacagtctaacaaggggtacaaggcttgcactcactgtatggatgaaacagaaagtacgtatcttaagcactgtaggaaggttgtgtacataggtcatcgtcgattccttgctgcaaaccacccagtacggaagaaaggcaagcactttgaacataaggcggaccaccgtacgaagcctaaacattgcagcaggaaaacaatttgctatggtgaaagatcttaaagtagtgtttggaaaggggcctggcagccagcctatagagagcgaagatagtcacgcggcgatgtggaaaaagaactctatattttgggagttaccctattgggaattcttagacgtccgccatgcaatcgacgtgatgcacctcactaagaacctttgcgtaaacctgcttggcttcctagctgtatatggaaagtcgaaagatacactggaagcacgtaaagatctgaagcatatagaacaacgcggcgaccttcacccggaaccaaaggagaaaggaagccattacttgagtccagccagctacactcttagcaaggcagagaaggaaagtatgtttaaatgcttgtagagcatcaaggtactgtctggatactctatgaatataaagtgaataataagcacgaaggagaagaagttcacaaacataaagtctcatgactgtcacgtgttgatgacacaactgctaccagttataattcggggtatctttccagacaatgtccgggcaacaataacaaagctatgtgctttcatgtacgcaatttcgtgaaaggtcatcgatccggatagattagaagcccttcaaaatgacgtggtgcaatgtcttatcagctttgagctgatatttccaccttcatttttcaatataatgacgcatctgctttgtcaccttgtcaaagagattggtattctcgggcctgtgtacctacacaacatgtttcctttcaagaggtacatgagcgttctgaagaattatgttcgtaaccgtgctcgtctagaggcaagcatcgccaaggggtatggagcagaggaggtcattgaattctgcgtagaatttattgaagaccttcgcccaatcggggtgcctgaatcacgccataaagggagactacagggaaaggggactctcggaaggaaagcaataatgacggtagacaacaatttattccgtaaagcccatttcacggttctgcagcaatcttcattggtggctccttacatcgaggagcacttggctctagttcgcgccagaaacatcggtaagtccgatgcatggattacacggcatcacattgatactttccccgtggctgcgacaacatctcatggttaacgaaacgattaaccaacaactggccttcctggcgaggagaccatccggctcaattgcgacattccagggatatgagatcaatgggtacacattctacacgagagcccaagacatgaaatccacgaaccagaacagtgctattcatatcgatgccatgggacacgatggtacaactggcacgtattacggtgccatcgaggacatatgggaacttgactatggacctctcaaggtccctctgttctggtgccaatgggttaggttgaccggtggaggcgtaacgattgatgacagtgggatgtcaacggttgaccttaacaaggttggatactcggacgaaccttttattctcgccaataatgtaacgcaagtattttacgtgaaggacatgtctagcaaaggaaagaagggaaaagggcctgacgagccgaagcgccacgtggttctcccaggcaaaaggaaaattgtcggagtagaggacaagattgacgaggattatgatcagtttgatgggcaaccctctttcacggtgaggattgacgctagcatcctcctatcaaatgaagacaccctttactcacgtagcgatcacaaggaaggaacaatagtgaggagaaagtacgtgtggtcaaccgtcaccgtcgatgtattgccgtaattgttgtgtacacgatgtaaactattttggatatattgaatatccatataaattaattgttgtatggcatatgttaattatgtatgattattagaatttttaacaaatttaaatcatgcatatgctagttatatatgataattacagtttttaacagttttaaatcatgcatatgcatattatatttttttttgaggaaccgacggcaggagtttctcttgccggagtatatagaggaagagaattggcccagttaataagggaaactggacccaaaaaccgaacaagcacggttaattaatcgggaaaccggcaaaacctatacaaaaaaggaaaaagaagacaactattgagacctcacaaaagtcgtcgttgccgagcttaccaaaggcaagcagcttcgataacataatgcaaacgaggcctccagaaccaccaaacatcctctagtggagcagaaaccttctaagcgaagccttcaataagggaacaacatcaaggatgctatcaacacccgttccgaaaggaacccggttttcacctgaagggagagagagccaacatgacgatacctccaaggaggaaacggcgcccataggcgtcgatatcatcaacctaggatacactaggcaaggttttcacccgaggctctctcaaaatgctccacctccaaaccctcgtcacattgccgggacatctgttgggggtcatcgttgccgagcttgcaagacaaacagctccgactccgcctcaacattcaatcacactacagctcgaccaaagaccacctcacccacaggaacccagctgcagcaaacctacggcgtggccgatgaccagacaggacgccagaatccaattccgcacgccatccctaccgaaacaaggacctccccggcatcgactggaagcaccctagcctaagaagggaggagcacctaagaagaggggagcgggcgccgcaccgccagtgaccaccggaagaacaaccactgaagaaggggagaaaccggatctagaggaacaagactcccgtggtatatcgcgtggattcgaagtgtagtttatcttctattttgccgacgaaccctagctctttcgccgccgattcccctcgtatccgagccgatccccccctcctttggcagcccctcggcctcctcatccgtttcctcctttttttttgaatttttccctagccctagagccgccgccacgctcggcttctctctcctttgccggccgccgctccagccacgtcgcgccgcctcctcggtcatcccagaactgcgccgtcgccttcctcggcttcgcagtgaagagctctaccccgtccaccggttccttttcgccaaatcccgccggaagccgcttgccgacgcgaacccgagggtttcggcctttgccgcttctccagccgcacatcgccgtcgactccgtggtcgccgaaccccgccgtctcctccgttggtatcgcagcgccaagccgaagcctgttcacccatgcgctgccgctgcaaaccaccggagcttcgacgttgctgtcgatcagtacaccgtcgtccccgtgaggccgatctattcgatcctcagccaagctgcgtcgccgttgccgtctccgctggtcatcgcagaagcctgcgtcggcatcgcaaggtcctcaggaagcccgtccacccatcctttttccccggagttcgccgtctcaatctcgtcgccggccatctcccgtcatcgtctgtggtcgtgccgcccctcggtgagttcgtctcgtcgtcctattcgcgttggtgcactcggatagcccgccgagcctcctagcgcttgcgaccttgcggtccggtgcgttgccggcgatgatgtcatcgctgacgtcagcgtctatttttctgttccaaataaatcgtaattccttttgctaaattatattaaatcttgtaaaattcatagctaattcatacgaactcattcgttcaagtctcataattcatctaaattcaaactctacctactgtttatttggtttttatttgtgtttttccttttttgcgttctaggtttagttttcgatcatttcgaaggattgttagttcgttgaagaagttcctgaagacgaattgaagacgcttgtttgcaaggcaagtcatacaaattccaaacaaccctttgagcatgttgaatctgtttaaagctattgttttatttcaacttatgcattattttcgaatgtcatcgggtggtgagcctttcccaattaattatggccgaagatgactttattttcctatgggtaataaattgattagtttagaccttatatattggattgattcaggtaaatgctatatatatataattgcttagccatgcttagaaacattagctcattaatgggatgaatcatactacattattatttatggttatatttaatggtagctcacgatggttaattgtgttatgataattaattgataattaaaacttgacaatggtgggttgttagcacatggttttgaaggtcgtgctcatgacaattaaggactggtttgcgagctactgttgtgaaacattaaccgtgccaaccacaagccagcatgggcaacggctttaccttttgtatagcatggttcattacggggtgccagactaagaagcggcgagaagtccgtgggggtcgctgggagtccatgcctctggttgtagaggaggtgattatgatctaggaacggtgcactgtggtgagttgtgttatgcgaagggtattgtcacgatttcccccttttagtgccgtgggggtacttcggggcatggcaacatgtgtggaatcgtgtcttgtgggtacagtggtatatctctggccagagtaaaactattcgaatagccgtgcccgcgattatgggcaggtctaacaatgttttcgtgattagtcccacactactcattaatgttaataatgtgataattaatttgactcttggtttggaatggtaaattcctagtttggaggattgatctgtacgaccggggttggttgttcaggtttggttgggcctaagcagcatgggtgcgctgttcagtgttgattaatattgatgattaattactctgctgtgttactactcttagatctttgctaaatgttgttttcgcaaatgaacactatattatgccatcctttagtatccttgtgcacttgcatacttgctgtgtggcttgcggagtattccatgtactcaccttgcaatcatcatcaaatctcaattgaagaaaaaggatccagaaggagaagacctttggcttagatcccagttgagctgc

SEQ ID NO: 21385 - DNA, 676 bp, Oryza sativa
ccggctgatgaggcatctgcgataccccagatttccgatctaccgagtgagacagtgtggatctgtttgggaggctcgggtcgaggttcacacacgagttccttcagagtcagactaccgcttcccgacccgccaccgtcacgacttaccggagaccgcgatgcaggatgcagcccgggaggccttcctccgacttagctctatccaccgagctgagttggtgagtactgagtttgctcaccacctgtttcgagaggagagcaactccgtctgcacagttcaggacacaccttgctgctacaacccgatagtgaccctactgtcacgatgggctgaggcagtagacgacttttacgaggaggctctgttagagatcgacgaccagcagaggcatatgggagagttagagaccgaggtgactgacctcacagtgcagcagcttcagctggaagaggagcaccaggcttggggcagtgagatagactcactaaaggcacagctccaggtccacggcgaccagttccagcagttatctgaccagtacaacgacagccgcgggatgatggatacacttgaggagcagctgagagagagtcaggagcacgtcagctagctggaggagcagcttcgagcagccacggtcagcaccataggagcttctacttccacaacagta

SEQ ID NO: 21386 - DNA, 687 bp, Oryza sativa
ccctcgtttttataacaggaatcaatcgtgtaaacagtactatttccctggatcaagtagtctggtacacacgagttcatagcctggtgctcctcttccagctgaagctgctgcactgtgaggtcagtcacctcagtctctaactctcccacacgcctctgctggtcgtcgatctccaacagagcctcctcgtaaaagtcgtctactgcctcagcccatcgtgacagtcgggtcactatcgggttgtagcagcaaggtgtgtcctgaactgtgcagacggagttgctctcctctcgaaacaggtggtgagcaaactcagtactcgccaactcagctcggtggatagagctaagtcggaggaatgcctcccgggctgcatcctgcatcgcagtctccggtaagtcgcgacggtggcgggtcgggaagcggtagtctgactctgaaggaactcgtgtgtgaacctcgacccgagcctcccaaacagatccacactgtctcactcggtagatcggaaatctggggtatcgcagacgcctcatcagccggtgtagctcaatgacgtatccctctgagcggggtacgcccatctcccaggtagcggatgaatcctgatctgccatctaattttaaaaaacccaaggtcagctaagagtaaaactcgttttgtgaagaaaatagttaagagta

SEQ ID NO: 21387 - DNA, 46869 bp, Oryza sativa
  unsure (1)..(46869): unsure at all n locations
atcatattataatgattataataagctgggaaccagattataataaactacttcaataagttgtctattttttcagcttactctaaataatttggattataataattccaatccgaaagaagcagtgcctaaaacagggcagagtttcgcttgggtgttgctctcgtccgtcactttgtccaattgtccatcattggtacgcttgctcccccaggctcctgccagttgcttctctttgtccggccggtgtcaccgctgcatgcgtcggcgacacgatcgagcccgtgtgatagatatattaggcactgggcagcgtggcaaggtaataattaacgatttaatagcaaatatatagattgtggattgcggtcgctataatttgtataaaattacctgtgtcaaaataatatgtttcgctgctgtttatcgaatttttagtggaaaaagttttcaccgctgtagtaccaatcattactgagaaaatatattaagttgtcctaagatatcgcattagtgacaattatgtagtgataaaatactccctctgtttcacaatgtaagggattctaacattttccacgttcataatgatgttaatgaatctagacatatcaatctagatttattaatatcaatataaatatggaaaatgctagaatgacttacactgtgaaacggagaaataatatttttgccactacattgtatttattagtgggagaacattgtatcaggaggcctcatcaatgatgaatttattgtggcgaatcctttcagtgctaccctttaattcatcatatttgttgttttacttgcgacagatctttgggctcctatcttttactttttcattcgaagattttaatttgcatcaagatttgtttttttatatgtaacatagcacttattcagttacagtgcacttacacttggttaattacagtgcataagagtaaaattttacaacagtttttctttagattttaagatttttaacatgtttatctctttttggttattttattgaaaacgggctatatccattagttaaaaatttgcaagattcaaagcaataaacttatcgaaagattaataggtagtcccttaatttataattagtgatcatttgctatattgttgtagtaatatctagttgtgacaaactcatacggcgctaattcattttttgagttggaaaatttcatgtcacccgtgggtctgtttggtttgctatgttatcatgtctgtttggttctaaggaataagactgtgtttagttcgtgtgctaaaatttttgtgaagtatacggacacatatttgaagtattaaacgtagactaatagcaaaacaaattacagattctgcctgtaaactgtgagatgaatttattaagactaattaatccatcattagcaaatgtttactgtagcatcacattgtcaagtcatgacgtaattagactcaaaagattcatctcgcaatttacatacaaactgtgcaattggttttttatcacatttgatacttcatgcatgtgtccaaatatttgatgtgacggaaatgttggaagtttggccaaaaatttttgactctaaacacggccttagtcaatttttcctcccgattgaatcatcttcctcaaccacaaaatcggtctcccattttcgaaaacaagggcaaatgaataaaagcagtttctattgacgtggcaagttgaccgtagctaacccgctgagttagcaagtggaacccacatgtctggctcacatgtaagcctctcaagggaaaaatctgtagggtccacatgccatctgtatccactttcctccccttcctctctattctcttttttttttctccatcgctcttatgggcaatggagaaagggcaagacggcgaagggcagtgaagcagaggacgcgggcggcgcgacggcgtaatctgagacattgtcgcgtgcaaccatgcctcttttcctccgctaccgcaggaaagaaggcgccaggcggaaacggcggtggtggacggcacgacagcgcggaatccgagatatcgccgcgcacctggctccatatgaatcagagaagacagaatataagcaaggacattagtaaagaagaatggtgctaaaaaatctgagttcagcaaagaagaatgtttcatcacttgtggctctgagctttgccacagcttcctctagagagactgggatgttcagagttcatcagacaggaaggtgttggtacctgcctagctacacatactgctcccggacctcctcccttagcggcatcctctcggctctcgccgttctggctctcacagtggatagagcggcttcaaagctacggatagaagtggggtacttggttgggtcgaacaggtctgctactcacggtggtggcatctgcgccgatcgttgagccatcctgcagcacgatcgccagcaggccgaggcagagctcggccttctacgcaccgaggagggcggcgttgatgaccagccacgccgaccggggtctgctccgactccgagatccccgatgtgagcgcgtcgggggcgcgcgcactcgggcgcctcgatggtgtagaacggcacggcgaagaacgcgaactgcggatgcaccgccggtccgccgcgttgtaaatgtggcgcggaggacacgcagtggcggtgagccggcgagcccatgagcgtggagttcccaggtgagttgaagcattgggctctgttggccctggaaccgtggctgatgctcccatgccttcttctcttcagacagtggccatcctgaaatcatcagggaagggtagagattgattaagagaggtggctgacctgtgggtcccacttgctgattcaacaagtcaatttgccatgtcagcataatcaaccatttaaggagtcgatttacaccagttttaaaaaacaggagagacatcacttatacctgattttgtagttgagggagacgatccaatcaagagcagttgagagagaaaaatagacttatctaatattctaaagctgacgggttttcatgcaaaaatgcgcgccacgtggtacaaatagtcgaacgacgcgtgttccatgcaccatcgtgcgctcaagccccgcgtcgcgcacatgtgagtaggggtgaaactgaaaacggtacggaaactttccggattacggacctatttttagaaacggaatatgtcgcttggaattttttcagaattattcggaaacggaagagaaattggaaatattttctcagaaacaggatcggaaatgataatggcagtttccgtcggaactcggaattggtcggaaactttccggaaatttctcggaatttctagaaattttgtgactgaaataccctgtactcttttttttaagcactgaacagtaaataccatagtgtttggcttttatttttttgaaaaaatattttttatgcaaatctgaagttgcataagaatattttctttgtgcattgagatttatcaatagcattactctcttaagcatagataatttatttcatagattgtgttttgtgatgcccttttgagacttaacaattggacttatatgattgtgttttatgatgaattgttgaccgttgagacttgagaattggatttatcagtttgaagggtttctgtattccgataaattttcgttcccgtattcgcgccggttcattttcgctccgttttcggtttcgataatattcgattccgttttcgtatccggggtttccgattccgattcgaaaataatatgaaaacaaaaacgataaagatggtttccgtctatttccgtaccgttttcatccctacgtgttgtgcgagccgaactggccatttgggctgcagcttggctggcccaacaacagagggaaggcgcagggccagtttccttaggccctccccatttcctttttgttttccttctcattcttttcttttgttatttcactcctccatgttctaaaatttaatttatattatgaagaataccacaactcatggtaagtaaaaaaaaatataatcataaaataatctgaataaacaaataggtatgtactttacatatagccacggtctaatggaagaataatcaaatgtagtaaatcttttgtttaacttatgtaacaaatatttattaccctaccaaactttgaaataccaatctcctcatcttatgataaaaaatgttggcatcttatgataaaaaatgttggcatcaaataccaatctcctagatcactaatttcatatgtatgcatcatatcctttttaaattattgcatcatcttctcactattgccagtatatatcaaatcatcaagataaagtgagacgattaggggcctgttcactttgatgccattttcaaccttaccaaattttgataaagttaccaaaaaagtggttacatttagtttactactaaattttggtaactatataagaaatcctgccaaaattttggcaagttggaattgccaaaatttggtaagttttttttttttttgcatcaaagtgaacagaccctagaatatccgtacctgttttcttgacatatagagtaggctcacttatgctcttggcaaattatttatgaataaagtacttgtcaatttgattataccacgctcgaggcgcttactttaatccatataatgcctttttaagtatgaataccttgttttctcccccttgaactgaaaacccttcaggttgttcaacatagatttcttcatcaagatagccatttaagaaagccgatttaacatcaagttgatatatattccatctcttttgagctgctagagcaattattgtgcgaattgtctctagcatggcaataggagcatatgtctcataataatcaatctcaggcttttgcttaaagccttttgccacaagtcttgccttatatttctgaactgagccatctggatttaattttgtcttataaacccatttaaatctaataacttctctgtctctaggacgatcagccaactccaaggtattatttttctcaatcatataaatctcatcttccatggcctttatccaattatcatgtttttctgcttcttgaaaactttgtggctcaacaacagaatagttgcaaaattcatgttgttctgacctccttatttgagaagtagattctaataaatcaaccatacttcttacccgtcttggagctgattccggtgtagaaatttgctcttcactgctcgggcttgaatctaaactagcacttgagcttgaccttggactttatgactgtggacttggagtatgatattccacttcatcactcatatgtggttggcttagcgtgatggtagtggttggcaataatggagtactagaagcttctggagacttccagttccatgtagcactctcataaaaaatcacatctctgctgataataattttctttttctccagattataaagtctatagcctttgataccatcggcatagccaacaaatttgcaacgatcacttttattatcaaagtttactctcttttgtgctggcacttgagtatagcaaatgcaaccaaatattctcatatgaccaatgacaggctttttaccataccaagcttcaaaaggtgtacgatttggtactgcctttgtaggacttatatttaaaatataaactgcagtgttaactgcttcagcccagaaagatttaggcatacctttgtcttgaagcatagaattggccatatcattgatcgtccgatttttcctttctgcactccattttgttgagcactatagcctgcgttcactgtcttcggatgccagcattttcacaatatttctcaaattcttttgagatatattctcttccttgatcgtcgcgcaatactttaatttttcgattactctgattttccaccatggccttgaaatttttaaatgtctccagggctgcagactgttcttttagaaaataaacccagatcattcttgtataatcatcgataaatgtgataaagtaccaatttcctccttctgaaattgttggtactttactaactatatcagtatgcactagttccaatggtgcacttgctctccaagctccactgtgtgggaaagaagctcgaatttgttttccaaatacacaaccttcacatgggtcatatttcagagtaataaatggaaggccttgaaccataccttttgttctgagtagcttcaatgctctgtaattaagatgacccattctcttgtaccatagatcaaaaatatcgacttcacttctgagagccatttgagttggatgattcatccttaatagaaaatttctgttcttctccatatttattttggcaaccagacattatttttacggtctaatattttgcaagaaaaatcctcaaaataaagtgcgtacccgtgttctagaatctgcccaatacttagcaaatttttctttaaatcgggtacaagcaagacatcttttataaattttggatcgtctgctgtttgaacagcaactgtacctttgccttcactttgggctatagagccattacccatgtgaatctttgcatgatacgatgagtccatttctcgaaataaatttggatcaactgccatgtggtttgtaaaaccactgtcaataacccaaacatcatccttttcttcttgagcagtatggcaagagaaaaccatttcttcagatttttccttttcttctgaaaaattagcccgattaatttctcgggttctgcaatattttgcaatatgactctttctttttcacttattgcatgtcattttcttccggcacatatctgtagtatgactagatttttggcaaatgtcacaccacaaatttgaattggacgtacctttttctcttctctcttgaccatcttccttctgcatgttcagcttggaaaaaccgttttttctgaaaaccacggtctcgcattggaaatccatttttctgaaaattcccgcgaaacctttgagatctgaagctcaactttgactgaaatgcattttcaacggagctcccttcacatggaagctttctttcttcatgagattacaacaagctcattagttgttgaattgtgagagttgacagatctttggactcctcaatagcagccacaatgtactcatatttttcaggtagactgattaaaattttctccacgaccttttggtcgtttatatcttcaccatagaggcgcatctaattaacgatctcaataactcttgagaaatagtcttttaccttctctgactccttcatttgcaaattctgaaattgccttctcaaagtttgaagcttcactgcaagtaccttctgagatccttaaaactcctccttcaacttgtcccatgcttccttagatttcttggcgccaataatacgcggaaatagactttccgcaactccttgttggatcaataacaaggccttggcgtccatcatccgatcctctgccaaagattttttctgttccgccgtaagagtttctccagcaaaatactccctgtaaccattctcaacaatatcccacaatccttaagatagtagcagcgtccgcatcttgatgctccatatatcataattaattttctctaacaaatataggaaccatggactgtgccattgtggcgccctaacttgaagctatacttgtagcttcaattgagaataccgatacgccgcgctactccatcacaccctactcgaacctgggcgctctgataccagttgttggtgttgattattttgctaagaagggaaccaagacgaggagcagagaagcttgtgcttgttttaagtgtttcttttacttgctttgcttgagggctgaacagtacacttggttgtacgttgggcagcacatcatcaggcacatacacaagcattggctgcctatttataggcttacaaccaacgttacttgaagcttcatgaacctagtagaattagtactactggctgcctagtattactgcacattgatggatagaactacactaatctagaacctttttttttttgaccggggcactaatctagaaccttttactgagtagtagtagcactggtcttttgaccataggttctagagtaattgagaagaataagatgtctagaaaattcaggaaatggattaacatcaacaccctcggcgttccacccccgccgtgccctgtcgatcatccgctctagcaccggcgcagcgacgaagggatgcgccgcgatcttcttcccgtctgacgtgacgagctgcacgtcggccaccaccgccggccggagcgcgtccagatcaacaaattctcctcgctcacgatcaacaacaattcaataggctggttaaccaagaaagaagaggaggggagtgggatgacacgtgggccccaccattttatattattatttgtgtgtagctggcatgtgggcccacggattatattatttttcggatcaaaatgctacgtaagcgctatgtcaatgctatgtgggacgaagaactagtcaaaacagccatgtaagcgccatgtcagccaaaaccgccttccaaacgtcgagggacctcgtttgcaccggttttgatacttcagggaccggttgtgtcgacggggatacccgtagaccggatatagagggtattggagtacgctggtacgaggatctacatagtacgacatcaagcaaacaggaaaaaaggattatactggttcatgccccttgataggtaatagccctaatccagttgatatgggattatataatagaaaccacagattacaaagggaatagcagaactcgatgataccgacgagaccgtagtcgagttggttcgactagatcatcccggcgacttagctcctgtaggctccgacttcataggctgtggtggttgtattggctgtgacattcgattccttaggtcctcccggggggtcccttttataccgcgggtcagttggtctccaagtagaactcgaagacatcggaccccacacgatacagtaacgacccagttttgtccgagtaggactccttccatccgtagactctatttctgttacgtgatgaatttccttaacgtatacaagaaacatccgtatacgcgcaggtataccatatcagtatacaacgtatatccaagggtagagggtatatccaatccgtaaccctgacagtagcccccgacttctgcttaaatgaactcatgtaaccgatcgcgacttctgatgtcggggtcgttgtcgttgtcaactggtcgatctcggtgtgagaaccgtagagacaaggagtaatcaacaacaccatgtgaagttcaacggtcatgagtgaatttaaattaaagtccgaaaactgttgcgcttaacggacccagaaatttccggcggccatctctctcctttccttggaattcgcaccgtcggtagtgcgtttatttaagggagttttggggatccattttgaagtctgcttgctgcagaaaactttctaacctccaagcgctcctcgtcttctccactcccgcaaaaaaccctagcttgctcatctcagtcccttctccggtgatctccagcggcaatggatctcgacaagtccacttctgccagcgcgtccctaaagaagctgcaggaggacggtactctccctggttgcgggaccatggagagagaaccaggaggtattgaacccaaacctgtcctaggccgcatggttgcggttgaggattatattctttgcggttttcttcccccgccctccgagtttcttcttctcgtcttgaatttctacagcctttccttgctccatctgaaccccaattccatcgccttcctcagtattttctcgtatctttgtgaggcctacattggggtagagccgtttcttgatctcttccgcttctactatgagttgcgctagatggaacctaaaaaggtgtccggatgtgtcggtttccgacttcgagatggcctgaagtcgcgatacatccccttctagtgcccctcttctcgtagcaaatggcgggcgaggtggttctatcttcagatagaaaattcggatccagtctttgttgttcctgagaagcaaccagacaagatcccagaatggaccgccaagcccaccctaactccctcccttcagtctttcatcgatatcatcgatgacctccgagtacgagggttgtcgggatatgaagtcgctgccgacttcatcggtaggtggatccaaccgctccaggcccgagtccacccagcctttgacaattctgggccggaggacgcgacccggatttctcctcggggtatttttcttgtatttcagatttcattcttcatgtgcatgttcctccggacttatcgagttctggttctcgatcctacaggtttaaacagcgaaactgtggagcgccgcgttggtcaggtgatgatcagcagccctacgacggcgagcaacgtccccgtccccctttgcgagaaggggaaggccgatcgtgaggctgcgatcaatgtgagtgtatttgaggactcctttacttctgcttctctgggatcgcattgtgacttcatgtatgcaggctcttcctctgaccgacgtcatcgggccgctcgcggaccaccaggcggcggcgtcgttaaaggagggcgtcgccaaggaggcatccgacattgctgctgctgctgccacgacgagtggcaccaacgttccgaagagagggaggaagttctccgccgtgctcgggactcgtcggaaggcgcccattgtcacatcctgattttcgtttcaggatttataaattatttaataaattatttatagaatttatattaaatgttcattaatttacaagtgaagttaaatgtgggaaataaaattttctaaatataaagaatggttggatttattttttattaaattctccatgattaattatactctctggaattttctcggatttttcagagctcaattcttaattttaataatacaaagaacagtttagcaattatttaaataataaattaatctttaaatgatctggatattattatgttaaatactttgagtgtccaagtatgttcaagatttttcttggaattatttgagcattggaagtatttttaacaattgaaagatcatctcattggttaatttatttggaaaagtaataaaagtcgtcctcatcagcttgggccgaattcagcccattctctcctattctctctcccttcctctcagcccgcagagaagtctgtttgacctccctggtgctacagtgctccttcttccagctcaggcagagcccgagctctccagcccgtgcacagtgccgccgcctcctcccaccaatccgacctccccgttgctcctatttccaaattagttgcgggaatggaatcctctcaatctcctcttccttttccccaagaaatcctcaaaagtttctatggaaatcctttccaatttcgcggttcaatcttacctttttccggcgagaaccctagactttcccgagtttttcccgtcgttgtgggctcgatcccggcctcccatggctatatatagagccccctccttcccctctttctgccgccacctctccctctctccgccgtcgccggaaacactcttcccgcgactccctctctctccacctccggccgccgctccagccgccgtgcgccgtcgccccggccgtcgccggtcagcgccgccacttccctcggctccgcaaagtcgagctctaccccggctattggttcctttgtgccaaaaaccgccggaagccgcttgccgacgcgaaccagaaggtttcggccattgccgagcttccagccgcagctagcagccgccttagctgccgctttcggtcgccgtcgactctattgggttctcaggagcatggtgaagcccggccactggtttttcttcgccgaagatcgctgaaacgtcgccgccatcgctgacccgaccccgtcgccgcctctacctcgctgccggccgtctgccgtcatcatccatcgtcgcgccgcccctcagtgagctttcctctctccgatgtcgttcatcggtgtggtttatccatagggttttaatccaatctaatctaatttggccctaatgtcgtcatcgtcttcatgtgttgtcgccagaaaatcgtcgccgcagtggatagtacctcgccgcccttcgaagctcgtcgccggccatcttccgtcgctgtccgtcgtcgcgtaagtgttggtaagaatcgacgtcgccttctctacctcccggtgccctccgtttgcattattgtgccgtggttcgccgacaaccgccgctcctatgcctttcacctgtgagcttttccttaatccaatctaacctaatccgctgtctgtctagcgtagtcgtcgtctccgtgtgttgccgccgggtagccattgtcatctctccctctccgatcattttggttcggtgacacttctattcgtgttccctcggtttagtttttaatctctcgtttgtgtcgtcgagtagccgctgcctagccgagccaagtcgccctagtgccgccgtgtcgcagctgtgtgccgctttaacctagccgccgctttaaccgtttgtccgtagtcaagttgtctagccgtaggtgcatccctaaattcctaccggcatatcgtttgccgtaccagggctttaccgtgaatagtgtctagcttaccggtttagccgtagccgttgttgagtcgttcgctcgttcgtttcaacgaggtgtccccggtgcttcgtttgttcgtccgtgtggagtcgtcctttagtttagagccgttcagagccgccggttccgttcgccggtttcggttgatcatttgggtgatcccgtgtcacgtagaattgactcgttaagtcggtatctcatgaggctcgcttgccagatcaatctaatccgttgaatcttggtcaactctcggtcaagattaatctcagccgtcaaaaattgatataaatccgttctctcttttcagtggcatattatttctttttaatatatgtcatccaccaaatatgatctaatctttttcggaggttgttttaatcttttgtctcagttataaatcatttgtaaatggtttaactaatttggaatagtcttttctttaataggtttaattggaattagatcttgtaaaatttgtaattaattcatatgaaatcggaatgagaccgttcaggtctctaaatttatctaaaatcatgatctacatgtttgtttactttatatgtattgtttatttggttttattagtctttttcctcattttgcgtgttagcttgtcgtttctgtcgtttcgaaggatcgtgagtgcgtcggaagtgttcaagaagattaattgaagaccgattattgcaaggcaaatcatacagatcccaaacacgattcctttgagcatgttgatcatatatttaaattctctatttatttcaactgcgcatttatttttgaatgtcactgggtggtgtgaacttattcctttgttatgaccaatttgcattgattaccctatttcttgattaccttgggttattataatttgactagttgagctttatatattggttcagctagatgttagacataattgcttagccatgcttagaaacattagcacaccattgggataactaatgtttcactattacttaatggtgatatttaatgatagctcacgatggttaatcgttattggttaattaattaatttgctaactaaaacttgataatggtgggttgtgagcacatggttttgatagtcgtgctcatgacaattaaggaccggttcacgagtttcggttgtgaaacattaaccgtgccaaccaaaagccagagtgggcaacggctggacactttgtataacaaggctcattgcagagcaccagactgagaagtggcggagataagcccacgggggtcgctggggagtccatgcctctggtttttgagggggtgactatgatccaggaaaggtgcgctgctttgagttgagttatgcgaggggtcttgtcacaactacacaaatggtgacatgttcagcatgggcacatgatgatatggtgacatgacggtgggttgtgtctcgtgggtacagtggtacacctctagcgagagtaaaactattcgaatagccgtgcccgcggttatgggcgggtcgaacaatgtttttcgtgattagtcccacactactcattaataataatgtggtaattgatggtaattaatttagctcctggtttggaatggtatattcctggtttggagatagtaatgtgatgccgggtatggttgttcaggatggttgggcctgtgcagcatgggtatgttgttctgtgttgattaatattgatgattaattactctactgttttacaactctcaattgtttgctaaatgctgcttttgcaaatgagccctatattatgccatcatttggtatccttgtgcacttgcatatttgctgtgtggcttgctgagtatgtcatatgctcaccttgcaataatcaatcaaacctcagttgaagacaagttgcgaaggagaagacgtttggcttataccccagttgagctgcctgtgggagtggagctgaagccgtcgctagacgttaattccgctgcagttttcttttcttttgtaagtatgtaacgttgtattattgatgattctgtatattaaattgtcagtttgtgtacctcggctgattcctggatgacgatttaatgcacaaataagttcggaaattactagtgaatttctgggcgtgacacctaccccatcggtaagcctctcttgtcctttaacgcgtagtcggaaaatcttgacctcacaccatgcttatcttacttaggcctcaaacgcgtctcccccgcctcagcgacggcaaaggcttgtgatgcttggcgaaaagtaagtagatgaatttgaggtcttccaatttacaaaactttggtagcctgactttatgaaaatcacggggcggcgcgggcgaaggcggcgcaagatgggtctggagcagcctctagtgcgtctcctgcagcagcctcgacagatgttgtggtcgtgcccagggactgggaggcgatgcccagcggccctgccggtggccttgtgcctgctcggggcccacccgctgacgtcctcacctggggggagctccaagctgagatggagcgcatcctccaggccggcgctcgcagcataggacgcgagatcgaggaggccaaggctgcggcggcggcgtcggcgaatgaacgcgccgacaagctagcacatgacctggtggaggtccgcgaggacttccagaaaatgagggagctggtggccgaaaacgagaggcagcggcaggggcttgagcaccgcatgtcggagctcgagaacaacttgttggagatccgtggctcgctgcgagtcacctacactggcatgcaccagctcgccggggagtgcggcgtcacgaccaccatcccggcgaaccccgatgagttctcactgacgtcttcactcgcggaactagccacggcgatggaggagatcccctccaagcatgcggccaggatcggggacgagacgtccaacgggatctacacctgggcatgccacgtcctcgcgtgcgtaaggttggcgcaccctgatctcgacctcctgaggatcttggatcagggggctgctaatgacgcgtgtaagggcatgatggaagaagtcagtgacttgggggagtctgttctccccctttttgaagggtaggatttcagtccccttgtactccttaatcaattgtgcttgtaaaactttcgtaggttcaaactgtctttgtgtgtgcagtcatcaccttcgctttctttagcatattgatcccgagtactttgttgtcgttgtagagatgtcgatgtcgatgtcgaggatgtccagcagcgcgggcagcctgagtcgccggtagtcgttccggcacttgcgctcaagccgtatgtgccgcgggacgacgttgatcaaaacttgtccgtggaggcgggcatggcgacgacttccttaggttggtactttggtcctcatctcctttgctctttttgttcggatcgacttaatttgccgtgttctcggaagaggggaacgacttgacttagtcatttccatattgagcagacctcgagagtgcattggccgaccgagatcatcgaatccaatattggaggacgaaattcgaggtggccgaactcgagaggactatggtgcaagtcaaaaaggaccaagccgtggaagcactacgaggtcgcgaggtgtggttcgactcgtaccttaggagctgttatacggccatggccggagtctgtagggatctccgagtacctcgcgggaatcccgagtcggcggccgaatacatctcgtggttgaatggggcctgctctcagcttgaaggcatcggcaagtgtatcgacgaggccctgaagcaggagtgtcgtcgatcgagccgatatgctggagggcacgtgctagcctgtatccgagatcactgcccgcagctacacctcgagttcctccacgaagggttttcacattctcggaggactcccgcagagagagatgatctggcgaagtcgatggcgccgcttgcagagaaagtcttccagtccctggactggcgttggccttcctggtagtctttatatcctgtgacaaatatctcaaggagacatgtaatatattttggaatatttacgaattgtaagaagtacttgtgaaatagaaaagaaatctatctaactaagttttcttactctggatgcgttgtgtatgagtgttttctcacttcgcgacttcgattagtcacttgagtcatacactctccctagcccccagccttgtcatcggagaattgttctcggaagataaggctcttggacctttgacctgcctcggttgaacaagcactgatcctagcccccagccgtgaagttggaaaacccaatttccgattacacggcttggttaatacgcacggcgagaactcttacacgaccaaatcttacatggtcttttgtctcttcatgatccgacaaggccttatctgctctgggcgtccccagccgaagttcccttaggttcctcggaggccttgtcaagacggcgtaaagggacctgaggataggtttcaacgctaggtgtcatcgtggtaagggatcgtcaggaaggaacactttgattgtgatctttacctgaaaacaaactttattgaagctgtaagatgttttacaagtatggatactattgatttatacatagaatttacgtaattgatcaatgttccaagaatttgctaactcgcgaccatcgccgtctgcaatcttgaatgcacctggccacaagacttgcgtgatcgtgtacggtccttcccacttgggtgagagcttgttacgccctgcttggctttgaacccgtcgaaggacgtagtcgccgatcgaaagtgtgcgtgctctgatgcgcttctcgtggtatcggcaaagggcctgttggtagcgggctgctctgacgacgactctttctcgatgttccttgagtagatttacgtcgtcgtttcgccgctcctcctggtcctcgtcggagtacttctatactcgtgtactctgatgtcgtatctcagtggggagcatagcctttgagccgtacacgaggaagaagggtgtctccttgttggaagttgtcggtctggtatgcatggcccatagtacagaggggagttcttcaacccacttcttgtcatgtgatatcagtctgtcatagacacgggtcttgattccttgtagtactatgccgtttgccctctcgacctatccattgctctgagggtgagaaaccgaagcgaagcagatcttgactcccagcccaatgcaataatctttgaagtcggcactaatgaactgggagccgttgtccgttatgatgcagtgaggcaatccatatctgcagaatatccctttaatgaatttgatggcgttgtcggccttgatttcccccgtgggtgtagcttcaatccacttggtgaatttgtcgaacgccacgaataggaatttgtggccgccctgtcctcatgggaatggtccgagtatgtcgagcccccagcacgagaacggccaagtaagagggatagtctggagcgcttgcgctggtagctttgtgtgtttactacgaaattgacaggcttcacaccgttgtaccatgtcgcaagcatctttgagtgcagtcggctagaaaaacccttgttgaaaagctttttttgaccaatgtgcgaccggcggcgtgtgacccacagatcccttcgtgtatgtcgagtaggagatgtttgccgtcgtcggacgagacgcatttgagaagtaccccgtttggcgccttcttgtatagatcattgccgatcatatagtagattttggcttgacgggttattttctcggcctctgtatcgtcctcgggcaacttatcgctacctaggaatttaatgagtgggatccgccagtcgtctgtggtttctatgtcggcaacggcgcgttctgcatctgtagcccccgagctaatgtcggggactaccacgctatcttcatcgtttgcctctttcaccgatggctttgtcaggacgtccaggaaggtgccgggttcgagtggctctcgtttagacgcacgccgtgtcaggtcgtctggttcgatgttgtccttgcggtatgtgtgccggacctcgattccatcaaaccttttttccagcttcctgacttctgcgaggtacttagataactcggggctagagcacttgtagtctttgtgcacctggtttgcgactagttcggaatcctctttcacgatcagtcgcttgactccaagtgaggctgctgctcttatcctagcgagtagtccttcgcattcggctgtgttgttggtcgccctgaagttgaggtgaattgcatgcttgaactgatctcccgaaggtgatgtcaagatgaaccctgcccctgctccttcactgttgagtgcgccgtcgaacgccattgtccatgtttcgctgtcggtttgactgtccgacctgttttcgggcatagtccagtcagctacgaaatcagcggggacttgggacttgatggctgttcgtggcacaaagtggacatcaaactggcttagctcgactacccatttcggaatgcggccgacaacgtccttgtttctcacgacttcaccaagtgggaaggaggaaacaactgtgactctgtgggcttgaaagtagtggcgcaacatcttgatgtcatgattactgcatagagcagcttttagatctgtgtgtatcttgtctttgcatcgtggagagcttcgctgacgtaataaactggtctttgcaccttctctctctcgacaacaatgatggtactcacagaatatggcatggtggcgatatagaggaataattcttcattagattgggtagcaacaagtagagggggatttgacaggtagcgcttgagtgcgatgaacgcctcttcggcttcctgtgtctatacaaatttgtcttgtttcttcagcagagcgaagaaaggttgtcctcgttctcccatcctagcgacgaacctgctcagtgccgccatgcatccagttagcttctggacttccttgagtcttgtgggcgacttcatgttctcgattgccttgattttctcgggatttgcttcgatccctcgtccaaagacaaggaacccgagcaacttgcccgatggtactccgaacgtgcacttctctggattgagcatgaggcgatatcgtcggaggttgtcgaacgtttcccggagatggtccatcaatgagtcgcttgtcttggtcttgacaacaatgtcatcggcgtaggcctcgatattgttcccaagctgatcgttaagtgccccttggaccgtgcgttggaaagtgtttcctgcggttatcagtccaaatggcatcttaacataacagaatacaccgaacggcgtgatgaatactgtcttctcctcgtcctctttcgccatgctgatctggtggtagctggagtaggcgtcaagaaagcttaacaactcacaaccagctgctgagtccaccaattggtctattcaaggaagagggaagtgattcttgggacacgccttgttaaggtcggtgaagtcgacacacatcctccacttcccgttggccagtatcgcctggcatccgttgttcgcgatcatcgcgttcgtgacggctgtggcggttatcacggtctcggttctcgctcgggtgccctcctcgctcttcgttttctcgacgtcgtgaagagacgcgatgtcgggaacgatttttgttgtctcgcgcatgtcgtgcttctcggcggccattcaaatggtcacggagatcactggtgccgtgaggtggaggagtggcttgtcgaggtgatgtccgctgctcaggtggttcgccattggcaacgccagctggcggttgttctggctgtgctccggcagcggcctcctcgaacgcgttactgagattagccactgactcccgtagtcgttctgtccaccgtgcgagatcatcgttcagaacgggatcataaggggtttccctcggtattgcgttgatggcctcgatgtgctgggccggtgtagccacttgattctccgcttctgcgttagcgcgtgtagacgtgctagtcccaccgatagcaaacacatcacgtggtgtactcgtcaacgatgagccctggtcttcgagcaagtgtagaacttacggctcatggggatcgatgtcgattaccccaacgaatcggtctgagataactgtcaccccttcttccttgtccgcgcatctaagagggattggcaggcacgaatctcagcttgtacatcgagaaaaacccagcaagcttgcaaggtgtgtttcctggttttgtggatagaacaccaagaccttgtcgcctcggaagttgtccttgccggctcgtgattctcgtcggaaggacaagatttggccgcacaaggatccttctcaggctcggatgtcgtcgatgttccgttctccacttctgcgggaggatccttcgacatggagtcgcccagggttgtaaccacggcattctcgcttccggtcattgatggaccagtcgagatcgacaccgtggtgtaaaccgggaagacgatttcgccgacttgagtccacaccagcattgttgaagtagaaactccttggcttgtgccggggttgacgctgttgtcgacgaagcttgattacatagtagtagaaccttgagcaccaagtccccctacctggcgcgccacagtcgacgggggatacccgtaaaccggatatagagggtattggggtacgctggtacgaggatctacgtagtacgacatcaagcaaacaggaaacaaggattatactggttcaggccccttgataggtaatagcccttatctagttgatatgggattatataatggaaaccaaagattacaaagggaatagcagaactcgataataccgacgagactgtagtcgagttggttcgactagatcaccccggcgacttggctcctgtaggctccgacttcgtaggctgtggtggttgtattggctgtgagattcgattccttaggtcctctcgggggttccttttattccgcgggtcagttggtctccaagtagaactcggaggcatcggaccccacacgatacagtaacgacccagttctgtccgagtaggactccttccatccgtagactctgtttctgctacgtgatgaatttccttaacgtataccggaaacatccttatacgcgcaggtataccacatcagtatacaacgtatatccaagggtagagggtataccctatccgtaaccctgacaggttgtacctggttttgtggttcaaggacgaaaatcgaattcggtgtagagtcaagggacgttagatgaacttattcctacttaaaataaaccggtttctagtggaaaaagtacaccgaaggtctctcaacttgtcatcgaattacaaactcgtaccctaaccgtcaaaccggatacaacgcatccctcaacttacaaaactcatgcaaacaagctccctcagcagtttagactccggttttttccgacctggcagctgtctcaccgtgagacccacatgggccccacacgtcagggtgtccacgtcagcacctactctctttttcccctcttctctttctctcgctctgttctcgcatggggacggcgctagggccgccgcccacaacggcgcgcgcggtcgaagggtggtgcggccggcggctcccgggtggcagcgcgttggctcagggtggcgcgagctcgccggcctccccgctcccctcgtgcgggctggccgacggggcgaggcaggaaacaggcggtggggtggcgtggcgacgcggtggcgatgggcgcggaggtggaagcaggcgcgggcggcggccggttgcggagcagctgggcgcggtcgaagatgttcggcgccgccagcgctttcgccagatccaatcgtcagttcatgcaacgagagacgcatcttcagctaacaactgtattgcagttcaagtattaaaccatgaagaatatatgctcaaattaaaaggcattgcatttgtgcttacatggcttggggatgtgctcctcgaggtcgccgcggacggagcgctcgacggtgactagcgactgcagcgcgacgatggtcagggagtccttggcctccacgcatgacatgcggcgcatgtccccgactttgcgggctgccacggtggcgccgcccctcccatctgtcgctctcgtcgtgccggggccttccacgccggcgtcggcgtggtcgccattgcgcccaaccttggtcgtcgttgtgccttgcatccctccgcttctgcttggtgcgacaaatgactgaaacacactcgattccctgtgagagcttgtggtcttgagaaatctatgagatcgtactggtcttgagctcgctgctcgccgtcgccgagagcggcttcaggggaaacccaccgaaacgaaccaccctcctcctcacccttcgccaccgatggcggagcgcgagggcacgccggcttcccaccccgtgtcggccgtggcgccgcctcccctcgccgccctctctccctctctccgtttgcttcctcttctcctgttgttgaagtcgtgtgcgttctgtgcctgcagggtgcccgcggcggagggagaaagcggaaaggcacggcggccggaccgcaacctccgcgctggggcagcgctgcgcgcgcgcggcgtcgctcagacacgtggacacgctccgggagctcgggcactgcctgtagaagggctacggcgtgcgctgctccatgctagacggccgccgcctcctcatccagaccaacgcccgcgagatcgcgccgcggtcaccgcgtcggcctcgctcctccgcgccaccagcaagctggctacctcctgcgcggcactcttgcctcttctgtgacttcggctgccatgccgcggccaaggcacccagctgctcccccgtcgccacccgtggagaggagacggggatgagaagaggtggagaggggagaggaatcagaggctgacgtgtggggccgcgtgggtctgacgctgagtcagctgccacgtcgaacaaaaccggagtcaaacctaaaccgctgagggatctagtttacactggttttataagttgggggatgcgttgtatctggttttgtggtttggggacgatgttgtaactcgatgacaagttgagggaccttcggtgtacttttttcttttctagttcctggttctaattcagaggtaggtttagctgccctagtaaggcttagaaacgtatgggctgggacgacccaaataaggcccaactagaatgaaagcaaaagagacgcaaagccacctgaagccggccattccttccgcgtttccgtcgacgttccgccgccgacacaaacgctttgatgccttggcacggtgggccggccctgcactgcacggcacggtcaaagaaaaatagtagagggatgcaaaatagattcaatcagccatataatacatggctaaggtagaagagaaatataaaatagacttatttccagtcatataagctcaaaaagttaatggatgaaaaatagacttattctatggagaagcacaataagctatcatgtcttcgggctgacacgacccaaatcttattgggccgtgtgcgcagcccatgggctagcccggcacagcccgacatgtagatcgggtcgtgccgacccaattgaccttggcccaaggccgagtcgtgtctaggccctgacgtgctggacgggccgtttggctatctatagctgtgccgtccaccacaccgcgttgtcaatttaaagttggattcaaaataaacatatgagatatgttcacattgtagagtaaaagtttcaaatttaactacgactaaaaattttactctcaatgaaaaaagtttattcttaatacagtaaacatatctcaaacatccaattctatattcaacgatagtttcaagactttcaccgtatatttttcaatgttgtacagtgtccactatccagtcaaaagccccatctttatgaagtcatctacctctcctgtctcgtctcaatcccctccaccaccacgcgcgcacgaaacccgcgcactttcccctcctcttcccttcctcgcgccgcgtccaaccgcatcgcatctcaccccacctcctccctcgggttcttggtgcggggagccatggcggccgccgccggggcgccaccggggttcttctccttcctcaagcacggcgtgctcgtcccggcgcgtggccgcggcgtgttcctgccgctgctcgcgctcaccgcggcgctcgcgggcgcgctcctcctcgcgaactcgctcgccgtgcagccgcgcgccgtcgccgcgctcctcgacgccgacgccctcagccgcgccgacccggccagcgccgcgtacccgaagctcgtccggaggttccgcgacgacctgcgggggctcctcgtcgacgccgccgcgtgcgtcgccgccgcggtggtcgccgggtcggcgatcaagatcgccaccgtgttcggcgccgtcgcggcgttctcccccgccggcggcgaggaccgccgcgccaccgtgtccgggctcatcggcgcggcgagggggaacgtgtgggggcccgtgctgaccatcgccttcgggtacgtcctcgaggtggtctgcgccgcggccatcgtcgccatggcgatgctcgtggtgcccctcctcgagtactccctgctgctcctcttcctcgacgccatggccgtgctcctcgcctcgctcttcctcgtctacctcaccgtcgtctgcgcggtggcgctcgccgtgtcggccgcggagcccggggggcgcggcgccggggcggtgtcgcgcgcgtggcgcctcatgagcggcaagaacgcgcaggccgtgctctacgtcgtcgccacgttcgcgctcgccgccgcggtctcgccggtgtacacgctcgcgctcaggtggtggcctcgcagcgcgccggccggcatcgccgccggcgtcgcgtacgtgctcctcctcggcgccgtcgaggtgttctccgtcgccgccgtcacggcgtactacttcgagtgcagggagatgaagcaggtggaagaagacatggcggcgggtcaccaccactacaccaagctctctaatggcgacgaggcaaacatttgaccaaacatttgtgaatttttctctcttccgaattcattgtatgagtagtgtttgatagatgctactactaatattcttacattgggattgacattgcaaattccatacaaaccttcaagcaaggaacagtagtaccatagcaatatcatgttacatctatgcctacattttagtgtggtgaattttgctcaaattgactgtaaattttgtgattgcacatgtgaaaactgcaatcttttaaaaattatgcgaattctaaaacatattgaaagatgatgcaaattctcataattagggggttcctgatcaccatcatccatctaagttatcacagcgattgattgtgttagttgggaacaaacaatccctttaccagtgattctttcagcccaatatattatttaaacaaaaaaatatgagatcagaactaagcaagttgctgccacatccctatcacacattaaatccacccgaacaatctaagcaagtacaggtaaaatccatcacaaaaatggagaaaaatatctctgcgaaaacaactatgcatatgctctgattcttctctcaggaaggagccaggaatatgccaatcttattggcaccaagaaagcatacaattctctgctgtgcttttgaatccatcgaaagaaaaaataaataaattcagcatgtagttttcagagagaccgtcaaattaaggcagctaagctcgccatcgccacacggatttcttctcgtggagaaacggatgattccactatgcgtcgctgtcagctgcggcgactgatcgttggacacaattctggactccgtttgtccaatcggatcgcaacggtgactgggttatgactagcttgataacccatggtcgactgctttcccatggaattcggccggggaagacagtgacctcgccggagctgggggtgagctccagccaaagaggtcgacggcgttacgctggcttgaaatcgcgaggccgagatggggtccagaagaagattgtagaacagaaagattttgaatagttttttagaaactcaataaagaatttgtagttttagtagtgatgggcacattgttgtgtcatgtgctgatccaacatgtttaagctaataatgcagctgttttcttgatgaaattgttcacgtggaagggagagatgatgaccattgactccaacccaatcatgccttgaaggctcatgcaccacaatatagtgcacatgtatgtaatcacttatataaaaaagaagtatttgagtcagatggggaggaatgccagcagggaaaaatcacatgcccatgatgtactgttggtcccaatcaatcacacatgaagggcccaagtgaaacatacattcgatagttgcagtaggataaaattaaagtacacacattcgaaacggggctttacattgttgccttgaagccaaccagggcaatttttatacaaaccttaggtcaactttgcgcatgagttcatgtcagatagattacaagtcctccaatccctattgtcttatatggcatgtattaaaaaaatacgatacaattattgaaatttacagtgtaaacttaagtaatttatggtgtaaaaattattcgactaattttaaacgaaaatctgtaatagagaagtccctttattctttgttttttttgttttgttatcctcccaaggtacagtctaaaaaagttttacaaacttccttgggtcgtcggctctcgatgctggacgccctcctcccgtgagcaactgagcatcgccagccactacggcgcactataacatacaggccgtgtttagtatttttggcaaaaaaaaaattgacgtatatggacacccatttgaagtaacaaacgtgaattaataacaaaacaaattacagattctgcctgtaaactacgagaagaatctattaaacctaattaatccgtgattagcaaatgtttactgtagcaccacattgtcaaatcatggcgtaaataggctcaaaagattcgtctcacaatttgtaattggttttttttcgtccacatttaatgcttcatgcatatgtctaatattgatgtgacgaaaaagttgaagtttgaagggaactaaacacagctaggggtggacgttcggtcggaccgaaaaattcggtctcggtcttcggtttttcggtcagttcggtctttgcaaagtcaggaccaaatttctccaaaaaaactctggaccggcaaattcggtctcggtctgaccgaaatttttgagaataaagtttggaacgaaaaaatttgacataggcatctccggcgctgtggagggcggaggcttcggccgctgcgcggtggangacccggctgcggccgcgcggtggagggtggaggcggcggccgcgtgggggagggtggaggcggcggccgcgtggtggagggcggagccggcggcaacggcgcggtggaggctggaggaggcggtggcgcggtgggggcggagccggtggcggcggcgcgggaggggctggaggagtgcggcagacggcagtggtggtagactggtagggttgtatcacttctagggtatgttttagtaggcttattgggcttcctaggcctattgggccaaaatttcggttaattcggttaaccgagcccaataaccgaaatgaccgaaataaattcggtcttttgaggactagaaccaaacagataaccgaatatctcggtctcggtctcggtcttttcagttcggtctaaatatgcccacccctaaacacagccataggcttacaacctttgaggccaaccaatgaaccgtcactcacttgacagttatatgattgtagaagatgatccataattacttctatcatgtttatctatatctattctactatataaaagtatagccgtgctcgttgtctctcacaatgtattaaaaaaaatcgaaatgctgtgctccggaaagtaaaatcactaaagaaaaatggagggggggggatgtggttggataaaaaattatccgttttttatgttagatgtacatcacagttttttttttcaaggaaccgatgacaggagtttctcctgtcggaatttatagaagaagagcccatttttaatagtatggctcgttgcaatgaacgatcatatattacaaggtagaagttggaagagttgcattctaacacaaaaccgggtatggctcaagttttattcactggttctcaatcatgaaaccggataaagagagttctataattatcaaaaccaatctaaagtagtattgtggatggtcttggctaacgacctaatgtggcatcatagtcgaaaaaaaacacattcggacccgcatataagtggtcacctcaccttctgtttctatcttcccctctttctcttcatcctcttattcgaggcatttaactactcttcatctcgaggcatttgaacaaacatcccttcatatatattttataatcatttaaaaaaacaagaacaaatcatcaacatgtaaaatttaaataagtttatatatttaattcttcaaaatcttaatgataaatttcaagttgacaaataataactccataaaaaaataatctatataaacacatgatagcctagactcacgagccacctcggccttggctcgtttggcttacaagccaagcaaaccaagctcgagccaagcctgagctttttttccacccggggggggggggggtggggttgaaatagaatggggttatggatgtggatatggaactgatgtcaatttggatattgccaatgtgaatgaatgtgtgtatgttgacgaatggacgtggaattgaatagagtttggatgaataatgatgtggctgtatgttcatgaagtggctgtatattggcgaatggatgcgaatttctgttattgtgtgatttgtatgtgaaattggtaggtcctaccatttttatttggttttcctgccaagatataggtaccggtttttttacaaaccgacacctataatctttgccacgtgtcctagctgcctagtcaacaaccggcatcttatatgcttctataggtgccggtagtatttaagaaccgacatatataagatcatccatgtggcaatcgatttaagaatcggcacctatacttctatataggtgtgtcatgggtgtcggttatagatccgacatcgatgatcgaggtcaaacgtaccgccaactaggtgtcggttgggatatccggcacctatgaccggttcccaactgacaccgaagtggttttctgtagtagtgaagcttcatatgctaatgtatcacatatcacaaatatgacaacttcaattttctggtaactttgagtattgaggaattgatatactctcatatttgatctagatctaattaaagctgtgccaaatctttgtgtttttcatatcggcgatcactgaatttgtttatctatagtacctcccattgacccataggtgaacatgtttcctaaaaaaaattactagattcatgcgccctacaattgttcttttaagatctcatataccagcatatatatgcatgcatcactattcgtattttctctttgttttctcgcagaaaaagaaatattttcttagctattgaaaatatgacaatgagatcttaagtcactttagtacatgatgaaaaataatatcatgtttgcttaccatccatggttcttccatttcgtccgcggttcttcgaaataggagaatcttaattggtatcatgtcatttatattcatagcaatacaatacaaaccttgaagaatgttgattcttttaggtaacttgcatgggaaaatatgtggtggaatccacatgtgtagtggaaacttagaaactagcgttagatcaaatgggtggtgtggcataaatggtatatttgaggccacatcaagattcttcataccatttggaccacacgtgtatttgaggccatacggccatactatttaaactttattcatatagactatacataaatactacgtgcatataaactttatacatagaaatttcacacgcataaacttcatacatataaactttgagcatataaatttaaaacgaattaaaaacaacaacttaaaaagcaaaacaaaacgtatgtgtggatcgcgtgcgtactctctcctccttgaactcggtctgctttaagaaaagaaaagtagataggctaagcctaaaacgaaaataactgtaggcccaagaacagaaatttggctgatagcggtgcgcgagctgtcgcgtcgcgcacattagtcttctcgagattgtagatgcatccaattaaccctggttgaaactgttgcttttagtggcagtggagtcgagtcccacgcggcttttcttcaccatccagatctcatgaggaggtccactgctctcatggcggcggcggcggcgcagctcctgctggctgctgctgctgtcgctggcggcgtatgcgtatatgtcggtcatatcgcacagggagacggagacccggcggatgttcgtggagtggaaggccaagtacgacaaggcctacgcctccatcgccgaggaggagtgccggtacgcggtgttcagggagacccgccgcgccgtcgaccagcacaacgccgggttccactcgtaccgcgtcggcctcaacatgtccgccgacctcaccgacgacgatgcccccccccccccccccggggtgcgtactgggagagaaagaagctgagctgatccaacaaggacttgctcgactccatccactgtaggacatcgagcggttttgcaggtaaaacatgctgctttttatttactagtccgttttttatttattatttctttgattaaagaagatgttcattggatacatacaattagcaagtaacaatgtttgtatcaagacatcaagtggggaagatttgtttgactagtatagctgcatgaaaaatgcaggtaagcatgaaccattcaaactgtaattaaggtgttgttgttgctgcttactcctccctcctaaaatataagcatttttagcacagtgataagtcaaacatttttcaactttgactattaatagctataaaataaaaaatcaatcatgtaaaattaatgctactagatttatcattaaacaaactatcataatatgtaactctttttatttaaaactttttacttttattgatattgttagttaaagtagtgtctcggagaccgtgtcagagttcaaaaatagttatattttagaacggatgaagaagtatatattcacccaaagattcacatcgccacatgttcttttagctcacagccatggagggcagaaaagctgctgtgttgcttgatcatttagcttgtgttagcacttggcaatcctacttctgtgggttaacagttaactctctctctctctctctcgtttcatgaatttttcttggccggggcctccaggttcatgaatagtctcacagaaactgaatcatcagttcattaatctaatgtgttcttccgcgcgcggacaaacagggagtgattttaagtcttttggtttggtggatatatacttgatccagtgtttcatgtgaatatgtgattaaggcttaatacgttcataagttattgtttccagtgcattaaagatgaagtgagaggtcactgtaaatctgtaattgagttactgattgattggtaatttttttttcttgcaggagtatgctggcaatgtgataccaagatgccttctgtgcgggttttatgttcaagtacgttctcctgctggatctcctcgaaattcacctagcaaaatgtcaagacatacaagtgcaggggatcaggtcccaagggcagatatgcatatgctactgtaatatttgcgcaaaatcagaagggatcagtgatatctcacaattcttcaataaatatggcaatagttattgtcaccgatccgattgatttgtactagttcgatcatagttctgttgctacaatattgtgatcctgttatttcggtctcgagggctgcgtatatatggccggacgatctccgatgggctgcttagttgggcgcttgggcttcagctgcgcatggccgcatgtcatggcaaggcagcatgcctatcgggcccgtgatctcgagagtttcaaggatgccatcaaatctctatctctatctctgtcttctcttctcttctctactctctatctctactacttcctccgtacttcctccatttcatattataagactttcttgcattgcccacattcatatatatgctaatgaatctagacatatatgtgtgcatagattcattaacatctatatgaatatggggaatgctagaaagtcttataacgtgacacggagatagcacttaaaaaaaagaggtgtttctgacgtctgtgcaaaaaaaccgggcgaaaaaactgggaaaggaatccgattccatgtaaaaaaaggacgaaaaaaacgaacctgtccgattccaaaaaaagaagaaatcgggcaaaaaaaaaaaccgggcgaaaaaaatcaagtgaaaaagccccggaaaaaaaaagaatccgattccgtggacgcggtaaaaaaggggtgaaaaaaattaaaaaactaaactgtccgattcaaaaaacaggaattatatgtgacgtggtaaaaaaaaccgaatcctattatatgtgacacggtactatatatctctatctctatctctactacttaaaaatttgaaaacatttccgtcgtccgtaataacaaaaaaatggcgaaaaaagcgttaaaacaaaaaaaaagaaagtccgattcaatttacttccgtcatccatgaaaatcttatcttatcttactctcaatctttccgaggggaccgagcggcgccctccgtccccgcccgcgcgatgaaacgccagccaaagcaaaaaaaaaagggaaattgagcaaagagataaactagattgaagttcccaaaattaaaagaggataaacgatattgaaactcctgtaactcgaaaagagggaataaaatagattgaaatttctctacaaaattccgcaaattcgaagaaccctaattttcaggtaagaaccctaagagtcaagatccaaatcaattaagctaagggttcgggttacttaccggacttgaagcccctaagctcaccggagctttccaggaagcggcaccaccgcatcttcacctcctcgcagtcgcgtcggattccccgtgcgcgctgtcctggagcacccctccaccgtcccttgccgaagacgggaagggtcgcaccacccgccaacgaggtccaggccgcttggcgctcgtcgccgtttgtgcgcccgcctagccagaccaccgacgccgtggcacggctttgcgctgcccttgggtgcgccccccagccggcgaagcaggagccgctcggcggttgtcaccgcatgcacacaccagctcgctggaccaccgttgttccgctcgctcgttgccggaaagaaatgggatcgggagagagggatttgggagctagggttttatccctctctcctagtcggcgcttcatctagcgcggggaatcggagccgtccatttgatccgacggctcagatttgcccagcgtcaggcctccaccgccgcggaaagtgcatcagaccgtccccacatatgtgagccacgctcagatgctcggcttgcgggccgttgaattgcctcggctcgccgaagtgggccagcccaagtttgggccggcttgggaagacttgggccgaaagcaaatttgatcaaacaatgtggctcagattttttaaattaaagtccgttggataaactcctaagtaggctcgaaaattaaatctaaaactaaatcttaaatcctatgctaattcatcaaattagactcggttctacctatttgttaatatatcaaattagacttgattttttaccgatttgaggttttcaaggtgtcacactatcaaacggtgtttttcctgttgcaacgcatgggcactattgctagtcaaaattaaaatcaaatatttcattttatttcatttttgttttggcagtggcagcaggccgtttttttgtctgacacgtgggttctatcgtattgtttttcctaactttaagtgctacgtcagcttcatgtcatgcaaaaccggccttaatattgtcctaggactttatgtacaccgcttttggaagttgatatatatataacctgcacaagatagtgcgacgtttctattgatgtagcaggaaaaaatacaagtctatagtcctgggagactatagttaggaaaaagaaaagacagccacatcacgcgtctacgtctgatcctattgctaaaacagaacaagcacacaatacccctaaggaatggatattctaaatgatgcctccaaggaggcgaacgacaccaagagcgccgccgacgcctgtcctagaaccaagactcggttttcacctaaataacccattgggagaggagagaacaaagcaacgccctaaggggaaagcggcgcccgtaggtgtcgccattgccggcccgaaggctaggtgtcacgcccagaaatttagcccaaatttccagactattttgtgtattaaatccctgtccaggaccagccagggtacacaaaacgacaagtaatatacagttccaaacgtaaataaagcgtaaaatacttacaaaagaggcacttagtcctcgcaccgaaacgaaaacagcagcagcggaaaaaggcgatcctagcggggcttcagctccactccacaggcaaaactcaactggggtctgagccttggtcctctaacttcgtcttcagctcagaagcactacacttctgaaaagggggaataatagcaagactgagtacaaccaccgtactcagcaagccacaccaacgatgcagacgtgcaaggggaacacaaggacggtttgtggctatttgcataaaggcggttgtaaaacattttattgagcaaaacagtaaaactgttgagtaattaaagtaacattaaatctccactgatcaacgctacaccacgttgaacaggcccaaccaacccacctaaactacagtgtattaggtcaaattattaaggtgggactaatcacggtgaatctggtcgaccgcccataaccgcgggcacggctattcgaatagttttactctgatcagaggtgtacaactgtacccacaagacacagccccacgacacgtttccgtgcgccgacatgccaccacgacataccggaaagaggccgtgacaggacccttcgcataaccccctctagccaagcacaccacacctcaggtttcacccccgtccccagggggcgacgggcagtcccctctcgtgcctaggtgaatccggaagcgacagaggccgtcgcagggcccgccccgctccatcacgcccacccttgcctggatgcgtcgactagaggaaagatacactacaagtccagccgttgcccacgctggcttgtggtaagtacgataagttcttccagggcatcccgcgaaccggtccttaactgccatgggtgcgactagcaaaaccatgcacccacagcccaccattcagttgcattttagttggataattacgaccatgaagcatggccagatgtctcgagcacgcagctcaacaagatactagaaaggtctaaaactgtaattatcccatcaactgagctagtggtaattaagcatggctaagcatatagttctagctaggtcacataagtaacatgagctagtcggttcattacccaaggttgccaaagaatagatatcaagtaaacatggcacaagcgagcagataggtaatacccagatcccatgtaattagcaaaacatgcatatttatttgtaaacggtaaaacatttataaattgggatcaacatgctcaaggggaatgtgtgacttgccttgcttcttcactttgatcttccgaactcttttcctcgcgaccgcggacttccgaaacgacgggaactacgcgctggcacgcaaaacgaggaaaaactctaataaaaaccaaggaaacagtacataaaaactaaacaaacatgtagagctcaattttagatgaattttgcaagttgaacggctcaattcggagttcgaatgaattagatatgaattttagaagttttgagccatttaaatgaatttctagaattattaatgatttattgcgcaattattatttatttttacaaaggaaaaggacctcgctgacgtcagcaaggggcggccggcgccgacacgcgggccccgcacgtcagcggcacaaaggggcggcgcatggtggaccaagtccacacgtggcctcgggtgcgcgtccaccacatggacggcccagatcggcccgaagccgatcggacggccacgaggcggcgcggctagggcacgggcacggcacaaggccggcctggctgagccatggcgcggcggcggcgcacgagagaaagcggcgacgcggcgcggcaaagggggggggtccgggcggcccaggcgagcggagcggcggcaagccggccggccgacctaacagtggcggcgcacggcccggtggtcgcaggcggcggccaccggcgcggcagcgcgcacgggagacagaggagggaggcatggtgggagaggaggagctcaccaaggacgcggcgacgagggatggggaaaggcggggaagctcggcgtcggcgctcctcggggcgaaggcggaacggcggcccggcggcgttccgcgagcgagaaccggcggacggcggccggagggaccggcgcgaggggaaccgtgttccggcgggatcccggccgtgaaaagcggcggccgaggtgctcctcggcgctgcgaagcgagcggcggcgacggcgcgaattggggtgattaggagcggcgccaagcggcggctggaagtggtaaaggcggtggagagaggtggtgcgcgtggcgacggtgcctcggaagcggggaggggaaaaggagcggatgccggggtagagcttggcatggcgttgccgacgacgcaaacggcgaggtgcggcgacgactaacgcggcagcagcggccggctgaaggcggcggcagcggggaagagaggtggtgctcgaggcggcagtgttccagaggcggagaggggaaatggagtggaggccgggctgcggcacggcgccgcgaagccgacagaggtggcggattggcacggcggtgggtggagcggctgaatcgccggccggagctcgccggaaagcgccggtgcgcgggagcagcgtggggagggcggtagggtggcgcggggagctcgggaaaacggggaaaaaggaagaggagtccacggggattgattttataggttcatggggcgaggagacgtccggggaatggcggattttgagagcaagtgggacggcgttgtgggggagatagagacgcgggaggcggcgacgtggccggattttgcggggagagtggggggaaacggcgcggacgtgggcggcgaggtcccaccaataaacgcgcgcgcgcggggtggaggaggtgggcggaaacggcggcgacgttggacggctcgggcggccatggcggttgctggcccgggctggaggttgggggtgaccccgacaggtggggcccacctgtcggcggctcgggggaaaggagagaggaggagacggttggggggggacgatgacaggtggggcctcgggtcccacctgtcggagagagagggagggagaggccggctggggaggcaaagcagacttgagggagagagagagagccgagcggcgagctgggccgagggagagagagagcccgagaggggaaaggggaggaatttgggccgagcccgaaagcaaggaaggggaaaattattttcttttctttttatttaaattagtttaatgaactttgtgactttaaaactatttctcgagctccgaaaattcacggaaaattccggagagtacattagggcacaaagaatattacaaaatattcccggccaatgatttttaagggaaaattttaattctcccattaattcacttgattaagttgatttaacttttatttaatttctagaaaatgcattatttaatgatttttaatcccgaacgaaaatcggggcgttacactaggctttcgcccatagttcctacacccccgcactgaagagtgcatgtcagattcaacagagccaccagctaatccccttcaacgcgcagccaccgcgccgacgcctcgccgccggccgaccatcaaagtagagtctcaacctccgacgcgcttcaaatccatccacgtagttaggttggagaaagagagagatggtgatcagagagaagaatggatcccctctcccccgcactagcccgtccaacgtggtcatcttccagcggtaagccaccgctgcaagaggacaattgcctggaaagaagttcgtcgcaggcttcgacgcctccctcatggcgctaccgccgtcgccgcctcgaccatgttgcccgtgttcccgcaatgggtcacctagtcgcatcgccgtcgcctccatcctcccaccacgatagccttgctgccgctgcgcaccacccatgccgtgcttgcaccacggcaccatccgcgccgaccttccacggcccctgtcagtcttccaccgccacctcgctgcaccggaggcccccagagcctccgggcacgcctctaatcaccaccgtgcccgcctactaccaccatccgctgctcccagtcggctcctctccatccccgccgccgtctccgcttgcctcccaccgacggcgacgcgggtgtgcgcccaccgtcgacgtcgtcgtcatcgcgcccttctacctccagacgtcgcccccgccacctccacgctgccgcgtctcgctgccgccggctcgagggttggctccccgtgcgacgctcggggaggccgcccttacacctcggacgtccgccgcctccacgccgccacgccctgacaccgttgtctcgaggggatccgggcggaaggcggccggatttgggccatcccaccaccttcacgtccacaccgccaccgaagcccacgtcgccacctccacgcagcctcgccaccgccaccaccggatttggacgggagggtgccggatctggccggcggcgccgcctcgccgtcgtggcgtctcccgtacggtcggagtcgtgggcgtgaactacgcgacctagagggaagaaaagaaggccccaccaccgccgtccttgcggccgcgtggtttccgacggtccgctagggcggcgaagaggcagaggggggagggaggcgtaggggtggacgaaaagctcgtgactcgttagctcgctcgactcgtgatcaagctcgttgtatttttctaacgagccgagctggtattttaactcgttagagataacgagccagcagctcgcgagccaaactgagccaagaagacatcagtcttccagtccaaaatggccatccttctggcccaattaggcccaactatgccatgctacaacggtgcgttcacatgatgtggccatatggggccactggccagcctcacgctcgtagatggggataaaccagtacacgatgacctgaaaagaaagaaaagaaaataaaaaagaatctgagaggagcgaggagcctctctaccgctgattttgccggcctgccgctcgcccgatctgctagtcgcgggcgtcccctgctgccgaagctacgggatgcgatgaccttcagtctgaggctatgggaactggtggcgtcaggctcatgccgccggattcgattgtctcctagaagcacacgaagccatggcggtgagtggaacccagtggccgaagatgcagataaaggtctggcgggaggcagtccccgagaccttcctcgagctctgtccaaccaatcttcgttggacagcgtatctcgctctcaccaccaccatctctcgttggcgccgccgcaaggggtcacgggctcgccacgccaccgccggagcccatcgatgtccggccgctcgtagcagcagtgcaacaccagcaccagaccaacacatgttcttcctagccttctccaagtcgaatcgatcccaactccagcgcctgacaacgccgtcgtgccgccagccacctcctgcattgcttggctcgcgagccaaacgagctagctcgagcttcaaaacgagccgagccgagctagcagtttagctcgttaggataacgagccgagccagctcgttatcctagcgagccaggccgagccgagctagcttgatatccatccctagggaggcggttgtagtggagcggcggctaagggcacctcccgtgtcgtccctgccctaggggcgacgcgggggcaaggatgcaaatacaagaagtagacgtgttatatttgatattgcgttttaaggatataatccaaactcaacgatatctaaagtaatcttatatcgcttttgctattatgcagtcgcctgcaaattagcaatcgatcagtcgatcacgctggccgttgattctgcttcaatatttgtgcgtgttatcgggctagtggggaggctcttttggatatgggccacgcttcctaggccttctttttaattaaaaaaaactaaaaaaattgtgtccgccgcgtgcaccatcgaacagatatgccgatgacttttccccaccaccgctgccccgactcaatctcagaaattactgcggagaaggcaatccatcacctccctctcccgtctccctggtggcgcgattttgtccatcggcggccacgagcggcggcgtcaccttcctctcccatctcgtcgagcggcggcatgaggtcagcgcgactttttctcaggtatttaggcttcatcagccacccatcctcctcccatttgttcttttgctcttgcgcctctgcttctggaacgagggagtggcacaggaagtggcagccacagacaacaagtgacggggcggggaattgtagttttttttcttcgttttgttcggagggttgaggagatcccatcatgcatctacagggcagagagaaatttttgctagggtttggatgattttggatggttacatgtaccactgggattagcgcatagatgtctgatttgggattagcggaccagtgttcagcaacagttctgctatatcatctgctatgtgtggctatgtacagtagttacttttttcgttttagttattcaggcagtggataaatacttttgtctatccttttgaccatgcttgtggtcattgctcagttctgcccattctgaaatattttgaaacttgcacattactgggagtaaaagtgtagatgttgtagcagcagttcgattaatggcagcatgtatgttccttgtttgtcggtgcttgatttgtacccctatcacctgaacaattttgcatcactggtgatggcagtcagttctgacagacctcacaagcaacaaagcattagcgactatagttcatgaactgggggtgcatttagcgcatcattatttctgcaatcaaccaatagtgcaatgtgaaaatgttcctaagaatgcttagatttttgtagatagaagcatgctttgcatttgcttgatttgtattaccgttatgtagttttcagttgcacaacgcattacttgtaccccctttcagttattgcagttgccattttgaaatcatatgcaactttagttataaatttatgcaaacttagctataattttgtgcaactattgattttcagttataaacttagttaaaaattgaaaacataagtcgtgctgcctgttttgtttgtacagtacttagcgtggtagtgataattaaagctagattgctttttcacttatgaaccattagtagatataattgttgttcttctctaacggacaatattatctactgtttttgattgcatgactaaatattttcggtagatccatatacatatctggggtaatataatttataactaaactatccaccccttgtacacaaattgcatccctcggttattgtagtttccatttttaaatcatatgcaactttagttataaatttacgcaaacttagatataattttgtgcaactattgattttcagttacaaacttagttaaaaatcgaaaacttagcgtcatgctgcctgttctgtttctggactacttgtgcgctagtgataagtaaagctagactgctttttttttactaatgaactgttaacagatgtaactgttgttcttctctaatggacaatattatctactgcttttgattgtacgaataaatattttcggtagatccatatacatatctggggtaatataatttataactgaactatttaccccttgtatgcaaattgcaccctcttggttattgtagttgccattttgaaattgtatgcaactttagttacaaatttatgcaaacttagctataaatttgtacaacttttgattttagagttacaaacttgttaaaaatcgaaaacatggcgtcctactacatgttctgttttctagactatgagtgtgctaggcataagtaaggatagactgctttttttacttaccaactgttagcagatataaccgtttgtcttctctaatgggcaatattttgtcaacttcttttgattacagtactaaattttttttggtagggttttttcttacccgtgcgtgggatttcagtagctctttaatgttagtttgatctgattttttctgggactagggactgtgagtgcctttgtgaattttttttgggataaatctgagatttatatgcttggatgcatttgggtggcaggttccaaattagaggagaggtcagaggcaacagggataccaatgttttggttgacaatttttgcttttgtgtccattactacatgcatgcgataagggtgtctcttttctacagatgatgaaaaaaaagtatatgcagttggaaccatagctatcgaattttggattacaaatgtgaatttagctctcatatgcttttgcttgttcttttctgttaggtgcagtatacgaattcatcaatgtgcaagcaagcaagagaagaatttttttcagcagcttgctcttgtggcgaagcagaacttgtttttgctagaggtggtgcaacatatgagttctaatttttaggcggcattgtcctgatacttcacatgattttcatgcgttcactcttttttgtgtgtgacactgatggtgttctttagctgcatctgtgtaaaattaatgcctgaaatctcagtctagattataacctttttttcaagccatatatctgctgcatacagtatacaacattttttgggctgatgtcagatgcaagggcccaaatattagtccaaactattaggcaaaaccaaaagcccaaagcgatcaaattaggggcttgtcatgggcccccgaaagtggtttcataaatagcgcaatgggctgcttcatcctattttgttttttcgcacaaagctctttttttttctcgggttagtattgccgtaagatgcaaatctaatgacgcatgggatcaactgatcaaatccgaaattgcaatcgattgcagaataggtgcccccatcttatattcctcgttgaccttgtcttagctattttgtgcctcctgttttgcttgttcaattcatgggcctatcctcttgtaccgacttttttatgcgcccatgcatgtagacgggaatatagctgattaggcggcgctaactgtactcatgataagactagatctactaatcgatcatttcggaactgaacagggccatgcatacaagatgcaggtaatcaaacattcaaactctgaggtgttgctgctgcttatatattcacccaaagattgacatagctacacattcttttgctcacaaccatggatggcagaaaagctgctgtttgcttgatcattgtgcttgtgttaacacttggcaatcctacttctgcaggttaactctctctctctctctctctctctctctctctctccagtttcatgaatagtcatcacagaaactaaatcatcagttcactaatttccataacgtgttcttcgaaacaaacaagaagtgtttttaagtcattatttgtctggtagatatatactacttcatacttgacccaccaatgtttcatgtgaatttgtgattaagttattgtttccagtgtattaaagataaagtgagaggtcaccgtaattgagttgctcattaatgggtaaaattttcttgcaggagtgtgctggcaatctaataccaagatgcctttctgtgcgggttttatgtgcaagatctcctgctggatctcctcgaaattcaccaagcaaaatgtcaagagttacaggtgcaggggatcgggtcccaagggcagatgctactgtaatatttgcgacaaaaattactgattcagatagattttaaccatttatcagatcgaagggatcagtgatattttttttgcgttttttttctgcgggggttagtgatatctaattcttcaattattattagttagtctcattgggtaatttgttctggttattagctcatagttgtttggagttgtatttgttaatttggcaataattttgaagggggacatatccggtaaaaaccatcaaataagtgaaaacccgtaaaaaccatttctaaaagttttataaattcatgaaaaaattactagagataggtataggcatgaaatatattcataccaaatcttaagttaaaactcaacttcatttgagagaaatctcttaaatgaagttgagtttggacttaaatttagtatgaatatatttcatgcctaattttttcatgaatttacaaaacttttagatatggttttcacttatttgatggttttcactggatattccccagatggatctgtgctacaatgttatatgatcatattatttcgctttagtcggagtacggaacggctgcgtatatttgactggatgatccaagcgcttgagctgcacgcgcatggccacgcatggcatggcaaggcaaacatgcttatcagggcaatatagtacaattattatataattacattgtaacttgtatatagctacaatttaatttgtatgcaaattttaaaaatcctatggtaccacgctattttcgtgaagcgaaagccatgggaccgaatcgatctcctcaccggcgtgtgcactatgattttttttcttcccaacatgcacgaatcttgaagcaaatcgacgcttcaaaaccatgtgaaagccacattattaattatatgcgagttacaatataattacactacaattatagtttatttacatttgataaatttttgagagaatttactgagaaatatataggaaaattgttttaaaaaaaattaaacccctactacctccggccaaagaggttgtctaaattcgtaaaactaaaatatgtctagattcgtaaaactaaaatatgcatgtctcatctagtatccggtagcaacatcttagtaagacggatgaagtacatgatactgcacataccaaacatcggcaatagcaatacttatgatacctagaagaaccatgataatgggcgacagagataatatgtttgttttccattgtaccaggtgtaatctgttattttcattttcttttggaaaaagtacgaattaccatcttcccgaactattgcggtcagccgaattaccctcctgaatcacaaaaccggacatctttcacccccaactttgcaaactggataattaaccctccggctcaatccgcggtggttttgatcctacgtggcagtccaatcagcaattcttttataaaaaagtaggtggaccccacttgtcagtttctccctctcttctatctctcccaatctctcattctctctcctctccatcacgggcgacggcggaggcagcagcggggtctctcctctccatcacgggcgacggcggaggcagcagcggggcgaggtgagtgcggc

SEQ ID NO: 21388 - DNA, 1613 bp, Oryza sativa
ggttaggtgcgacccgcgagcgttcctcctgcggtagtgcgctggtggcgtccggcgcatccgtgcgggcgcggtgctgccaccagctgcctcgcctccttcgtcatcgcgctccccttgccgccgctcgcgcccccccccctgtgccgccctgcctcgccgcccagccactgcttgcgcccaccccctgcgccgccctgccttgctgctgctgctgcctcgtctcctccgccgccgcgctattgagccggagggggggtatttgtccggtttgcaaagttggaggtgaattcggttttgtggttcaggagggtaattcggtcgaccgcgatagttcggtgcggtaattcgtacgttttccttttcttttttgtggagggtgttgcttttaacagtctcccatcagcttcgtcaacctcttgtctctcgtcgaagagaggttttcttttttttttctttttattatataaacaactcaacaacctggtactgaatggcacaataacacaagttgtttacatatatgcgacttaattaacaagaaacacattgcgcaatcatgcattcctctcgcgggacaaatgcaaacataaattatcaatagcgtgcaaaaaatgaaggacagcaaaactgcaaaattaacagatcgagaagcacaataatgtacttccggtttataggacttccactacgcataagttataaaaatttcttagagtggtaatatatgccgcgatgtaattcatttgctaaatcaacctacgtaatatagctgcatccatgtagtaccctacacaatttacagctagttttttcttcctatatatagatcgaataacatttaattcgtctaaatgtttttagactgaaaaaattcattatatttttttaaaaaatagaattatttaaatatgatcaataaagcgataggtgttcaccgatccgcgacaaattaaggctacggcattatgaaattaaatgctatcaatggcaccgtggggtctccaaggagcaccccgatgacgacacgcatcaacatcacaagcacctcgcacacgcgcctcaccagcttactcttactgctcccgccgccgccgccgccgccgccggcgcgctcttgtagccgggcgatcacacgattcacacggtcggcgccctcgccgtcagcgtcggcgccgccgcggcaggagccagcagccatgatctcatgatgatgcattttactgcagccctcgccgttgttgccgccgccgccgccgccgtggcccaagccagccatgatctccttgatgcacttgacgtgcaggtacatgcgttggtcagtgttcttggagctcgaaggtggtggcgccgccctcctgcagcgtgatggacagcggcatcttggcgcagcccgggtgcaggtccaggccgccggtggagctgtggtagtggaacccgcgcccgcgcacggcgccgtagcaggcgtcacagaggacggcgtcacggccggtgggtgccgcagcgtgggtgccgcgagggcgcagtgcgtgtgtagcacgaggtcgccgaaggtgtaccgcgtgccttcgccgggctccctgcacccgtcgcaaacgaagttggtggcggtg

SEQ ID NO: 21389 - DNA, 37415 bp, Oryza sativa
gtggcggtgtcgccatggcggtgaagaaccagcagcgtgcaccccgaccccgagcgggggtgggcctggtgggggacctcagcgggaagattatcagcagcagcagccatgacagccggccggcttagttttactttgttgtgttctcgagagcgcttctggcacaaaacacacacacacatatatatatatatgcacatatacatatatgtatacatgtacatgtacatgtacagtacatgtacatgtacatgtgtacatgtacatgtatatgtatatgtgtgtgtatatatacccatgttaattcttaaaaaatatataaccatgttggatggcgaaactagctatacgtaggaaaaaaaaaatcaaccatgcatgttagatggcaaagctagttatacataggaaggaacaaagtatccctccgtttcaaaatgtttgacaccgttaactttttagcacatatgtttgaccgttcttcaaattttctctaaaaatatgggtttgttggaaccatgccaccctaattttgcaaaatttgagatatgccacctgtatctcaatgacatgtaggacccatatgagtcaatgacatgtgggtcagggtggcatattacaaattttgcaaaatttatgtggcatggttcaaattttccctaaaaaaatttatgaaatatgtaaaactatatgtgtacatgaaagtatatttaacaatgaatcaaatgataaaaaagaataaataattacttaaattttatgaataagacgaatggtcaaacacgtactaaaaaatcaatggtgtcaaatattttgaaacggagggagtgcttcctccactttttactccctccgtattttaatgtatgacgctgttgactttttaatcaacgtttgaccattcgtcttattcaattttttttatgcaaatataaaaatacttatgtcatgcttaaagcccacctcatgtaaatcaagtcacaataaaataaatgataattacataatttttttgaataagacgaaaggtcaaacgtttgtcaaaaagtcaacggcgtcatacattaaaatacggagggagtaatatatatgatgtcatcggttttttaaaataagtttaaccatattcatcttatttaaaaaatatgttattattatttattttattatgacttaatttattgtcaaatgtcatttaagcatgactttagtttcttatatttgtataaaatttttgaataagatgaataatcaaacgtttataaagtcaacaacgttatatattaaaaaacagatacgataatatccagatagttgatgtcgtactaacagccagcaatccctaacagctgggttagcatttctgtctaagctagtggccaatataaacaaatgttagttcaaccaccagtcacaaaataatatctcaccgttggcactggtacaaaaacgatttttgcaagaggctgctaacctttttacacgggcatttatcaagtctaacgatcgacgcgccacgctagctggaatattagaaaatattataagtgcggcagatggggagagctctcggcgtgtccacgtaggataggaacagtgcgcggggtggcgattttgtgaaaaagtccttcgattttgtgtaattcgatataggtccctagaaaatagtacctatgagacgatattttgcgtagaggtccttataaagtacgaatatttcatgtgaaggaaagaaaaatcacgaattaggactgtgctctaaaaagtggaaaacgaggggctttttcgcaagaagacgccactaaccctaccacccataaccctagccgccgccgcccgttctccctcgtcctcccctctttctctccctctcccgccgccgccgcctccggcttccccgtcgcctcgcgtcgccgtcgccgtcgatcgcccctcaaacccttgctgccgccgccgctcgctccccctcgtcccccactctctccctctcccgccgccgccgtctcgcgccgccacctccgcctcgcgccgccacctccgcctcgcgccgttgtcgccgtcgcctcgcgccgccacagacgtcgccgcctccggcttccccgtcgccgtcgaccgcccccgccaccatcgcgggcccccgaaaccctagccgctgccgcccgctccctctcgtcccaccccctccctcgatgctccttctcccgcgacgacgtctcgaggtcagcgcccaactactactcctcgtcattttggttttggttttggtttgggtggttgatgtgtgggtggtggtggtggtgtgccttgtgtaggtacgtggtgctgagcacggcggtgaactgtttggggaggtcagggggggggtgatcatcttgctggagaagaaggcgttcgtggtggagctgttcgacaagtatgtcaaagacgctcggctccgggatcgacgtgctcgcccccctcgtcgaccacatcgcctacgtccactcgctcaaggaggaggccatccccatccctgaccagtccgccatcaccaaggacaacgtctccatccagatcgacggcgtcctttgcgtcaaggttataactcgctcctcgccttaagccgtttctgctttgctgcatttccaattgctggtggtggtggatttaatgagttgtgttgtgcgcgatcgagcttgcaattttgggcggctcaaactggtgtgctcggtttagtgtcagtagcgtcgcggaggcttgtggattgggttgtggctgtaccctacttttgcttggtggcgtcggggccggcagttgcggcggctttagctctggtcctctggatgactggatgcgtccttgcattttggtggttgcgagctggaattagtaactgctttgttgtttcttcggctaactaggctggtcccttttttctttttcagaggtaactgaaagattggggtgactaaattgtttttcaaaacagtaattggggtgactaaattgtttttcaaaattaaacgctgtccaaattgtttttgttagaatttttggggaaatttcaaattgcatgttctaggtaattcaattaccctgaaacaattttgtggaagcacattgaaattcttttattaataaattgtcattcctggttcttatggtcatccattttgctaaggtagagctataagtgtgtcacagtgtactgcatttgattattgctgctctgtttatttgataactttgcatgattgctgatatgttcctgtttttacttacagtgccagcaatttgcctccctcatcagggccacatctacatgtggagttcatctcccataaaagaggatccacatagtatacctcacacatgaactctgtaataagctgaggtgatctttatatgcttcaccaactggtgaccaatgggctcttttctgagaaaacagcccagtttcctcttaattttgttaattctgcaccttggtgctcgtgaagcaagtgcactaagttcagatggtatgtgacagtccatagttatggttggtatttgtgtggtacattagacaatctgtgctcatttactatgattcttttgatggtttcctacagatgaagcacttcttgccttcaagaaggcagttacaacttctgatgggatattcctcaactggcgtgaacaagatgtgtatccttgcaattggaaggttgttagatgtcacagtcacaccaagagagtaatttatctgtaagaccaaaataaaccctacataaatattgtgaaatacttaaaatttcaacctggcaattatttttttcccttttgaatatggcattttctaatataaaaagttcaccgccatcttcgacattggcagctccaacctctgggtgccatcagccaattgttacttctcagtgagtccctgttcgatgcactgttcaagggaagttctcttaagagtctgccaattgcgacttgtgcagttgtgctaatgatggatttttcctggtgatgattgatgcaggttgtgtgcttcttccactctcactacaagtccgggcagtcaagcacttatcagaagaatggtctgtgtcttaaaactttccccaaccgtgctattatttgtgttgtgagtttgcaacaattatggctatcagtctatactattacatggatgcactgaaatcttccccctgtttttttttttttttttttttgttatttactctacagctggtggcatatcttgtattgtatgttgaaatttaaccttttaaagcaaaattggatttggtcgaaatgatgctagatggtggttatttggatttagttataaggatgctagatggtatgtttggattacagtgcgaatcaaattaggaggttgaagctaagaggtttttattcgagttaatgtttttttttataaaaaaaatctaccaaaaagatatatatttgatttgcatatatgcattgaaaattacacatttgcttggtggttataccgtttgtccttctgatgtatatgatgtatgtttacctgtaggatgttttcctccgttcctctatcatcattccctatgacgaggtatggctgcttcactttctgtgttggtcttgaatgattctgattcctaattattttggaagcttttctcataaaccaaaatggttttctaaacctttccacgagcaaataattgtttgcaatgcccttaagactagatgaatccatttttagcatctatgttgctacatcaattgaacaatcaccacctaccgatgcatttccttaagttaatgaatgaccgattcaaataaaagcgagaactattgaaattcttttaaattgcaaccttgccactgccagtgagtgatagaatcaagatgatcaattactccaaagtgatctttagaacatatgtggctctttgttcaaacttctcctaatttctctgcagtccaggtgatatcttcaataaatgtcaaaatcattaagaacaacccacagttgaataggcaggataaacggttggtgctcccatgtggcgatcgtggattaaagtaggaacaatggtttaattgggttattcacggagaagtgatattcgttggttgtcatggctgcctggaagggaattacaacatttgattttaagctttaatagcttaggtagcgtttgggctcactaaagtgcttcctttttcttatcttttagacttccactatgaattatttaacacccataaaagaactttccttgcatgattttctttattatgaaatcaacatttatattgacaaacctgcttagcttcagttggacaatgatacgctgcagtaaggcatctcattgaaggacattggtggattctgcactgctattctattacttaacttcagtagagaatatatttgcccttttgcttgacttcatatggtgttatatttctcattttagatggacattcgtctaatttatctgtaccgtgatctttttctgaaaatattctctgcaaagagaggtcatctgaagcattgttaaaaaacagtaagtagcaaaaaaaaatcatggtacaggagtcaatggtacgcagtagtgaaaacatagttaggagttgcatgttatgttgatttgctattccaaaacgtgtttgaactgtagcaggatgtttgttcctattaaaactagagcttttagccatgtattaccttttgtagcttccctgctgattacgttcgaagaaaacaaaaataatccttattgaaatatgcacattgtaaaacagtaaggggttcttatactgttttctttaattccacaatacagtaaaaagagtgagatcatatggcaacattctttgtgaaagcaacacatccatatctggatgtagtggttgccataatggagacaaggagctgttgaatgtagtattgcttgatgttaaaagtgggtcacaatttccagtgttggaatctaattcagtacatggcaatgaaatttcattgacctctgaaagtgaggtatcaaacttaaggttggtttctattcattcagggttttgactttcattcttctcatacaagtattttcctagaaaatcatgaaaaagcatggtgttttaaatagtggagtactaacattcctctctcaaaattcgctacaggtatactcccatggtacctcagatacatcatgttctaggtgttgaaactgaaagttgcattcattctggtgattcaaactttctggatcttgaatggctttcagcttcaggcaactcaagcgatgaaaggtgtttacttttgcattgctattgtatttttttagcgtttttgactgacagaatatcatcttctcagtgacagtcaatttgatttacacacattttctttgccttagtgtaggaaaaagtgaaggataattattagttgattatcctgtaaatttcttacccttcatgcttaattccatatcaatctattcagagttcttttgctctcactgcatttccatgtgataaacacaaatctgtagtatcgtgctgtaccacttgatataactatctgtattgagaagtaaaatggaaatattatgttgccacgcttcctaaatccaattaacaagtgtcttatgagcttccattgatactgatttgaaaatatcctccgaaacattttttttaaaactcatttaatgctgatggattgtgcttgaacaggtccattgcaattagtactccagatgtgaacctttcagcggagaatgttattgccacaatgtcttcttttgactggtagatttgtatgatcaaatatagttgtaccatcaccatggacacattactccgatcattatgtaaaactttattttcattttttatatgcattggtgcttcatctttagattgtaatgtgtaagagttttgttctcagtagaatctgtacaacgatgtatgcaaaattactcatcaacagcatcccctgcaaatgtattcgtgggttttttccttacataatcattgattcagcctgaaaacaaatgattagtctacagtaatcaaccaatctatgtgtaggtggcgcgccattggcgcgccccagcatctagtataatatgaagccgagcctactggcgagtcttaaaacaaaaaaaaaaagtacgatgagtgtgtaatagtttcagagaaacttagtaaagaatctatgtagcgtatgatgcgcatatctaacatggcaacaaaagctcagccaacaataattcaggctgtgtttagttcagcacaaagtttggattttcgttgaaattggagatgatgtgactgaaaaattgtgtgtttatgacatgttgatgtgatggaaaaggactgaagtttggatctaaactttagatctaaacaccccctcagccgctcacttgatcgaatgtccatgtggaagcgaataatggcgccacatatcaaaaaccgttgactccacaccaatcaagcctgtcaagctcatgcaccagattgtaatgcacatgtacgaaatcacctatatatatcgaaaaaaaaaacgcgtctgttaattagatggccggaggaatgtcagctgggaaaaatcacatgcccatgcttgtcagactgtgcagtggtgctctttcgcaatcaactatatataaatatttaagcaacaagtcaaattctaaaaaagaaatagtaaaatacacggccggtccttaaagttgagcgcgggtgtcacttaggtccataatcttgtaaattgcacatctaggcccaccatcttgtttaagtgactcattgaggtccaaaagacctctgaccgggttgactggcttacgtggcggtccagcgtggcaacatatttgcattttgccctcctttttgattccccgtgtccgatccaatcccttctttgcgtggcgcatgcaggaacgcgccgacggcaacgtgcgccagcacgcacacctgcggcacccacctgtctcaaccacgctgcgcccgctggcgtgcctcgtacccctctggcagccgctcgccggtgttgcgcagcgcccagagaaaccgcacaccgtcgtcgacgggaaggagaaggagcaggggaaggggaaggcccccgctctagccagccgtgggtgcacgcgacaagtggctgcggcagctgctcaagtcaagcttgccctgccgccccgctgccgccatggagctcgcacccgcccagctcgtgccgaactcgccgacgcctcccccacacacgcggccgcggtaggcgacccctccccccgggcatggccggcgacacctcccccgcgcgcgccaagctcaccgacgcctctagcaccaacgaccagcgggaagggagaccgatggatctggccgtcagtgaggcgtgagcgccaccggcacgctagctacgaagacagtgacggcgctccgcaagctctcctctagttccctccgccgcctgccaactgctgccacattcgcccgtcgctgctccgctcgcaccccgccgccgcgcttgccctccaccgttccgcccgccgcccattcgtcaagaaggatttgaggtccacgacggcgcggcgtcctgatcttcgagctcgtccgccgctcgcttcgtcccctctaatactgcgtcgttggcaatcatgcgtcgcttcgtcgaggtccacgatagcggcgacggaggacgctgatgttggcgaggcgaggccggagaacgtgacaagcgaggcggtgcagccgtggtgtgcgactaggcgccgcaacagctcagccatcggtatgacatggccagcgaaggggctgacgatgaggatgacgtgcggcggcggtgggcgatgtgacgacggaggcagctgagggatttgggggttctttttggtgcccagggctctactgaatgcaatgtagatggtcagcttcggtcaaaccgggtttggaccttaatgagtcacttaaacaaaatggtggacctagatgtgcaatttacaagattatgtacctaagtgacacccgcgcacaactttaaggaccggccgtgtattttactaaaaagaaatattaagcgacaagtgagacgtatattcacaacattcgacggttgcaacggggccaaattctacacggagctttgtattaatttttgggaacttttggagtagttgcctttcgtcgtgggtgctgctggctctcctcgaaattcaccaagcaaaatgtcaagaattacacgtgcagaggatcaggtccaaagggcagatgttactacggtatttgcccactatcagaagggacaagtgatgtatatgttaattctttaataattattagttagccttattagttagcctcatcgagtaatttttggtgatcatagtgccttggagatgtttttgtttgtcattgattaggatgatttaatttgtcgctccaatgttatgtgcccctacggatcaatctctctgtaattgtttttctgaatttgggtgcatctatcagtttatcatatcttcaacctcgatgtcatcaattttgtaatttttgtcgatggccatgatctcttccagtattgatgcacaaattagttgagaacagaaaaatgtttggaatgaatgaacaagcatgaattactaggctccactgtaccagtccaggtcaccaccgattgtcgaaactggatttcggcaataataaaagggggtggctatcaagctggaaaagtgtatgggtttggagacaaaggatttatacaggttcaggccttcttataaagaagtaataccctactcctgtccggggatgaatccgccgagtgtattattgattgtatgatttgggaaaaatcaacatctgcccctagaggcgcccggaccccccttatatatgggaaggagtccggattacaaaagataatctatattcctaacggaatatgaagatacaggtaaaatacagtcgtaaccgactaagtctcagggtgtttccttgatacacaagttaagaaacaaacccgagatacagataagatattctatctacattaagtatccggtacccaatccaaataccgtcgccgtgtagatatgggatacccataatctccacagtagcccccgagtcctttgcagtcgaccatcatagccttctcaaagatagtaatccgagtgcttcaaattattcatgccaaggcctgccgagtagcgaagacgaagactgtaaagggcgaaaagataaagaatatggtgcatcgaatagatgcacctaattaggtgtagcccccaactatgtgattagttaacaaactaaacatatagttgaaagacaaaataataacacaatttgtgcattatatgacaaaagcatacgcgacacctaaataggcatgctagccgactgctttttagccacaataaaagaaatccgagtggtgtacactctaaaaggttcacgaatgaacacacttgacaggcatccgaatataaaaactctaaagattacccaccaagtattataaagattatggtaataaataagtcaaatagcctaggccatgactatttaccatggaaacaggcatataacacgccaaggaaatgactataataaaaacaagtcattcctagttaacccaaacagcttttgtagcctaaaaaagcttgcaaaaacagcataacgcctttctgtcgggcacctttttaatttgcattgcaataattccaaagaattatatgaccgcataaaaaggatttgatcagcattgggcaacactgttgtgcgcataatattgccaaagcaaaatatgcctaagtccctaaggaacacaatgggccacgctgttaaaaatattgggctgaggtactgttcaggcctaggcccattcgtacctccgatacccttaactggaaaatccgatatccaagcgacgcttcgtcttccccgccggaactctcgccattttccccactccttgctacagtgcagaactgcgccggcgaactagggttcaccaatccacccaaatccaccttcgaaaagtacatcaaaatccttcccgtgatccaccgcctcaattcctcacctctcccaagccatccatcaaatcaaatcagcgcattcgggtaaaatcgatggcggaggagaaagaaagctttgaaggccaatgggcgccatccgacgtaacggaagagaacttgaaggagatggtggcgcacggcgttctcccagccaaggagatcattgggtggcggccagcgtgcggtgaggcttttccgacccctgatacacatgagatcgtggtcttctcgcatttcttctacggcggctttgctcttccgacctcaaaatttttccgcgggatcttgaatttctatggaatcagcttgcatcacctaaacccgaattccatagtgcatatcgccaatttcgtccatgtttgtgaagcctttttagggatcaaacctcactttgccctattccgccggatcttcttcctcaagccccaaccaaacaagaacaaaccgtgtgtagtcgggggggcaggattccaactaaggggaactctgagccaaaaatatttctcgatgcccttcaagacttcgaacaaaggatggcatgcaaactggttctatgttcagaatcccgagcctgctcttcccgggtacacttgtcttcctccagtgtaccaagatacttggaactctcttccaatcggagatgaagcagtacaagccttggagttgttggatcgtatgttaaatcttaaagaacaaggattacagggagagcaaatcactcggcacttcatcaaatgccgactggcgccaatcaaggaaagatcccgcacagcattcgagttcgacggcaaacatgatcccaaccgtgaagaaccagactccctggatttcaaaatcatgaaggagaggatgtataaaatcttctcaaatgcaattgtagtcagctactctcaccaactgccagttgtgccatataatgcattcaatccgcctccacaggtatgcatcggaaaccctcaaaccgtgatcagaacataattttatcttcatgctgagttgactaactatggaggcatcttgttcaggaatatgcattgatgaagtcagatccaccagtcactcatcgccggtctcctcgccaacacaccgctcagggaggtggagggccaacgatcagaccagatccgcaacctcagacctccaaattgactggtcaaacaggtcctcgcaagagaaagctggtacttgatgatgatgaaggcgacgatgataaatctggggataagggctcgcctaataaacccccaaagcgtaccatgcccaggaaaaaactggctggccgtgcaatgccaaagatcagaacatcttccaggtatcagacctctcagtatgattccgcttcggaatgttttccgatgaaaataatgctgaatattgaaagaacactctgcaggaaaccatctgatatagatccatctgggaaagaccccgatcctgccatgacagagcaaaatatatccaaggaccccgagccgactgctgaaaaccagccgactgctgaaagccagccgactggcgcccatacttcgggcgataggaccaatccgagtgacctgccgccgactggaaaccagtcggcaacaactgaaacggcaacaactcaagagcccccgactggaaatcagtcggatgcaggtcctgatcaagagatccccgaagtagaagcgcagacgacgacttcgcaaggaccagaggctggtaacgactcgataatcgggtctccaaataaagaacaaagatcacctcacgctcagctaggtacatcttcaggttagttgtcttctcaaacaatggcgatttaaataacctcagtttatccgtctaacgtcttggaaacacatcaggaccatcaggtgatgacggagaggaaatccctcgcataaaggcaaccgacgactctcgtcctcctatcttgatcaaatggtgggacgagaactcacaagccgccggtatagtcataaaccgtcaaaaagaagatgaagaagtgtgccagctgaagaaagcgctcggagaagccactcgtattgtaaatgtaagtcctccgggtgacggccttcggtaactttgttttctttttagcagaacctaaccgtgaaccactatgcagagaatccatcttcgcaatgaggccaaaaccgcaactttagaaaggctggttcctcatttgggaactcttgaagcggttagggaccagctacatgaggccaaggagcacgccaagaagacggagaaggaattaagggaccgaatcgctcagctccaggattcaaactatgagctgagtggttcatcaaaaggtaatccctagatccgtttcatcggtttaaactggcataactgtatcctcaaccatctgaatttcaaacagcgcaagccgccaggatggaacagatggcgaagcaaattgaagccctggagagagacaagacagaactggctgcgcaaagggactcagccttaaaggaagttgaaggtaccgctagcagacaatctgagcttctctctttataatgcaataaatcctcatcataaatgtgttttgtagatcgcaaaataaaatcgcaagcccaatttgacgtcttggttggtaagatcaagaggcttgaaggagcaagggataacgtcgccaatgccgctgcaccaattatccaagccatgttcctcaataatggtggtccgagtgcactcgacgcaaccgaaatatttgacaagctgagtgttgctccggaagtatatttcaagaatatcaagaaagctggaagtatgggagctggcatggccttggcgatgacaaaatccttgtacccgagaattgaagtcgacaccattgatggatttgcagacgggacaagtgaagaagctgcccttgatcttatcagcagtgcgcaaaatgcggctgacaaaattgcgagcgatgttgtagagcaatttcgcaacaacgacctccgccgagtaatgaagactctgatgatgaaaggactgattctgactgagtttgaatgtaatacatggaggctcaatttgtacaatactggtgtatttatgctgtgcttgatgattcttgcgaagtttttgatttcttaaaagtttttgctaagctttgttgagcctaaaacccaaggaagctattaaaaactttcagtcctcgcaaactaagtagaaaaaccaaacaaggcaatgataaaccaagtaagcaaactgaattgataaaaaatcacactccattattatgatgatagcccccgactgacaacttcaaggagaaaacttgatgtttgacagtcaaaatagggaaatacaatgataaagttaagcgtagaaacgacgaagatgttcaatgttccaagaattgtcgacgagagtgccgtcttcgcgcttgagtcgatatgaacctggccgggtaacttcagagataataaatggcccttcccatagaggagataacttgtgccgatctcgtgtggtttgaattttccgtaaaaccaggtcgccgactagaaaggcacgagatcgaacattgcgattatgataacgtcgcaacccttgtaagtaccgagctgactgaatcaaagctgcttcgcggacctcttccagtcggtgcaagtcgtccactcggtcttcttcatagcgttcttctcggaaattacggaagcgcaaagattcgaactcgacttcactcggcaacattgcttctgccccgtagacaaggaaaaaaggtgactggcctgtggcccgactgggcgtagtacgcaaagaccaaagtactgatggtaactgtgacacccatttgccggcatagggtttaagccggtcaaaaactcgagctttaatcccttgaagtatcatgccgttggccctctccacctgtccattgctcattgggtgtgctactgaggcatagcaaatcttgattccaaagtcttcacaaaagtctttgaaaactccgccggtgaattgtgtgccattatcagtgatgatccgattgggtactccgaatctgtgcacaatgttgatgaagaaatcgcgagcattatctgctgtaatcgtgacaacaggcttagcttcgatccacttggaaaatttgtcgatggccacgaagaggtgcgtgtaaccgccgactgcctttttaaacgggccaaccatgtcgagcccccaaaccgcaaacggccaagacagcgggatagtctgcaactcttgagctggtagatgaatttgtcgggcaaaaaattggcaaccttcacatgtgcgcacaattttgtcggcgtcggacactgcagtaggccagaaaaaaccctgccggtaagctttgccaacaatagtgcgcgctgcagcatggtttccgcatatcccagaatgtatgtccttcagcaattgtctcccttcctctaaagatacgcagcgttgcagaattcctgaagggcttttcttgtataactcggcttcatgcataacataaagtttgctccgccttgaaatccgctcggcctcatctttgtcttgagggagttcttgagaagtcaaaaatcgtatgaggggctctcgccagtcggcttcaaccatagctatgtcatgagtgtccgcagcttgagtagcatctttgtgaggtactgtcggcgaataaaggtgctcgacgaaaacatcagatggcgctgcctcgcgcttggatccaaagttcgcaagtctatcggcagcttcattgttgtgtcgaagaacatggctaagctcgagtccatcgaacttatcctccagtttgcgtacctcttgtcgatatgccatcatgttgtcgtcaatgcaggaccactctttcataacttggttgacaaccagctgtgaatcacctcgaacaattagacgctttatccctagggaaattgcaatccgtagcccatgaaggagcgcctcatactcggcgacgttgtgagacgccgaaaaatgtatccaaagcacataacttagtctttctccagtcggggaaattaaaaccaccccagctccagtgcccgaaagtctttttgacccgtcaaaatgcatggtccagtgctctattttctccacgggggtatcctcttggcactcggtccactcggcgacaaaatcagctaacgcttgagacttgattgaagtgcgaggcttgaatgatatgtccaaagacatcaactccaaagcccacttagcaatccgcccatttgcttcgcggttgtgcagtacatcgccgagtggaaacgatgtgaccaccgttaccgggtgaccttgaaagtaatgagacagcttcctggtagtaattaaaataccatataacagcttctgaacctgagggtacctcgttttggagtcggccaggacctcgctgacgaagtagattggtcgctgaactttctggacatgaccttcttcctcacgctcgacaaccaagactgtgctcacgacctgggaggtggctgatacatacagcaacaacggctcctgcgggtgtggtgaagctaagaccggtggcttggtgaggagttgtttgaaatcttcgaaggccttctgtgcttcgggtccccattggaaattatctgttttcttcagtagcttgaagaagggcatcccccgctcgccaagtcttgaaacgaatcggctgagcgccgccatgcatccagtcagcttctgaacatccttctgggtgcttggcggtttcatgttgaggatagcagtaactttctccgggttggcttggatgcccctatgagacaccataaaaccaagcagcttccctgacggtactccgaaggtgcacttttcagggttcaatttcatcctgaaagcacggatgctcgcaaaggtttcttctagatccgagatcaaatcatccttttgtttggtcttgacgactacatcatccacataggcttcaacgttgcggccaatttgtgttgagaagcatctctgaatcatacgttgataagttgctcctgcattttttaatccaaacggcatggtgacgtagcagtatgcaccaaaaggcgtgatgaatgaagtcttcaagcagtcggattccttcagtcggatctgatgataccccgagtagcagtccaaaaaactgagaagctcacagccggcggttgagtcaactacctggtcaatgcgaggcaacccaaaaggatctttgggacaagacttgttgaggtcggtataatcaacacacatgcgccattgccctgttttcttccgaactagaaccgggtttgccagccagtcgggatgaaggacttctttgatgaagcctgctgctaacagcttggttaactcctccttgatcgcgtccttcctgtcttgtgcaaatcggcggagtcgttgtttaataggcttggcgtcttctttgacatgtaaggagtgctcaatcacctctctgggaataccgggcatatccgaaggtttccacgcaaagatatctttattattttgaagaaaggtgatgagcgcgctttcctatttacaatctaactcggcgcctattacagcagttttggtaggatcagaaggatctaagggaatctttttagtctcggcttcggtttctccactttttgaaatcttggcagcgggcacttctccttcgctcaccgtggttgcagccagtcggatttcctctcgggcagacgccatctcgcgggtttgggccatgtcgcaactctccttgtcgcatgtgacagcttgcttgatgtcgctccgtagggttaggactcctcggggaccaggcatcttcatcatcatgtatgtgtagtgcgggacggccatgaacttggctaacgccgggcgtccgagtatggcatggtatgctgtctcgaaatcggcaacttcaaagctgatattctctgtgcggaagttttcccgagtgccaaaagtgaccgggagagtgatctggccgagtggagttgcggataatcctggaattactccatgaaaaggcgcattgcttggttttaactcggagcgagggatctgcatatcatccaaagtcttggcgaagaggatattgagtgcactgccaccatcaatgagggttctgcgaagcttgacattacggaccactgggtctagtaccagggggtaccgccccgggtggaccactcggtcaggatgatccgagcggtcaaacttgattgcaatctctgaccatcgaagatactggggcgtgtcgggctgaacagcattgatctcccgttcagtcaacttctgcttccgtttagactcataagccaaggggccgccgaagatatggttgagctccttgcggtggtcttgaaatccagccggggtgtcgccgtcgtccttcttccttgacgtgctttgttcctcgtcggagttcttccgagcaggcttggtatactgctccgcgaactgcttgtagatgaagcactctttggccacgtggttggagtttggatgatgcgggcattgggagttcatgatcttgtcgaaggtgttgacgcgcgaacgctgtcgagaagagtgagcggcggttgcaacaagttcctcaggcttacgcttgcggtccttatgattgttacttccacctcctcccgtagccggcgtatttttcggcttccaactgggacccgactgcttcgatgcggtgacggcgtcttcggctttggcgtactcgttggctttttcaaacatgagcttgactgttctgggaggtttgcgcccaaatttgccgaccaattcttcgtggcgaatccctttggtgaatgcggcgatgatgacgtcgtcggtgatgtcggagatcttgttacgttgttcagaaaatcgtcggatatattctcgaagggattctccggatttctggataacgttgtaaagatcatattgtgtgccaggacgctcgaaggtgccttggaagttggcgatgaagtggtcgcgtaattcagcccaagatccgatcgtaccacggggcaatccatggagccaagatcgggcggaatctgctaaagccaccggtaaatagttcgccatggccttgttgtctcctcctgctgcgcggattgcgagaccgtagacggtaacccacgattcggggttagtggtgccgtcatacttctctattccagtcggtttgaagccggctggccaatccactcgacgcaggtcgtcggtgaaggctgctactccgtcaaggtcgtcgtcgtggcggtccggtgagtgatggtagcctcgagctgctcggcgctgtatgattgtgtcgcgaagatcgatggggcggcgacgaggtggtgagcgaggccgttccactcggcgctccctatgaaggtcgggaggtgagtgaacagaccgctcgtcgtgacccctgctcctgcggttggatcctgcgccggtgtgctgaggcttggatgacggtagtcatgagatcggaagtggggaactcggctgccagtcggcgtgtggacgctttcggagttaactgggaccgaggccgcaatcatggtcttcgtctggttcaagatgttgacgacgtggtcggatcgattgagctcgttttggttgaggagggtgtcgagaagagtgatcgcggcaaccgcattctgttgaggggtgcggaaaaccggtgtcccttcgacgtcttgttggccgatgagatcacgcgctcggcgccctgcttccaaagctcgctgacgtcgatcctcagcctccttcgcggtccgctcacggtcctgctgctcacgccgtagccgttcttgttcttgtgcttgatgctcctcttccagtcggcgacgttcttcggtctcccggacttggcgttgctcctccgtctcattattggccatgaaaacgccaaagtagagaggggtgtagttgtcatctaggcttccgtcgaagtcgtcgtagtcgtcgaagtcgttgtagcgagagctaaattcgtcgtactccacgatgtcagtaggacgtgagtcgacggtgggagagctgttgtagtcatctagctgatccgtcgaaaccgtgccgagtggttggaggatgacgccgacttccctgaagctaggcgaaatcggtgttgaagccgacttctgcctaggcctacgggatgaagacgctgtcgtggtgaagacggccgctaaatcgtcggggagcttcatcaggactggtgggtaagtcccatcatcttgatctggtgtcgtcggagaagatgcgatctcggccgagtggtttgaagccgactcggttgagatggtcttgaagtagctttcagccgcgttcgggaatccaaacgggaccgaaagccggttctctcccgactggtctgattccgagtcaaggagagaaatcttgccgaagttgttggtgacgaagtcgaggctgccgaaccgaaacgtctgcccgggtgggaagacgaggtcgtcgatgccggagaaaggacccattgcactgatcggcgaaaagcttgacgctacccctacctggcgcgccaactgtcgaaactggatttcggcaataataaaagggggtggctatcaagctggaaaagtgtatgggtttggagacaaaggatttatacaggttcaggccttcttataaagaagtaataccctactcctgtccggggatgaatccgccgagtgtattattgattgtatgatttgggaaaaatcaacatctgcccctagaggcgcccggaccccccttatatatgggaaggagtccggattacaaaagataatctatattcctaacggaatatgaagatacaggtaaaatacagtcgtaaccgactaagtctcagggtgtttccttgatacacaagttaagaaacaaacccgagatacagataagatattctatctacattaagtatccggtacccaatccaaataccgtcgccgtgtagatatgggatacccataatctccacaccgatgcacccataccatcacctcttacgagtttagctctcgtagaaattaggggtcagtgatgactgatctcatctctgacgggtgaaggcccgtcgatggtgactgtatagaacttgtcacagatgactcaatctcgatcgtctcataagttgtggcccatcagtgatgagtgtaacccaacaaaaagataaaagaataagagtgaagaataacttgtgacccatcacaattacaggtgtgaaaaacccagttaaaaaaataaaaactaaaatgatgctcggttgcaacaggaagcaaaatgtgtattaacagtaatatatctatggttattaacccaaaacattttacttcagactaactctttctacaagaaacaaatgacccgactcttcttctataatcagccatctgcctctccaaaccccagcagcacaaatcagtgggcttcaaaaagaacacaactcaatcagaaaattggcatcaaaacttgcaagatccaaaacatgacacaaacacaaaaaaaatacttgcaaaatccttgttgcctcgatgacttgagactccgaagaacgacatgacaatcctgaggagaccggagaagaggcagaggccgcggtggtgcacactctaggatggaccttggggtaaaggcagagaggcggtgatggcaacgggattatgggattcccgatcttccttcaggtgaagataactatcgatttggtggaaacttgacacacacgatccaacttccgatcaacatgatccaaaccctacaatcgtagtagcacgtcttctctgattatcagccatgctaaaaccgattgaccttgccgagaaggctaatccctgcgtgtgaatcaaagaacacaagtaagaacaagaaaaacaacaacttaattgcaaatgaatgattatttaagaactcgacgttggggtttcacaaaccaatctagcagcgaaactgcgaaggcagaaataatctaagcaaaacacaaccctaactcaatgataactactgaatatataggttctagggtcgaccttagacccctgtacgcctccctattagactccgagacgacacacggcccaatgggcccaaagacggggacatagcacctgatagattctgaatgcctttttgttttgaagattcccattgattcggaaggaattttgacgtgggatcagatccattggaaaggtggtctcgttagctttccatacatatgtagaacgtcgaaatcggagtccaaatacaacctggatgatgaatttagtgtggactgctcctggagcccgaagtggaccttcatcttgtcttgaacgtccatgatgatcttgtccatctcctaacctctctccaagtgctccatggttgtctctatagttcctaatcataattaaatcattaggtagcaatctatcctcaagagcacataaagaagtacttaggaacgagctcacttgtaaatttaattgtcgggcacgagctctagtgattggaccttacaaaacaacatgaggagtagcatgtgtatccaaaggagtgatgccttcatcaggtggccaccgatgatcttggagcggaggatggaggaggaggcggctagagcttaggggcgttcagatccagtggtccccaacctcctggagaccaaatctggtgtctcgtagctcggaggcggtgaagaggcagacaatggctaccatgcaggagagggtggaggaggtggcggccgaagctctagggaatttagatccggtggtctccaacttgttggataccagatctggcgtcccattgtttgttggcagcggagaggcggccgctgacaaccttagggcgaagggtagaggaggcaacagccgaagcttgggaatggacgatatgaggagatgacgacagtaccagccaaagctcagggcagataggcaagcttgccggtgcttgggggtcgacgtgatgaggacgttatggcggtgacggatggagctcaaatgcggagaagcgagctcgctgacactcgaggtcgatgtgacgacggcgacggcgacggtcgtcgcttggggtggaggaagcggcctctggcgctcggggcccgagaggacatgggggccactcagggggtgctcagctggggagggagagctatggttgattggttgctgagataaaaagaagggagagagatgtgtggataaggacttagtggtgtcttcgatttctttcgatgggagagagagaaagagctatgatgggtaaaagaatatacccatatacgaggagtgtcctcacttgtgacggtttatatttttttgtaccttcacaggtaaaagggtcatctatgatgggtctataggtgagcatgtcaaacgtgctatgtgtcgggtgcacatactggcctgccacaactggccccttatgtgtgatgggccacatctagaatgggctccaattgaacccatcacaaatgcgttcacctgtgatgagacactttggcccgttactgataggtcatcatagatggatcaatctggtatagttctctgtcaagaagataaaacagtgcgagacaacataatgttcagaaaatgtatccaacaagtacgtctggcttgaactacttttccctgttttcagtttcttgtttcagaaaggaatgcgatttaattcctagacatgttttcacaatatatatgcacatgagtgattagtcaagaatgacaacggtacagggtactggaacttcaaattaaggaacacaaaacatctttccctgtagaatttaataacgaaataatctcacaacaaccaaacactaccgagctcacacaccctcccagaacaacaaaaacaaaatacaaatccaaaccaataaattaatttccataaataatttgcatcgtgagtatttatgcaatacattcgttcaaaaaaaaagtattaatgaaataggacaagcatgccggaggagtttaattatggcctcacctttggtcagagcttgactgagcttggaggaggcggagccgaagactaagctgatcataaattctttcgataacagaattagatctagacatgtacatgctagctagtataagacgacgatctctttgtttaattttgcgtgtcaatgaatggataattttgctagctgctagtaggaagaaaaatctctgggatttaactagcatatatagggtaaattttgtggaaggacactcaacttttgcatgcgctattcgattcatgattacctttgctgaaatacggtgaactttattttgcgtggttgcctgcaaagtggcagtacaaaatattgaaaccgctagtttatgtctctttgagcaggtattgggagcacccttatatatggatgtgcggcaaggtcatttatttaataaaacatatttaattttctcattaatttttatactaacccaaagattaataataatataattaatttacttatgaggaataacaacccctcccaaaaaagaaaaaggatcactcagtctttgtagatgttgctacttaacccttcaaagattcacgttgcatttcttcaaagattcacgttgcatttcagcatcttcagttttattattctctcgatctatacatagacgtaatcttgcatgcaatgtagttcttcaaagattcacgttgcatttcagcatcttcagttttattattctctcgatctatacatagacgtaatcttgcatgcaatgtagttctttcttccagctgaacagggccaagcatgcctgcatggattctcctatctaattaacttcctctcacactcagtcagtcaaatgctgttacttatcctcgcatgatttacgttgcattacaacctacatcttcttcagttggattattctccctataaatacacatcatcatacagttaaacctcatcactctcttgtgtgacagaggagcttgaaactttaaagccgaggtcttagtattagccgttagctctctcacagccaattaacgagccatgggtgagagaaaagctggaatttgcttggttttggtacttcttctgtcaacacttgcgcaacatgcttatgctggttagttcttcatgctccttgacctcccttctctatccctctccaatgtattgtgttcgagtatcatttcatatgtattatctattattcaattgtatgtagaaactgaaatcttaatttaatttttatttcttatgtgatgactaagcaacggcaaatctaatgccccgagaccccggcccggggcggccgcctgatgtcatcggtagttggtacattaaaattctatataattggaaggcccgaagatagaagttttatagaatatactagctatggtataattaactatgttatgcctatgctagctgtaaaactgttatggattcaccactatgagtaaggattcaccactataagtaaggataaaagagattattataggttctattttccaatgttttgtgtgattaagatcatcaaccaagtgagattattgtaagttcactggctaaattaattttgtagaacaatggtgctggtatgaagtttccgtgtcgccgatctgtgccggtttcacttgcaagttcgactgctggtttttcgccaaagtcaacaaagccaaagtccagtctcacaagtgcttgggaaaaggttacaagatcaaatgtttgtgccaactttgtaagaatgtttagtaccactgaagacaagatattatgttatgttctattgtaattgtaggagttttattaataatttgcagaagtgatcttttagttggttgttgtcacatcctgattttcgtttcaggatttataaattatttaataaattaataatagaatttatattaaatgttcattaatttacaagtgaagttaaatgtggaaaataaaatttcctaaatttaaagcatggatggatttaatttttattaaattctccatggttaattatactctctggaatattctcggatttttcggagctcaattcctaatttttaatcttacaaagagcatttcagtaattacccacatattaaattaatcattaaatggtctaattataattttgttaagtactttgcgtgtccaagtattttcaagatttttcttggaattatttgagcataggaagtatttttaacaattcaaagatcatttcagtgattaatttaattggaaaagtatttaaaatccccttctccttttcgggccgaaataggaaaagttcagcttctgtcctcggcccattctcccttcctttcggctggccttatccctcctccaaagtctgctttgtgtccctttttcaatcgggccaagaagtagaagcccagcaaaaagtctagtttgcctccctgctacagtgtcatcttcaatctccagccggctggagacagagcccgagccagccgcacagtacctgtatagccgcggttttcccctccaaatccggccttttatctcgtgtatttccaaaattagttgaggggaaatactcctcttatcctcctctatctttacccccaagaatcggagcaaaccgttgagtattttatccgaatcgaactcgtttttgagtttatctccaaaaccgagtttttgatttcccggatcgatttcttgcgggaggagtccgatctcttcaatccaaggctataaataggaccccctagtcctcctctttcgtttgccctctttcccgtgatctctcgtgctccgtagcctcgtcgccgcgtcgcgcaagccgccgacgtcgccggtcaacgtgcagccgcgctgcgccgtcgccctagccgtcgccgctgcctcctctcgccgccggcgggtgcgcgtgaccgagggctagcccggccgccccttccccgtcgtcgccggccaccggagcccctccgccgccggtcaaccgagccgccgccgtcgcccctctcgtcgccggccgtcgtcggtcgttgttcggcacttcggtgagcaccatcgggttcgtctcgtcgttctctacgtgtaggtgtcctccaaatccgcagccggtcgccctagctccggcgaggtcgccatccgagccggccgcctttgatgatgtcatcatgacatcatcggtttttctttttcccgtttttctaatagattaaatcttcggaaattcataactaaatcatcgtaactcggttttgagtggttcaagttgctaaattcatctaaaatcatgatctacatgttcgtttactttatatgtattgtttttttggtttttattagtctttttcttcgttttgcgtgttagcttgtcgtttccgtcgttgcgaaggttcgtgagtgcgtcggaagtgatcaagaagattaattgaagaccgattattgcaaggcaagtcacacagatcctaaacacaatcctttgagcatgttgatcctatatttaaattctctatttatttcaactgtgcatttattttcgaatgtcaccgggtggtgtgaacctattcctttgttatggccagtttgcattgattaccctattccttgataccttgggttattataacttgactagttgggctttatatattggttcagctagatattagttatgattgcttagccatgcttagaaacattagcatactattgggataacttatgactcactattatttaaggatggcttaatgatagttcacgatggttaatcgtgattggttaattaattacttgccaactaaaacttgataatggtgggttgtgagcacatggttttgagagtcgtgctcatggcaattaaggaccggttcgcgagctactattgtgagacatttaccgtgccaaccacaagccagcgtgggcaacggctttatcttttgtatagcgtgattcattatagtgcgccagactgagaagtggcgagaagtccacgggggtcgctggggagtccatgccttgtttataagggggtgattatgatccaggaaaggtgcgctgtaatgggttatgttgtgcaaggggtattgtcacaactcctttccgaggtaccgtggtggtattgaggcacatggtgacatgatgtggggttgtgtcttgtgggtacagtggtacacctctggccagagtaaaactattcgaatagccgtgcccgcggttatgggcgggttgagcaatgtttttcgtgattagtctcacacctctcacaataattatggatgttataactggtaacaatttgcttagctcctggtttggagttagatctgtacagccgggtatggttgttcaggatggttgggcctgtgcagcatgggtgtgctgttcagtgttgattaaaatttctgattaattactccactgttttacttctcttaaatgttttgctaaatgctgcttttgcaaatgagcctatattatgccatcctttggtatccttgtgcacttgcatatttgctgtgtggcttgttgagtatgtcatatgctcattcttgcaataatcaatcaaacctcagttgaagataaaggatccagaaggagaagacgtttggcttataccccagttgagctgcctgtgggagtggagctgaagccatcgctagaccgtaaattccgctgctgttttcttttcttttgtaagtgtgtaacgttattattatgatggatttgtatattaaattgtcagtttgtgtacctcggctgattcctggacgaggattttatgcacaaataagttcggaaattactagtgaatttccgggcgtgacagttgtcgatcgttagctagtagtgtcattgaataatttgtgctagtcatatgttcgtaagctagctagatccctaaatttatctctttgaagtacaccgtcgttgttaatttgtttggcattatgattaatttgacttctacctccaatggtgtactgtcacaatgtgcatcttatcaaattattatataatttcgatacatatataatgatatttctcggcgagggcgtttcagcccgagagaaaagaaaatcagagcactgttagtctcctgtgtattccggccggtggctatcatcatatcttattatcttatcttatatagtgaaagcaacaagctttcttacacgagaacacgccacatcatcaaaaacatatcaaccgttgaataaagaatttagataaataatggccattggatcaaaaggttacatatgcattaaaaaaataacaatagcataaacatatgggaatttatagaggtttctagtgcctcctcttatagacacatggtacaaagagagcgggggcaaagataatgaagaaaaaaaaaaccaagaagcttctagtgatttctcatatagcacgacttagctaaatctatagttagctagaccaatagatactttgtaaataaaataactcatctaaaatcttctataaactaatagatcctatacaacaaatagttcttatatggaatcaaaagtcgcgcaacgcatggcttgttatcattggggatattaaagagacgtttcaaagtttctaagatccaaaagtttcaaagacgcattacaaatcgatctatttaatttgtaattatttctgtcatttcagtatcatgatatgcaacctctgtccaggtgatgccatcagaatttgagttgatgatctctttcatcgtatcgatccaatgcagattgattagttgagaatatataggaaatgtcggaatgaacaatcatgaattattagaaaaatgtaaattaaggaaaatatatccaacatgccttaactctcaaattaaggaatgtgactcagtttcaagatttgtgtttcataacatgttccctctgctcaaaaatacatggccatgtgtcattttttttttcaaaattggcttataaaaaaagtaatgaatacttagtttgaaaacatatggtgtgttgtacatatgtcatgaaaagtacacatacaatctcataaaagtttctacggaaattagaaattataaccactagtcgctaacccatgcattacataggctactctttaatattaaaattatattattacattgcatgtgttggttgtgagttgatattgatctgctcatactaaaattagggtccacgttagttacaagttactacttatgaattttgaattctagattttaattaataaatactaaattcagagtataagatggatacgatatgatatttttaattatgaattttattactaaattagagtctgtgctattttcatttgtgtcatttgtttatttaacatgactctcagcatgaactacattcacaataatccgatgcatcaaatcaatttctagctaatgtgagagttcatagaaagttttaattagcataagtgcaaatagattgtattttgttttactgatgaaattacaatcatgaaatatgctatccaaccttcattaatctcttccaattaattcatgtttttatactacaataatattattatttgcagcttactattggaaccctcatatccagagaaaatttagtggtaaagaaaaatgtcaaagcacacctcattaatagaaaagtagtacacatgggtagacaaagaatgtacattgaagagataagatttctaagtttgcgaggtaagctaagctttcttccttgtccatgcccggtttaagttcaagcctttacacgaatgctcgtatttatgactaattattctttcaatatgtagtaggtgacgatatatccatcaatatcgagatatttgtgatgactttgtttattctatgatattctaatccagtcttaagaggtgctcatacatttagaatttgtgtgtgtgtgagtgtgtgtttataagagtatgtgtttgtgcgtgtgtatgagagtcgacgtttgtactgcatgtcagattatttaatttgccaagtgaggatagataaaaggacataaatcaaatttagagtttaagttattttgggacggaaaaaacagatatagcaagtgaaaagcagtttaccaaacaagaaaaaaatatagtttaccaaacggaaacgactatatatatatatagatgatagaaattattagtaccagacatctgacgcaacaagaaaaatgggacgagaaaattactaaatcttgtccactccacacatccatacatgctgtaatgattttcaaaatatttttttcttttgaactacttatccaatctatgatataatcacaccattatatttgttataattaaatctcatattcttacattctgatgaaagaaaagatatgtttcaatcctttaaattaaatgtttcagacgtgatatatagaaatatatttcaaacatgtgtttttattatgtttcataaaataatttaaatgtttcactaactggtgtttcagcatgtataacttaatgtttcaccaatgaccgaagaagtacaggatggtcaggctcctactctctctcctgtcattctattgactccctcaccatgcatgcatgcatacatgtattagtgatcttaaaaatatttttttcttctaaactatttatctgatgaacgattcgatcacaccgttgaattcgtcataattaaatctttaaagatatcccatgattatattctgataaaagaaaaacatatgtttcaaacaataaaaacttattgtttcatacgtaatagcaatatgtttcaccacgtgttctcattttgtttcacaaaatttctatatgtttcataggctgatttttctgtttcatcgtgtataacttaatgttgcatcaacggtcaactgaaacatttgattaggcggtagccgttaattaatcacactcatatcataagttggtcatgatgtggtgcatgcgtacattatattggtgaagttttccggctgaacaggtccatatgcatatgcatgaatattcaactaactcagtcactgccgttatccacccacatttcacgtcccccatcaatcgagcgcctttgatttctcctctctataaatagacatcttatcatcatatctcttcatgatagaacagtttgattcccatatcataggaattagttatcgattctgaagctagctacaagtctcgggtaataattaagcccgatcagagctaatcagccatggttgggagaaaagctgccatttgtttcgtcttgatgcttctgttatcacttgggaattctataccaacacctataggttattctctctcacacacactgttatactcatttttttatcaaagaatctcatgtatattctcattgtgttgaaggatatacatatttaatttgtcgataagaaccaattcatttttcagtacttttaaatgtttctcgatttttaaaccgaaaacttgatttttaaatgtttcttgtgattaattatggcaaatgaaatgagattattaatggtataagttactgatgggttaaattaatttatggcagatacttgtacgcaatctgtttccatattgccgatctgcgtgggtttcacatgcaagtaccactgttgggttttctcgaaattcaccaaaggcaaagccattgatcacaagtgcttgggaaaaggttacaagacaaaatgttactgcttgatttgcaggaaatagtagcactgaagatgagatgttgccggggtcaatgatttgctagagtctttagttaggttattagctagtctggtcgaataattgatttgtgctaatttttttggtaatagggtgattgattatttcaatttcaaataataatatattatcttgctatgggaactctctataaagtgttgtgatactggaatagtcttggtgattttgagaaggagcaacttacatatggtgagtgataggcagggttaaaaaaatatttggtgacccattgccgcttgggagtggtttcatcacttatcacaggttgagctcaataaatgacaaaaaactagtgaaatttagacaaatcttgccaaaacattgattttatttttgaacttgttggccagttttccaagcagtttattgatcttgaatttatttcatcagatcttaaattttcatattggattattctatacttaattggagataaaaaaaatgctcaaatgctatggccatgggaacaatcttattatttgagtacatgactggctacatcaaaataaatagaaaagatcatcatatcttcacaattatggaaatgttaataactttacaaaataacaataaaattctcatatccgaagcaaccatttattttaattttttaattttaagctgccattggatgatcatcgcaatgtacaaatttcactagaaaaatacccttttatcctaaccaaataatctagcttgcacccaccattttgtagcaattcatcatacacaagttctgcagccacgtgcaggggatctcactagtaactctttggagttgtgttttcaagtgttcattaatttgtttggtacccctccatcccaaattataaggccattcccaatccattgactggtatgatatccatagcattaaataagctgcaatctaagatgaaaaaataatgtggcaagtgaataaacgagtaaagagaaggaaaccaggtcttacatgagacatggtttctacacaacatattagtattgacgaaataaaagccgtgtacagtggtggcaaaaaatcgatggatcctatccgactcagagcgattttttaatagacggtatttttttagcaccgttttttaaaatggcgcgttttttcttatagttttttcctcccatgttttttttaaaaaaattaccgacgttggaaataatttttctcacgtgttttttatttttttatggaagatggaaagccttttttagcattttttgcgctttttcctgacttttttctcacgcgtttttttgaatcattgttattttctcgtgcattttctctttttaaatcgtttttattttctcgtgcattttgaatcgtttatattttctttttacgcacctttcagcttttgttctctctcttttattattattttttaaaaaaacaacctcaagtaccttattgcaagattatagggactcaaatataaatataaaaattacagggactcaaatgtaaaagtacaaacctaaaaaataaaatcatataaaaatggaatgctctcgacctataggttccgtcttttatacagatctttaatccggcacatcattttgtttcaccaagatgtgtgagatatcacggtatagattaaaactgaaaggagtggtggctaatatctcggactcagaaggagtggctccttttatttttcgtttttaagggggaatcggatctatagtcggacctttttgtcgtttatgagaggaatcggataggagtcggactattttttttcgcttttttttctttcgccccgttttttttatcggacaattatttttggggaatcagacaaattcttttttcccccggtttttattttaccacgtcagatttgtttttttttcgcacgttttcttacccccggtttttttatcggacaattttggtttttttttttcgcccggtcttttttcgcccttttttctggttcggacagatttgcagatttgttttttcttttcttttttccgcacattttctttcacccggtttttttattagataatttacgtttttctttcgcctgtttttttagattggacaattttggttttttttcgcctcttttttctggatatttgtataaaatatataatttaaaaatgtattatgatcctatgataccatgatactgcagatctatcctatagctagtatctatactgattaccttggtgaaggggtgcctccacgccgccaaaggaatcgtggcagcagaaacgggggattgcctccttgcaatgtgtgtagggcagttggatttcgataatgatgatgacgaaagatattcggacgttataggatcgatccgatcgatactatggtactcccactatttactataagtcatttgactttttattagtcagattttgttaagcttaatcaaatttataaaaaatatataaatattgtcaatacaaaacaaacatattataaaaatatattcaatgtaaaatgtaatgaaactaattttatgttatagatgttgctaacttttttcataaacttggtcaaaataaaaaactttaactatgaaaaaaaaagtcaaataacttataatttgaaacagagtgaatactacaaatcagaaaacggcattagctaagtatctactccctccgtactcgaattagatgtcgttttggcatcgctcgcgttttcgcaaaggatgtcgctgtacgctcggaggaaaggaggtggacgtgtttgcccctgcgcatgcgtgctcgtcgtccgcagtaatcacgcgcattaatcgtgcctgttcgttaagctcgctgctcggactctgttcagcgaatcagcgctcgcatcgcctcgctgcgcacgcttgagttaatttcttcgtaggcgcatgctcgaagaaattattcgctgcgcggcttccttcctcgtcgcaggtcctcctcgcctcgcctcgcctcacagctcgccgctcgccgcacgtcctccttccttcctcgcgctcgcgttcctctcccgcagcacgctcgccatggagctcggcgccatgaagctcgctctagacatggaggagacgctggactcagaggtcgcactcgactcagagatgacgctgtgggactcagtcgagatggcgctggactccgtcaaggtggatctggactcagtcgaggtcgcactggactagagtgacgcctaagcaaaccttttttcaaatacctttgtatcctagctttgtttataccaagtttactagacacatcttctatggtcattctttacttgagaggaatgttgcgcaattgtttcaaatcaagagggattgccttatggccacatctacccttctttctacttgcaaccacaattggactgaccgaatgtgcaatccaaattgattagcaacaattcttgtatctgtattgcctagtgtcccattcttgcttttagccagcaatacttgatacacttgttttctgacttcttctgtcatttctttctttcgatggtttggttctagtaagaggaaaaaaaacaagcacattcaaaataatatccacggcttacctaaaaaacaatcatacatggaaagtacaaactgagaaaggaaataataaccacggcttaccagcgatgttttgtacgaaatcaaaatcaaatgcaccatattcatcttagtggtaagttcaaatcaaatcctgtcgaaaatgaaagaacacactgataatggaaactaatttgcatgagactgctgtgaatatcaaaaaacaaaactaatttcctcatactccaacggaaacaatgaaacaatgaaatgatgcattaccgttgccgtgctctgccgcaggttcgttgagatcgaacccaggaaataaatcggccatgtgcggatggctcagtacatgaacaagtgaggaagaggtggcgttaagaagtggcgtgtcttaaatagatcaagcaggagatgggagacccaagcgtcggtccagacagcgtgccgtgagcgcgccagtgaaaaccaaggcaaaaaaaaaaacgagcagcaacgcgccaaaaccgaatgccatgcaaatgagccaaactcgcccgctagcgaagggatttgaaccatatgcccacaggccttaaggcgcggctgcctaaccaatctagctacgaacaattcttgcacaaggaaacccacctgatcatttagagcaggtacaatagggctgacccatcagctccaataattgccacgtcacattatttctacgtggaagggtaatgattgaggggaaagagaagagctggcgactaaattgtcgccaagctataacgcattttttgggggcatagcgcccgcttgcagcgcatttagattggatgacatggggtaggtatgtcacaaggtgacatagtgtagatctcagtccttctaaataaatccagcggctgagattcgtccacgtcattacaagttaaaatttaactccaataaaattttaactcctgaaattttaactaccagtaaaatttttactcatacgagttaaattttaactcatgatgatgtgaacgaatctcagccgttggatttattttggagagctgagatctacgctatgtcaccttatgacatgtctatcctatctcacccaatctgaatccgcttgcagccgaggcaggcgcctaaaaacgcgggttgtggggcccacgaccggaaaaactgatatgtgcccgcaccgttcttaggccgcgatccactgatccgatcccctttccc

SEQ ID NO: 21390 - DNA, 11778 bp, Oryza sativa
cagccgaggcaggcgctagaaaacgcgggttgtggggcccacgaacggaaaaactgatcatgtgcgcgcaccgctcctaggccgccgatccactgatccgatcccctttcccctttctctttgccatgagatcgatccccctctccctcttggcgcgagcgcgagaaaggaggctggcgcatcgatctctccttcctggcgcatcgatcccctcccgccaaatcgatggacagatctcccacccaccgcatcgatcgatctccttcccgcgcagtattccctctcactcactcctttttcttctctcccggtcctataacttctcccgcgcgcgcgaaattcattttgctggcaggtagaacgatgccaaagccccaaaatcgcccctgaaatccatccccccggtgaatttcagggagggccactgccccccgtcctcttccatagttctaccgcaccaaaaccctagttccttttcaccatgtctcgtcggacgaagagagaggttgcaccaccgcaaactcatttgcaagctcgtctggtcctcccggtgttcatatcccgccggcaacaccgtatccatatggaggtcctttgttccccaccccactgccatcatggtttccttttccaccgtcacaagccatggcgggctcatctgcatatcgtcctcctactgatgccaagacggacgtccaagttgatttggaacaatggtacatttattatttggctttatcagttctgattttgacatgcttctgtttccctgtctaatattgagagtttcatggtcgttattgttttgatccataacagcactagtgcaatgaattgtttaggaaaaaagaggtgattttggtctgataatcaggttaccgtagtaacttggcccatgtaatttggtctgcaatgatttgtaccatgtatttatgcagcaatttggctaagtaaaaacaagagtccaatgttacatgtagggtaaccatggtagggtaattagcagtggtggtaaccatgtatttatgcagtaatttggcaaagtaaaaacaagagtccaatgttacatctattactaatttgttttagattcgagcactcatttaccactatgaactgaaataaaataattttgactgcacatatcaatataccatttatactggggtaatattgggttaggccttgcattgatcaagattggcttgttcattcctttttatatatgggacataactgatcaagattttcatgttcatgatttttatataggggactagaatctcgcccgctcggtggttttgttgattttatcaaaaacaccacgaaccttatgcaccatgtgactgaagggtgtcagttgcagccaattaatgttgagaatggcaacaatggaaatgccactaggaccgagaagcgcctaggctggtcaactgaagaagacttgaggctggtaagtgtcctacgcgagttatttatttggtagtggcattcataatacatgcaatttaacaatagtgaaatatttggaaattgtaggtcaggcttggttaaacaactcaaatgatccaatagaatcgaatttcaaaaagaatgataaatattggctgatgttgctgctgcttacaatagcactactccgtcaagccggtttagtaagatcaagaaaaaagttaggaatttttgttgcccttggaaggaggctaattcattatatgctagtggggagtgtaatgttgatctcatggacaaggcgctgaaaatgtatgagaatgacttcaaggatgggcgattcttgtttattgagtgttggaatgaactaaaaacccaacctaaatggcatgcatatttggatcagcttgacaagtcgaataaaaggaagcgagattatgctgatgctaccccccttgatgacgaggagatcccacgtccaatgggagtcaaggcagctaaggcgaagcgtataggcaaaggaaaaggcaaggttcaagattgtactgctgagctagaagatgacacccacaagtttatggaagcacatgaagcagccaaggagcagtaaagtgaattgttggagacccagcgacgtgttgctagtgataatcttgaagcgaagaaggtgggtcgccagaccgctatgattgcagcatatagagagttactgaacaaagacacaagagatatgcctgatgatgtgaggtctgagcttgttgcaatgttgaaatgcatgagagaagatatatttacaaaaaaccagtgaggtatgtgtcatgaagttctttgcagtagtaaaacatgcatatatctacgttgattttgagcagtagtcaaactattgtactgtattcatagctctagttccaaacaaccatgcaaccagtccctgttttgtgataattaatagcattcagtccaaataatcatgcatatagtctcatattttgtgctgattaactgccattagtctaaataaccatgcagtcaacccaaattttcatgattattgtagctggtctaaattaaattgcagtcaattgccaacccatattaaatttccatggttgttgcagctggtcctaattaaaatgcagtcatagtccagacatattaaatttttcatggttattgcagctggtcctaattaaaatgcagtcatagtccagccatattaaaatttgtatggttattacagctagtcctttgcagcatctatatattacctctcataacttgaaactgccaacccaatctatcctcctcctcctcctccaaccatgtcggactcatcctcctattcatcctctaactcagatgacctagacccatctaaagttctagacaagtacatttctgagcagaatgtactagactcatttgcttctcgaatcatagagaagatgaagggtaggttaggagctgggcgttcgaagcgccaaggtggaacaaggaagacaattcatagggatcatgtagatgcccacagccgtttggtggctgattattttgcagagcatccattgtacccagagtggatgtttcgcacaaggttccgcatgcacaagccactctttctacgtattgttgaagccttaggtcagtggtcaccatactttactcaaagggaagattgctctagccgcacaagtctctctccacctcaaaagtgcacagcagcacttcgtatgttagcatatggcacacctgctgatgcactagatgaatatttaaaaattggcaagagcacagccttagaatgcttagaaatgttttcacaaggggtgattgaggtatttggtgggacgtacttgagacgccccacaagggaggatgtagagcatatattacatgttaacgagtctcgtgggtttccgggtatgctaggtagtattgattgtatgcactggaggtgggaaagttgtctgagggcttggaagggtcaattcacccgtggtgattacaaagtcccaacaattatccttgaagcagttgcttcacacgacctatggatttggcatgccttctttggtgtcgctggttctaacaacgacatcaacgtgctgaatcagtcccctcttttccttgacacagtgagaggtgaggcttctcgggtccattattatgtcaacggggaagagtacaaccatgggtattacctagctgatggtatatatccagaatgggctgtattccagaagactataccacttccacaaactgagaagcataagttatatgctacacatcaagagggggcaaggaaagatgtggagcgggctttcggggtattgtaagctcgtttcaacatcgtacgtcgtccggcaaagaaatggaagagaaagagtgttggaaatatcatgctaacttgcgtgattctccacaatatgattgttgaagacgagggcgaggatgcaatatgtgacctagacctcaatagaattcctaggacatcaatagtactgcctccagaagtaaccagtggtggtaaccaatgttttcgtgatgtgctaagtaggaaagctactatttgtgctcgttcaatgcatacccagcttaaaactgatttaatttagcacatttggaaccggttcaggaatacgcagcgtacataaccatggtagggtaattagcatataatttcccccttttttgtcatatatagagccttttaatttacccttctatatgttttatttcaggaacaattaagctttgatgtctactgtgttgcacctctgcaacacacctcttacaggtatatttccatcatatggtatatttatcgtgtgagtactttcagctgtaatgaacatcgaaatttttgtgtacatgaaccgattttgttcctccatatgctatatatgttgtatacatgaactgctagcttcatcattgatcttttttacatctcagttcaaaaatatgattcatgaatccatgtaactatagtgtagggactgtgacaatctttcaagaaaatttattggaatgagacacacctaattttatagttttaggaaaagtttactgtaattggcagaaatttgaccatcactaagtagttagatttctgggattaatattgcatttgtactgtgattgttctgctgataacataatttatattctgcaacaaatcaagatggctgatgatggtccatatggagatcaagaactatctcagtttatatctatgttttcgttaactgttattttgttatccctaaaaagttgccttgtgtagcttattattgtctagtttttgtggtccttttgtttgatggcatgttgccaggagatttgtgaatcatcgtatctgtttcactgtttggattattaatcctctatttaactagctctgatgtgattgtgtatatgtggtgcaacaaaatggccacaaatatggatgtcaggactgatcccaacaactgctattggcatgcatgcattaaatagttcaatgtattaatctctgacattttacagctaatctattgtacttggtaagctataagctagctcttcctgagttggacagaaaattggagatggcagtgggctctctattgaccttgctcttacacggaagattaccccttaattaatgactccttagtaattactccctccgtttcgaaatgttcgacaccgttgactttttagcacatgtttgaccgttcgtcttattcaaaaacttttgtaaaatatgtaaaattatatgcctacataaaaatatatttaacaatgaatcaaatgatgggaaaaaattaataattacttaaattttttgaataagacgaacggtcaaacatatttaaaaaagtcaacggcgtcaaacatttcgaaacggagggagtataatcctgtccgaaatgtcatctaattcgagtacggagggagtataataattaccttggtcaggggctgcctcatgccgccaaaggaatcgtgggatcgcctcctcgcgatgtgtgttgggcagttggatttcgataacgatgatggcgaaagaaactcctacgttagagcaagtttaatagtatagccaatcgctagctccaatttatctatagccaatttaatagctcatttatacaatagttatatactacactattaatacctggtcccacctatcatacacacactgcgtcttggagtccgtgctacagctggctataaatctatagcccactgtccttctctctacttatttatcttccttaaggaaaagtacgttttacccccctgaactatttgggtcgttcgaattaccctcttagactctaaaaccagttattttacaccccaaaattttcaaaccggccaaattacccccctaagtcaatccggggtggttttggtttgacgtggcgcacacgtggcactagtttgattgatgtggcagtccaacatggaaataacaataataaaaatggtgggccctaccagtcaggcacctattctgattatacgagagagtgagagagggcagaaggggtgtgggcggcggagctcaaggctagaggccatggagagcggccgccggcgtggatctcatcgcaccggccaccgaatctctctcacctcctctctctcatcttcctctctctctaactcttcctctctctctcttgcgcgcggcagcaggcgggcggtgggcggcagcaggcgggcggcacggaggcgacggtctctcccgcgccatcgccaccgccaccgccaccgcggctatggtcgtacaccacccgcgggatggcttactccagctcggtgcagaggaggtcgccacccatgatgaggcccatgccgaacgcacggagggcggctcgtcagtcgtcgtgcagctgctcccacgccatctccctcgccgcctccggccgccgtcctcgactcctcgcccgccgcccgcagctgcctccaccccctccggccgcagctgcctccgcccccgcgccacagctgcctcctctgctcaccgagagagagagagggagagagaggcagagaagcgctacctctcggcgacgccatagcccgctgcccgccgagccgtcgtcggctccagctccccctctgccgccgccaaccgcccggccccgcgcgccgccatcccccgcacgccacacacacctgctcccgcatcgccgccgccgccgccgcccttcaccacggggtcgtcggtcgcccactccgcctccgcctcagccgctcgccacccgcagcagcgcagcccgggaagctccgcttccgctgccagccgcccgctccgcctccgcctcagcctcagtggcacgacgcccgccgcacagggacctccgcctccaccgtcgaccgcccgctctgcttccacctcagctgcccaccgcccaccgcccagggagctccgcctccgccgcccgctgctcggggagctccgtctccgtcgccggtcgcccgctctgcctcagacacccggccgcccgaggagctccatctccgccgccggtcacccgctgccttgcccgagcgcgtgcgtgagagagatggaatggttgagagattgccagattggtttgaggataggtatgacaggtgggccatgtttttttttattttttttgctggttagattgccacgttggcgccacgtgtgcaaggttaagtcaaaaccactcaaaacagtgttaaggggccttatttgtccggtttcaatagttgagggtatagaatgtctggtttttgagtttaagggtgtaattcggtcgaccgcgatagttcagggggtaaaacgtactttttcctcttcttaaattatggttgcagctggcttatagcctgctattatacctgctcttataggattcatccagttgagacaatgatactccctcttttcatttcatattataagtcgtttgactttttttaagttaaatatctttaaatttaatcaacattataaaaaaatataaaatattttccatacaaaacaaacatattatcaaaatatatttaatgtaaaatgtatggaaattaattttgtgttatggatattgctaatttttttataaacttgatcagatataacaaactttaactatgaaaaaaaatcaaatgacttataatacaaaatagagtaaatactacaaatcggaaaacgatactccctccatctacttttgatagtaatatttcatcttggcacacagaccaatgataagtgattgtacttgtcatccatttaaacatgctactagtcattcctcgtaaacaagcgattcattaatatttacatttcccgatgcccatgtagccaatcttgtgtgtaagaatggagagtcacgcattaaatccaagaaagccattaagattataagttgttggattgaaatatgcctatcaaaaataaaattttcaaatttagaaatatgactattaaaaagtagatggagggagtattagctaagtatctatactaattaccttgtcgggggccgcctccacaccgccgaaggaattgccgaagcggaatcgggggatcgcctccttagtccttactaagtgtgttgggcagttggatttcgataatgatgacgacgaaagaaattcctacattagagcaagtttaatggtatagccaactactagctccaaaatatttatagctaatctaatagtccattcatacaatagttgactataaaaatatactacccattaatactcagtcccacctctcatacacatataatatcttggagttcatgttacaactggcgacaaatctgtaatccgctttctctctcttcttttttcttcttgatatgtggttatagttggcttatagccttagctattgtacctactcttataggattgatcccgtcgatacatactccctctatttcagattagagcatgtacaataatagcaggctataaaccagctataaacacatttcgaagagataaaagagaagagagaagggcagtgggctacatatttgtagccagctgcagcacggactctaaggtacatgtgtgtataacaggtgggaccagatattaattatgtagtatatgtttatatgtaactattgtatgaattggtcattaagttaactacggatgatttgaaggcagcagatggctatactattaaacttgctcctaaggtccattcgaccgtgcatctgcgatcctcacgcgtgcaaacgtaattagcggtagcgtccaggattaattaggcaatgtatttagaaaacatccaactatctaattaattaaacttttgattttaatcccaaatatatagggcgattcgttataattcttttatcttaaaaaaatcggaaattttaatcctaaaattttgtcacctaaatacgttgccaaaatatgccacttattattttaggtatacttttttcattctagtaaaaagttggatagtaatttttttactattattgtaaaagtttctcaatataattttttatttatgtataaagtttatcaatcatttttttacatataaagtttataaatgaaaatattttatctacatagaaaatttatgaatctattttttttgtttatttataaagtatatcaacataaatgttttcttttatgtataaagtttattaatgaaaatattttatatatgtagaaattttatgaatataaatttttatttacatgcaaagtttatgatgattcatatataatttcaagtagatggagtttacaatttaagcttatttctatttgaaaatagaagtttcggaatctaacatatcaaaaatgttgataagaaggttttcgtatcaggatgcgtcttccctgtcccgataccctgttcctggcgacgtgtcatcttcttattcgctgggtcttttctggtgggccagtacgcatgcgctcctctttcacttaaacggcgtcaacgtcccgtgttatactatcacaattaatttggaaacaacgcaatttaagcgctaacaaaaatatggcgccaagcaaataaaattagtggcgggaaaaaggattagagcggtacataagtacaaatacacagttattttattttcatctacacagattgcgtctccacactaacaagaactctcccaaatcttggcaccatgctagatgaactcccgattcctagaccaatgccatcacaattgcagaatacagtaacatgcggtacgttcgcattcttggatgatacttctgccccatcatcatcatcatcaaatcctgctgagtccacatatccctctgatggcctgggaagaaatcaattagaagctgtaagatccctatatattctcctttacattttgttaaattagttgcatctaaactgtaagatccggacatgtgcacgtgcatatgaacaactatattcatcgttcctttttttttttttgcaattttttgatggaaactattaccacagataaaactaggatgaaggaacaaatgaagcttctcatacaataaaatatctggaagacttggtgccaaagattggcatgaaatttagctctgaacaaaaagcttatcgacttctacaatgattatcttaagaaaggtttcagcattagaagaagcagctatcattacatgggaaatactaaaattataaaaaacatgacattttgttgttctcgtcaaggtaaattctttgtttctttttatagttacattaactttcaattagagacattttgtttcaattagtgcactgtattaacaggaagtagaggtactgacaaaagagcagaagcttcaggctatggcgatagttatagtaggccagaaactcgatgcaagtgtcaagcatgtatgaagataagtctcatagatggattctattctatctatcactttgtgcctgaacataaccataatcttgccactagaagtcaggctcatcagttacgatcacaaaggaagattaatgaagctcaagttgcaagcgttgaagtcgcaaaatccgtagggatttctactaaagcagctattgatttgatggcaaaacaagcttgtggatttgagaatctcgggtttactcgtgttgacatgaagaataaattatactccaagaggtccctacaaaccaaacaaggtgatactggaggagtgttagaatatatggagaagaaagcatcagaagatgtcaagtttttttattctattcaggttgatgaggatgacttaattacaaacattttctgtgctgactctaaaatggttgccgactatgaaaattctggtgatgttgtatgctttgacacaacatatagaaagttggatgacggacgaccttttggtttgcttgtaggagtgaataatcataagaagactactgtttttggtgctgctcttctatatgatgagaccgctaatagttttgtttggttatttaaaacttttctaaatattatgtcaggaaagaagccaaaaacaattttgacagatgaagatggagctatggctaaagcaattaaaatagttcttccagaaactcatcatcggatatgtgtatggcacatgaatcagaatgcctgcaagcaccttgctgggtgtgttaaggactataagaaatttaatgctgactttcagaactgcatatatgatcaggaagaggaagaagaatttttacgtgcatggggccaattgcttgaaaaatatgagcaccagcaaaatacatggttgtaacggatttttaagaaaagggagcaatgggcattaatatatggccagaacatgttttctgcggatatgagtaccacccaaagaaatgaaagcccgaataatgaattaaagggttatattagtgtgaagtatggcatgctttcttttcttgagcactttgacagattggtgggagataaaagatatgaagaggtaaagtgtgactttagagcaacacaaagtacaccgaagctaaaggcagagttgagaattttgagagatgtagcagaagtttatactccagcagtttataagatatttgaggaagaggtaatgcagactttgaattgtgacatattctactgtggtgaggttgatgcagaaaaggtgtacaaaataaaggccaacggtaaatgcatcttgaacatgttcatcttgaacatgttgttagatactctccgttggaatccaatgttaaatgcagttgcaagaagtttgaatttgctggcatcttgtgctctcatgcactgaagatacttgacgtcaacaacatcaaatcagttcctcaacaatactacctccgttttttaa

SEQ ID NO: 21391 - DNA, 3442 bp, Oryza sativa
aaccatgcatcagctccaactcagcggcaaggcgcttgatcagtgttgggagctcgagacaatagactgctcggcaacggtgctcgagctcacccgtaaatcggcggaatctgacggagttcatctaagtcaaggtggggaatttttattttgttgtactaatagtagatcatccgcatggagagaaaggaattaataatgtatatgataccttctgttgggggagggaagggatatgttacgccgttgtgggaaaaaagaacggagacgttgacgccgtttaagtgaaagagaagcgcatgcgtactggcctaccagaaaaaactcggcgaatgagaagatgacacgtcgccaggaacaagcgtatcgggacagggaagccgcacccatatcaaatactagaaaatttcactttatctttggaattttttcagtataatagaatgaatgtattttcttaatatttagtaaagcagcctaactgtaatcacgcgaaaccctcaaactgatcgcacgctttaatttgcatgtatgcagaagttcttttggtcctcaaactatttaggcgcatatgcatgcgcattaatttgttttttcctggattaactggtcaatagccgtggtaattaaacatcaaaatataattatcggcgtgcaggctgaaagtgtactcgcggcagtagaaattaacatgcgaatgcgcctacgttatagggatagatggattgaccagatcgatccagtcgattatcccggctgctgaaaagggccgctcctgcattctcattagatagccgatcctccctataaatataggtacatccacactcattagcatcacaaagtagctagatttcattcctagctagagtgcatttagggttatatcgatctaatcatttctcccttgccaattaagtctccatcgatcggtaaatcagctatggaagcgagaaaagccagtgttgtttgctgcatcttactgcttgtgttagcacttggaggtcctgcttctgccacaggttcatcttaattctccctcaacccatttgatttcatctttcgaagaaactgcatgcgttctatatgctctgaattttatttgttttcttgagcggttctctatagatatctgtcagtgatgagattataggggacagtttacaattaatgtttcatgtgatttaataaatgataagctagattattttataagctagcatctaatgagttctttctctttgtagattattgctacaaagccattggcaagctgatcgtctgcgtgggtcctacgtgcaagttggactgttggcttgaggcgaaatacaataaaggcagagtcaagcgtcacaagtgcatgaaacatggcatatttgccaaatgttactgcgaaatctgtgttacattttgagggaatcgatcgacaatttgtaaaagtctttagttgatttagtctcgtgtaataatctagtacgttgtttgctagctagtttcttttataattgattagttttgggagttgcttttgtttggatataggatatgtgattatttaatttcttcctccaatgtatcagttatcactgtactctcattcaagattttttttaaaataaagtataagtgataattgcattataattttaattaactaagatatcctcatcgtttggcatattcatatgcttatcagccaaaatttgaattttcaacgttaaatttggagctgattttggggttttttcatcaaagtttatttttcagcctttgcttttagatcactaagaacacaatataaaagttttattcacaaattacttttcgtttgcaaatatgccatttggcttattccaccaatataccaaacgatggcaccctaacattctatgaaatgtaattttgtgagacatatatatgcctcttaacaaatgtagcatatatagcgtttgtcaacacaagtaaactgaattacaattattcttcttcccttacgtttgacatacctctatttcacagtattacaatattaacatcggcctttatcacgatcattaaaagtttgtgaaatgtaatcctgtaaattgtaccttacatttgacataacactaattttgttgatctcattgatcatgcctcgtagccacacaaacagtgtgcagatttgcagtgtagtgataaaattgctcgctactgatcgaaatttgcaacatgataggctaaagttgtaacaaaattacggttttaacgaaatggctacatttgtatgaaatttcactgagaaaaagaatctcaatggactgcgcttatactctcaaacctgtggtgagtgattgctttttctcttggtggtaaagcacgataatttaattagttattcgaaataaaaagtataacaatgcaagggccagattgcgattgttgtgctatcctgtgattatttttttcatctgccacggaagaagtagttgtggaacttaatcagtaactctgtctggcagatcacattaaaatctaacaaggtaaggcgaggaaggttaagaacaactacatctgcatgcatgcaaagcctgttgaccaaagtgattttaaatgtgaattttaccgatctttacaaacatcaagtcagatagtcaaacggtaaaatactacgactaaaaagtggtttcaccaccaggattgttcaccggaatactaaacatgccttgatagagatgaaagagcgagagatgataataaaattattatttttgttattttaattcatggcaatgaatttttgtccgtagtgcgccatacgaacgtgtcagaattataatacctccgttctgtaattgaaatactagaagcttattatgaacagtatctcaaagaatttgatattaaagggagttaccatggtaaccgtataaaaccgtgtaaaatccgtcttcaaatatttgaattcaaaaatcaacggtttcagcgtggtttctcgcggtaaccgcaatatttgcgcagttatcgtcaagtgtctagcaaaaaattgaaaaatcacttaaatgtgtctagaaattgggtataaataaaagaatatataggatatttgtaaacctaacttttaggtgtaaaatacaaaaattcagcataacattttctatattatggatttcgaagcaattcaacaacaatctaatgtactttcggtttcgctctcaaatttgaacttatcttactccttttcaaaacatttcttcaccatctaccactacaaatcaagaactatatccataatttttttcggaattttgaatttgggtataatttatcaaaccctactgccggtaacccttacggtacccctgatcacgatcaatacaattaacaaagaaattaatagcatgttcaaacacaaatacactgcgtatattcgataaactggtggcgctgggctctagctagc

SEQ ID NO: 21392 - DNA, 13816 bp, Oryza sativa
aaaaaactgagaaaaaaaataaaacatctatccatcgattttcacttaaatcggtgggtccaatattataaaccgttagattagatctcttaaaacaaacagatgacccaccaacctcctcctcccttacatatctcactattccttccttccgttcagtatgaacgtacgtacgtatttgaccttcttttttttctttttccatgtatgtatatgagacaataataattattatcagtgataataaattttaaataatagttaccttacgagcattcaatatatcagcatagaactcttcacaaacatatatagataaattagctctataatacttgaaaataaagtttagacccattatattatattatgtgcccattattttagactacatttattaataaaagtatttttccatcaattttcacttaaattggtagacatattatttagaccataaaatctatcttttgttagaaaaacaaagcctccaatcctaaaagtttgagaaaaaaaataacatcctgctaataatcactcctcctgatcaatccggcaaatcactcatccgatctctaatacgtaaatacatactccctccgtttcaaaatgtttcataccgttgactttttagcacatgtttgaccgttcatcttattaaataaatttgtaaaatatgtaaaactatatgtgtatattaaagtatatttaacaatgaatcaaatgatatgaaaagaacaaataattacataaattttttgaataagacgaatggtcaaacacgtactaaaaagttaacgatgtcaaacattttaaaacggagggagtagttcgtatgtacgtgttgtgtgtcaaaaaagattaatacgttcggccgacaaattctctcattggattattatattaaaaaggctaattcaaaagttgtattcctggcaattaaaccaacaattttaatacccgcatatgttgtgaaaaagactaacatgttaacttagattattgctcttttttacaccatccaattactcataaaagtatacaaaacaaaatttaccgtgtagattattaagtatagaacttcataaatatgcatagccaaaataacaacaatgaaaaaccatgtatattttgaaaaaaagacatgcggacctatactttgcttttgtgtaccatcaaagagcctcaattatataataaaagtctattaaacttctatgaactatgctctaataaattagggaaaatcctagaaagtctaaaaaacacaaacatctatcagatatagcaaattgtttaaatcactttacaaacaagcataactcaattagctttaccgcattttaaaacaaagtttacataattatattatttaccattaaattaataatttattatgtatatttactatatttcaacttgtaaagggaaattatattttagatagcatttttattcctttcatgtaatccaatgcaaacggatatgaaaattatggaaaatatgacaatataaattatatcactatatatcggttatcagttcacaaatcttggtactttgcatggcattggagatttgacaaatcatgaaaaaaaataatggatgtagattatatcatcgtataagtatgcttatatatagggtccatactattgatccatatataccgggataacctataatgtatcaatcatatttaccactaccattgttatacgttttagagactatattaatcctctaaataataacaaaataatagacgaagtacaagccatgttttctctctctttgctttctattaagtacgcatggtatatgggaacttcatactaagactgtgttcgggaggaggggcacgcaaatcaaagcttgtattattgcatgattaattaagtattaactattttttaaaaaaaagattaatataattttttaaaacaactttcatatagaaagtttttgcataaatcacaccgtttagcagtttgaaaaacgtgcgcacggaaaacgaaagagatgggttgggaaaacgggaggaagaacacagccttaagattggtttattagggaaatcatactaaacttatttatgagagtgcatgcagtaaaacatacttgataaaaagaattgatcgaacaaaactgcaatttagcccatggcacttaaacctttataaacgctttacacatactaattaaatttatatgattgtgctattctttcaaatcaattttatttttcaaagaaaataagaaaacatatgaaaaaaaaagagaagagagtagaagtaaattaatagaagtttttttaattagatgaaacattcctattagccatattgtttaatagaaaatatattcacttaatatatcctaacattcataaatatatatggtataaaagcaattttgttacttaaagcatagaaacataaaaaaaactctaaaaaaagataagatatgctaaatattaaaaagtaaatacacatagtacaaacgatagttttataagaacaaactccattattatgacaacatattttctcatagtttcaaaacagcgtagttccaattaattttaatttagaatttaaacttccaagggtaaatataagaaaatcataaccaaaattcaaagcaatccaaaacaaattagtgaaaaaacacgtttacaatagtgtcaaagaataattttaagaaaagtcacccacataaaacattcttaacacaatttaaaacaacatcagataagatgcccgcgcatgtgcgcgggctatcttcctagttacatcaaaagtgctctatacttggggcataaagccagtactccactgcaattctgactacgtagaacgttgcatgttacaactgaagatcgtataaacatgatttaattatctcaatctcatctcatgaagaagccacagctaaagttccaaccttacagtctagattcatagctctccacaaaagaacgactaacctatagcacatatggcaaaaaatggaggtacacacaatacatttaatgcgacaaaagttgcgctatactcgtatgaatgacaaaatactgacaacggatgcagggtaaggcggcaccatagaaatcacagtacctatctgactttcttcaagagctctaccttctcaaactctggggccgcataactcttctctacttcccacgcatgatgagacatcatgttgaatgatgatttcactcccttctcatcagagacctctctcgtgaaagggatccgggcagcaaaggtactttccccggaatgaacatgcaagtcaaaacccaacctgtctacccaaatcatcttcacctctgtcgcctgtcaccataaaagaacactgttagcacattcagtaaacataacggaactcaacacttggtgcggtatataatatctcactatctatgaattatcacatagcacataaaatattaatcagctggagtatcttttagaaaagataagatcaacaattttttaattacttttcttcaaataaagaataaaaagatgcatagtttgatatgcccctaactcatatatataacacataatcactataccactatcagactatcagtaaattacatctttctgttttggtaattctctatagctatgttcccatcaaaaaaaaaaaatctctacagctgtgtgattataaagaaactatgaaaagacaaacatgtgctttatcttaacattagctatttttcctttcaagaagtaagaagcaaagttgtaggaatgacaggaataacttcagtacctggaaatctgattcaacataaatactgtatatcctatgtacatcttcagcatgtttgctgttcatttcctcaacaatgctttccgcaaaatttcgaagagggtcaggttctgcatcactgtattctgatggaattacccacatgccatcctgaacagaaaaagtatcccatgaatatcagtctcatttgaactacaaagttctaaggtgtaattggctcaccagcacacatccatcagaaaataaaaactgcacaactcacatagaactaagtacatcaaatgcaacagatgaaacttgacaacatttaaagcacctaatatgttggttgaacaaatttcagcagctgctcaaggttcaattagcaacctatatcaattcatttccgtagtaatttggtcgtgtggaagtgattcaatgagtggggaataaactaaatataggtgtgggggaaaattgataaattgatgattttattaagtgctaaaatatcttgatgtttttttttctaaagtcaggaagctatccatgaaaggaaattgagaaagacattctactaaaagtgatctccatatatttatcctcgtaaaatacaggtcagccaaacaaaatctgaataatgtaaacaataaataggtcttcttccgaatatgaaagaaggcaaaaccagttataacaaaaaaagaaggccagacactttcaaggggtgcactacacctgaaacacagaaatgataactagaccaatacagccaaggtaatgaaatggatgttccaactgaaaatattcttaggatagaatgtaaaagttatcttgctccatgcttttaatgtacattttcacgttaagaggctattttcgtcagctagtttactgatcaccattcagcgtcatggataactatttgataccgttctgcacagcaatcttcagcgagtaaaaagaaattcaacccacatctcttgtctacatatcttgttactgtctcacactatgcaaaaaatcatgcacaaataacccatacctaactattatatccttattattagcaaaacagaatgaagtgtgaagaacactaaaagttccatctcattttctcatgaaaatgagacaccttctacttcctccgtcccaaaataagttcatttttcacccaatacggtagataaagtaaggaatgtttgtatagaagtagataaagtgaggcaatcaatgcggaacaaacactgcagtactagaataagaactcccaaaatgacaaactgcagaatatgaagaaaccaaaagtaactagaagaaaataatgtattttacctcattgaaatcttcaatgtgcaagattctgtctactgatatcaaatacaaaagatcttgatctatctcctcgccaaatttcttttgccacctagtagaaagcttctgcataattcaatttagcacattacgaatcagtaatccgacttagtatatcatgctattcttctgcagtacatagtttcccattgtaatcaacttacaattcacaagtgtaatgcaaatatgccttgaacaaaatgaaaaaccataaaaaaaagtttacctttaattcatattcatcgttaggtttagtcaaagcaccaagcaaagtacattgaggtgtcctggccccactctgacgaaactacaccacaaaaggtagcgagaatggtgagtacaagatacaaaacagttgtgctagtgctcacattgtcagcattagaatttagtcatcaatgattctacacagagttcacagtgtcggcgcatcaactaggtaattaaagtgttcacctttgttacaagcacctgtcttccacaaaaccaaaatgcatttaacatagtggagagatctgacatcttaagatgtctagactctagaactttccaatttccaaacaacacaagtacacaagaatgcaaaccacaaactaaacaactgcaaaggcaacgcacaatgcaaagcttcagcaatgaaattctcctgcgtgatgtaagagtccagcggccttctaactcaaattctacacgaacagtgcacaaaatcattacagcgcctcgaatttccgtcttaatctcacgcaaaacaaaacagtgaagtcaaaacgcgagcaatccgtaaaattctatcccccacgcaacagtaaacagcctaagaaatcaatcaatcaatccatgagcacggctgcatccccctcacctcgacgtggaagctggacggcgcatcgggcgcggcggcggcgggcccggaggcggcgaggcacagagcgggcgcgccggagccgtcggcgacgaagcgggcgccgacgccgagcggccagccgtcggggccgaccacggagagcgtccccgacggcgcaagctccaccaccgtccgcgccacctcggccgccgacggccgggacgcccgctgctgcgcctgcacgggcgtcgcgggcgcgggcgcggacgccgccgccgcagccacggcccgctcggccccgcgcctcccggcggcgagcggcgggaggcgcagggaggaggggttggtggagaggaggatgggcggagatgggagcggggaggggaggagggaggagggaggcggcgacatggtggtgatggaaatggaggtggaggttgtgattcgtttggagatttgggaggcgggtgagattagaggagataggcagggatgaaagcggatcggatacggatcggaaactagctttatcatattcgttttcatattttttttaagaatcagaatcgaaatcgaaaactcggatacggaaatgaaatcgaatattatcgaatacagatacggagcgaatacgagacggaacgaatacggtagcggatatttaccggtatataaaaaacccctcaaattgagtttcttgatcaagaaaaagatatcgcttattattttagttcaacatctccaacatttatatcgtcaattttatagacggtcccacaaccctatgtgaaaatcaatttttatggctattcctcttagagatccatatgcaaatatgattaccattttctattctcacgacctttttactagatgtataacttacttactattgtataaattagagatgttatttattttacttcacatcttcgaaacttgtaatgtttgttttatactttaaatgctttcaaatacaaatgttataaactacaaagtgttagatctcgttgagctctacaactttgattctccatcagatgtcgtttgaattgtagatctaagattttgtaaaaattaatatggtatattataatgaatatttagactccttaaatgacctcaaataataaaatagtcaataagaaagttgtagatctcatcgagctctacaatgttgatataaagtttgtcgccatctgattccgtatgaaaaagttacgtatatatacatattttttctaaactttgctcaatgtttgcggatatccgaaaaaaaatccggatagtttccgaccgttttccgattccgacggatagtacccttactgtattcgttttcgtttccgagaaaaaaaatccgaattcgtttccgaatccgagaatttctggatagttccgaccgaaactatccgaatccgaaaaatggtccggacggacggaaattatccgaaccactttcacccctagagataggtgtggcattcgtagtcaaaatgtgttcttgatgattcggatttatggttaagtggttcatgctattaaaaaatctataacctacgtctagaaaaataataacttgaatctagataaatgcttggccagattcatcctaagaagttatttttttataggacggagagagtagataagtactcatgtattagctgcgagataattgtacgatagaataatattttctctaggtgcgttcacatgggcatagtcttttaaaactaattcttaactttaaatttcttatataatctcttttctactattataaaaattgaggatgtttccgttgatattttggtatgtcgtccgtatttgagtcggattctaaattcgttcgcttttgaaaatacataagaagttatataaaaaaatattttaaaaaaaactcacatactcacctaggatgagagtcagactcctaattgctttaaaatttctaccaagctataagaaaacaatatataggttatggccatcatcccaactagggatccgaattggatataaataatatctcaaaataaaattcatatatattttttagaaaaaaatctaacaataacacaactaaaatagccttcaccctttataatgcacgggcatgttttctagtatactacattatgtagcaatagaattacaataatataaaaataaatttaaatgataatccaataatattattttacatgaaataaaatttaatttataataaaatatttattggtcagttgaattttaaaatacgtgtggtcatagtgagtgaacagaggaaataaatttttcttgcttaatgtacgattttttttcacgtgcttttctgtatcttgtaatatgggttgattttgttttatgggctttctatatattatacattgatcaattatgtaaatggtataaatgattggagtgcatggtgtggttttatggagaaagatataatccataccattgatgaattattcaaatgcaaaaaataattgagatgatgacgacatccttcatcgaatccgcatgtaacttcacaagttccaatgactaagttcaagtcagtagcattgatttcaaatggatctagcgtcttcatgccaactctaatttggatgatgttggatttgttggagatcttatctcatcacctttcaaacgtatccagtctaatatcaaaattcatctcgagtcaataggaaattgggaatcgtcaaaacacaacaatgttgttgctgaaaccgaacttagcccttgtgctttgtaatagactagggccatctcggaagtgcctctctccacctctacgaaccaacacctatctctagctttattttcctctataaatagcttcgtacaccctaaaaaacaattgggttttgttttgttgaattttaccaagtgccattcacctaatatttaatccttgctcgattagtcggcatctagagatagagattcagagtcacccaatagtttatgcattgatttgctaggtcgattagatctaccatttcaatcacaactattcttttatacttaattacctattcgaaatatttggattgcatcttatcttgttcttgaagtgttctctcgtttacattgcagggaacatcaaccgcacatcacggttggtacaatatcgtttgtggtgttgcgattgcacagcgttctgaacttgttctagttggtagccacgtcgcaaacatcacagccaatcaaaatgagagttatcccctcaccagaagatcaggccacaagagagaccacaatcacctctcctaaccctagtgactataataaaaaagataccggaaacggttaggaagctccctcaccattttcaccccagtccccctcttcctctccaattgcaggcctaaaaagcaagagaaaattcgatccatagcacatgaaaaaactggtaccaaaaaatagcaaaaaaaattcctctttcaaccataagcacacgccactattttttcttcgatttatagcacttctgtcacatttatcgtccaagtccattggttagcgatgattaggagcgtgaaaagacgaatttacccttttttctaaccaaagtatgggtggatgaggtggccggaggaggcgcaggccttggtggcggcggtggggtggttgatagcgatggccctcgcatcccgccaccacagtcccaatccctaagcttgtccggcgccgtcgtcactaccatccccaagctctgccgttgccatccccaccccgagctcgttcggcgccgtctccatgctcgcgtcctattgccgccgccatcgcattccaccactaaacagccatgcccaagctcgtgtcctattgttgccgcagtcgtcttcaagctcgtgttcctctgccgccatcgtcgcccctgggttcgtgtccaggcgccaccatggtcacccccgatctcgcgtttcgttgccaccaccgtcgcccctgggttcacgttccaccaccgaaccgccatccccacgaactcgccacgcgcagccgccatccccgtcagaggcgctcagccgtgccacaccatggctggccaccgacgtggtggcgagatcgacgggacaaagagaaggggaaagatggaatagaagaaggtgacgggagtgctacaaatcgaaggaaaatcagaggcatgtgctttgagctaaaaggggaaaatttttgtgctattattttgttccggtttttctttttgtgtgccatgaatcgaattttctctaaaagcaatggaactgagcctaccaaaggcccagaatgtagtaaatatggcctacagttgcgtgggattccggcccgttgatctgcgtagttgtagggaatttcagcccatttgtctcatcaaattcagtccataagcgcgcgtgattctagcccgtcaatctgccaaatttcagcccatctaaaagtcagcagagaagtccaattttgaggaatatcaatcaaatttgaaaatatttcaaagagaactaaattacaatatgacattatgaccacacgctgagcacctaaattctatttgctctaataggacatacttgatatggagtatgattttccctactgaatattttttcttatttaactctaattttccatgctattttttaaaaacttgctggtgaagctggtagcctgatggaccgctttcggtcgaaaagaaatagtaataagttaaaaaaatcaaattaccctgaactactccaataaggagcctcctgtctacagcaccatatatatacctcatgtatgttttttttagataatggaataaacatcccgacctttactcaagagagctacaacccattattataatctagcactccacatcgagtgtagtccaactaagacagcaaacatcacggaaagataaaaacgaaccaataaaagataaagagaatacattattgaagtctatttatgaatcttcacccataattggcaaaaagctgcataagccgtcgactcaaacttgtggcatgcaacttttaggacctcttcatcttcgtcacatctttgcaatgtgcccaacaccggagccaacatgttgcacctcatatatgtaaatagaagtactataaaaaagacacggatgaaaattgtggcatagctatccaacatataacagcacccactaccttcacgccctttgaacattttttttacttaggttttttttctggtttttcgaggatatctcggtgtgtatatgatgcagtatcggacggacaactccctctcggtgtagtataagataaactcactttcaagacttatctcaccaaagtcatttggtttagaagacccacccccaaaacaagtaaatatgagatgcaatgcagtatatattcacacaataaattgtccaggctggaaagcatcagtttaatttatttttagataatggaatataatatcccggcctttactcaaaaaagctacagccaattattacatagtagttttcatgaacatagtgtaaatctaaatgaatagaacacaccgaagagaaaaacaaagaaaccagcctaacgtaaggagatcacaattattgaagtctatttgtaaatctccaaccataattggtaaaaagttgtataaccgtggtctccaactttcggcatgcaactttcagaaactcttcatattcatcacacctttgtagttgtgcccaaaaccggagccaatgagttgccctgaaaatgacctgcatatagaaaaatgatggtgatttgtcaaaaaccatatcgttcctactcagccatattgcccaacaaatggcagaagctccaataagtatcagtttactcattttcttatcaactcccaaaagccacctattaaaaatatgagatatgctaactggaagattaaaaccaaaagagaactgaacagctctccatagaaacttcgcaaaatgacaatccattaaagagatgttgaatagactcattcttcaaacaaaaagaacaactcaagctgccattccagttacgccttgccaaattatccttagttaacacaacccctttaagcaggtaccacataaaaattttaatcttaagtggcaacttaagcttccaaatacacttgtttctctcgatatagccattattaattaaagctaggtacatagacctcaccgagaacaagccattctgatgaaaattccatctaaaactatcagacgaatcattcaactgaatatgtactatagaggcacaaaactcatgccaacaaacaagattctgaccaactaaagctctcctaaaagaaacattaagcggaacagatcccataacagtggcaatagaagatgtcttcctccgaacaattgcgtacaaagatggatatttatccttaaaagccaagttaccaatccatctatctttccaaaatctaatttgttccccattgttgacaatccaagaacccatatttaagaaagtacttttgacattcataacactagaccaaaaatgggaatcatcttgtttcttgtcaacttgggttatagatttattataaagatattttctcttcaataaatcatgccaaaccccttcctcattaattaacttaaacaatcatttacttaaaagacatttattttgtatctccaaattatgaatcccaagacccccttggtccttaggttgacaaacaacattccacctagtgagcctgtattttttcttatggtcatccccttgccaaaaaaaaccgcgatctataataatcaattttacgaagaacccctttcggcacctaaaaaaagatatcataaacatggctaaacttgaaagaacagaattaatcaacaccagcctaccaccaacagataaatgcttggctttccaactactaagctttttcttaattctctcttctataagtttccaatatttattagaaagcttcctaaaatgcatcggaattccaaggtatttaaaaggaaaggtacctaacttacaacaaaaatatcagaatattgttcataacattcctttgcctgactaaagcaaaataattcactcttgtgaaaatttatttttaggccagataacttttcaaataccgataaaatcagtttcaaattctttgcttgttgcaagtcatgctccaaaaagatgatagtatcatctgcgtattgcaagatagacaaactatcatcaacaagatgatgaataaccccactcaagagtcccgcctctttagccctcttaatcaatagagtaagcatgtcagctactatattaaaaagaataggagataaaggatccccttgcctaagacctttgtaagtttgaaaaccattaccaatttgatcgttaacttttataccaacatgaccaccttgaacaaaagaagctatccactcacaccatctaggagaaaagcctttcattctcaaagtttgttgtacaaaaggccatttaactttatcataagatttctcaaaatcaatcttaaaaattacaccacttttatctttgcgatgtaattcatgtaaaataaccaccccttccctaatatttctcccaggaatgaacgctgtttgagtaggactaattaccttttgagcgtcatccattattttatttgtagcaactttggtaaaaatcttaaagctaacattaagtaggcatataggtctatgcctacttactcatatatgtgcacgcatagtagtgatacgcgcgtgtgcatatatatacatgtgtttcatgtaatgttaaatgtccggcctgtgttatgtattaggttatgttggagtagttttgt

SEQ ID NO: 21393 - DNA, 7568 bp, Oryza sativa
acaactcttacggagtatttcaaaatcaatcaagtagacccggaagcaaggaaactgctataaaaggagttccctgaacactaccgttggataaccggacagaatgtgtggcaaaaaaggaaaacaaagagaggccaagttagacgggttgtgtacgctcaccctgcagagggggagagatactacttgagagtgcttctcaaccacgtgcgaggtgcaacctcatttgaagatttgaggacagtgtcaggtacaacgtactctacctttagagaggcatgcgagaagagagggcttgtggagacggataagtcacatgacgattgtttgaacgaggcattcactttccaaatgccatctgctctgcgtcggttatttgcaaccatactggtattttgcgaagtcactgatatccgtgcactatgggacaatcacaaggctgcaatgtctgaagattacagccgagggaacactaaccctgcagcagtagagcagatggtgctacgagacatacgtgatttgcttcattccatggggaaggatatcacggagtatggtcttcccgaggtcattgatataggtattttttttcttatactatcacgtctttttcttattagtttacatttgcaccacccaccaatagtttcatgatgcatatatttgttttcactaatcaggtgaatgttgcaacgacgtaatgacaagagattatagacgaacttaacgtgccagtggaccaagaccatttagacatatacacatcccttaatgatgagcagcgtgcaggatttaatgagatcattgatcatgtaactaataagaagagccaggtattttttatcgacggcccaggtggcactggcaaaacatttctgtacaaggcgcttcttgctagagtgtggtccgagggattaatagccattgcaactgcgacgtctcgtacagcagcgtcgattttgcctggaggacgtaccgcgcactcgagattcaaaatccctattaagatttctcacaatagcatgtgcaacttcatgaagcaaagtggcaccgcggaattgcttcacatggcgtccttaattatttgggatgaagctacaatgacgaagcgtcaagccgtagagacacttgataggtctcttcaagacattatgggttgttcattgccatttggaggaaaggttattgtttttggcgatgatttcagacagttacttcccgtggttacacgtgggataagggcccagataactgatgcaacattgcagagatcatatttatgggaaaatattaggaagatcagattgtcgcgtaacatgagggctcaatctgatccatggttttcgaaatatctccttagaattggaaatggcactgaaaacactatcagagatgattacgttcacttacctgatgaaattgtgattgcttacgggaatagcgaggattcagtacacgaattgattaatcatgtgtttcactcacttgatgatgaaaagaatgcaagctctgcatcttatatgagcacacgtgctattctatccactaaaaatgattacgtggacaagctgaatgcgaatatgattaacagatttccagggcaggccaaggtttatcacagctttgactctgttgatgatgaccctcacaacagttatcctctggactaccttaactctattactccaaatggtctgccaccacacgagctaatagtaaaaatcaattatcccgtgattcttcttcgcaaccttgatccaaataatggattgtgtaatggtactagactaatggttagagcttttcaagataatgcaattgatgctgagattgttggtggacaacatgccagcaaaagggtgttcatcccacgaatccctttgtcttgctccgacgatatatctctacctttcaaattcaagaggaagcaattcccaatacgtctcagtttcgcaatgaccattaacaaatcacaaggacaaaccatcccaaatgttgggatctatcttctagagcccgtgttttcacatggtcagctatatgtcgcattgtcaaggggtgtgtcaaggctaacaacaaggattttggcaaagccaaagaaagaaattgattcaacagggaagagcactagaaatatcgtgtataaagacgttcttgactagtgagcaaaggtaggttcgcatgatctaaattaattcaaaaaaatattgaatatagtaaattgctcatcgaatgttactcaccatcgtcctcttgttttgtacagcacaccatcaccttttatatggaatgtcgtgtgattatcttctacatactatctcacactagatgtgtcagtttgcaccaggctgtcatttgagattgtaattatggtctgtattatattaagggatacatatgcttacaaaattgttctggattattttttttatcatggttcatccatacaacttaaatggataatgcaccgtagacagcccacaccaccgccatcgccatcgccatcgccatcgccatccacagcatacagcccgcaccactgcaatcaccatcaccatcgccgccgcctccgcttgctctgctgtttttgggggaaaagacagagagggagaatagggctgacgagtgggccctacgctttttagtttttctcctatgacttacatgtgggcctcatcttgtaaagttttattgtgcccacgcaatatcatagtactgcactttacataaaatatattttatgtatgatatgaattgaattaaagttcaaatgcatagatcatgtaaaaatatttttttgctaacatgaaattctaaaaattatttaagacagatagaataaaatcgtagcgtttagcacgagcatattactagtatttaaaagaatgccataattcaatcctgatggatttagtcctacccctatgacaagattacaagtggcactaacaaccagtagagaaaaaaaatacagttttctttaaggcccatttagaattcaagaaaaatatatactccctccgttttttaatagatgacgccgttgattttttctcacgtgtttgaccattcgtcttattcaaaaaatttatgcaaatgtataagatataaatcacacttaaaatactataagtgataaaacaactcataacaaaataaattataattacgtaaattttttgaataaaacgaatggtcaaacatgtaagaaaaaatcaacggcgtcatctattaaaaaatggaggtagtattttcatgcaagaatgaaaccgtgttttgtaaatccaaatggaactagcaacagtttgcacgtttgcgtccagactccagagggcctattgccctgctaaattgcaattggaaaaagtacaccgaaggtccctcaacttgtcatcgagttacaaaatcgtccttaaccacaaaaccagatacaacgtgtccctcaacttacaaaaaccagtgcaaactaagtctctcgacggttttgacttcgattttatctgccgtggcagttgactcagcgtgggacccacgtgggtcccacatgtctgcatcttcttcccctctcctcttcacctctttctctctctgtcctctctccacgggcaattggcagagagaagatgggcgcgggtggcggctggcgagggaggagctgccaccggcggcggcggcggcgtcaccgagctcgggcgtcaccggatgccgaccacgctaccgtgctcggctcatcaccagcccacggagcgccacatccatccgcatgtcgtcgtcgtcgccgtcaccacatccatcgcatccatctctctctctctagccaccattgtccttgtcactgcagcgggacaacgccactcgtcggccaccgcccgcactcgtctcgctctccggaaacgcaatctccatgtcgtcggtgagggcggcgccgcctcaccaaatacacctacacacggcaaacggacaccgcggaaactcatcaccaacaaccttccagtcaatgctgtttgaggggagattcagagaatcggaagcagttcaatcccaaaagcaatttcattgttcctaaatcctaatcccttcgcttgtcgccgatgagcgcggcgacggagaaggggcggctggacggcgaggaggattcaccgcgcgcggaggcgttcctggagatcctcgccgggtccagtcgggggatgcggaagcggaggtcgcggagcaggtgctcaggtcccgcgtctgctactcccgtcccaagtccgccgtccgcttcttcgtctggtcggggcggtcggtgaatcacaccggctacgcctggaacctcctcgtcgacatcctcggcaaggccggcatggagtagcccatgtgggacgccgtccgccgtccgcaccatgaacaaggagggcagcggcctcgtcaccgtcgccaccttcgcctccatcttctcctcctaatgcgccagcggcaaccacaggaaagccgtcgaggccttcaatgtcatggggaagtacggcgtggagctggacgccgtcgccctcaactcccttctctctgtcatgtgccgcggggacgaccgcgcgcaggcggcacaggacctgttcgagcacacctgccgctcctaccacccgtgggcctcctcctctgccgtctcgcttcgccgacctcctccccaccagccggcctgccacgcccagcccctcccctgccaaccgtcggccgcggcccgtcgcaccagcctgccgagcccgctgcgccggcctgccgcgcccagcctgccgattgccgcctgtggagagggaaggagagagagaggaagagagatggaggggtggggaagaagaggctgacgcgtggggcccatgtgggtcccacgctgagtcagctgccacgtcggacaaaaccgggttcgaaaccgccgagggatttgcactggttttataggttgagggacgcgttgtatccggttttgtggttcaaggatgattttgtacctccatgacaagttgagggaccttcggtgtactttttccattacagtttgggttgaacatgttgggccttgccgcttacggcccaattttatgtgtccaatcataacccgatttcgttgtcaatctgtgccttcacggcttctcagacttctctcctctatcgctagccacagatccgctcctggctcctgcaaggctgcaacctgcaaccccaacaccccttcgagaatcgtcgtgcgcgcaggtatgatcccctctcgcctgcgcataccaggtccctcgctcgatccaatcttcggttgattgaagcgaatctggaggctttgcctctctagtaggtttttttttcctgattatttccactcacatttgcttgcgcatctcaaacactattgtggagaagtggggaggtggtgaaaactggcaatgggatcgttgtgggccggatcagggatgaatcttgggggattattgccttctgctcgccgctatagacgtatgcttgtttagttttagtattctgactcttttcggctgatcgtatcatcataaaagctcttggtccactctgtggtttgattttgtgcaagaagaaatataatatcgcatgattatattctgtgatcgtagattgggatagagagcagatgttattttgtgcacgcacacttttaaaatcctctgatatggttaactaattccgtgacctcttcattcagcaaacctgtacatgggtaaacaagcataactgaattacaggcaagccggtagcttggaaagaaccctcttactcccagtaaaaacaataggaggcccactactgctattttctttattgtgcttctgaatgcaaagtagcacaagtagggatattaggtatgggagagaaagtccttttgttttgttgttatcctcgttattgtaactgttatccggtgccaaattagcacctgttattgtaactaaaagtcagtggcttttattagaagataacatcttccattttttatttatacctcttaaaatgtatcttgtgaatgctcgaattctggcatatgttatgcaatcacattcatttgtgttctgttcatttaggacttgttatattccactcggctttcactatgtgttattttgtctaataataaaatagttcctcacaccatgtagcagaaggaagatggatgctaacagacgccaaggtggaattcagcaattattggctgcagagcaagaagctcaacagattgttaatgctgctaggagcggtaattgttccacaaatattcattaagaataacgcggaaattgatgggggggaattgcttatgttgtacgaaatatgtgcaatgattgcttcgatatacctacaacaagattttgctcgtatatttctttgttgatgtctttatagggtaattttgaatcatcctgtttgttgaataagttccattgtaccaacattaagcaaatcaacagtgggaaaattccatgttcagcagaatgaaaacatgctttctggaatttaaaacatgttcaacagtgggaattagagatggcctcatgttttctgttagttcctcgaaaattgagtgaaaaacatgctttcttgttactattcttctgtaccttaactaaggtaaagtacctgtctgattcctttgatatctttttagcatgtaattatcatggtattttgttcatatagttggacatcgaatatatcacatatattttggaaataacacctgaatggaaatgtataaaaaaagtggtatgttaccctgaattgtgccctttgacagcttttgtagaatgcgatggccttgtatgatcgtttacagaaaccatgttctatcttttgcttctaagcacgcaatacaaacatgttactcctactcattttttattcaacatctagagatctgacttgggtttgaaactgaatacctttcctattcgtcaggcaaaagaggaggctgagagagaaatagctgagtaccgtgctcagatggaagctgagttccagaggaaggttgcggaggtatgcatctttcaatcttgtatagttcgtggaattagaagagctattgccgctaaccttcctgtttctttccagagtagcggtgattctggtgcaaacgtaaaacggcttgagcaagaaactgacacgaaaattgcgcaactgaaggagcaggctgcaaatgtctcccctgaagtgatccagatgcttcttaggcatgtaaccaccgtgaagaactgataaaagttggacgtcctgccgacaaattaagcagagattgggctcaaattgtgtgctacctttttgttaattccaagatggattacaaatttacggatgtcagctatagccacgaaccctgttcttagtcatacaataccaataagccgcagcagatttattggtgaacacgagggatgattatacaataagcattcttgttgatgtgatttggcgagcctttgttgagctgctggagagaaagtgaatgatcctgtgtgaaactgacagttctagctctacctgactaccttatcgtttcctgccattctctcgtcagagac

SEQ ID NO: 21394 - DNA, 14097 bp, Oryza sativa
tacatgctgaccagttttttttaagatgtgtttataggtgaatgatgtgcgtgtgtacgttcagatgataagtgtacgcacgttgtgagtggttgtgtttgtactatatttttttaaaaaaatggctaatgaaatcacttgagcatcatgatcgaccgtggaaaatgttacaactcagcgagggatttggaaacatgttttgagaatcaacaaggtttgtcgttggaaacggcacggaactaacttttggaaggctgattggtcgactgtttgtcgttggaaacggcgcggggcatccagctctcaatgccgtccttgttcagtcatgtagttaggccaaggtttacagtggcacaaaggcagcgtgataattgttaggaacgtgatatactgatatacaagtggcaccctccaatatagagcgattggtgagtacggagtgagtacctagttccgtgggacgacgtccaggagatcgagctgcacacaaggaggaccgaccaggttcaatgggcagcgtatcctatacacacaggccttaacacggtcttcgaaatgctactttaaccaaaaatgactacaaaagtaaaatattttaaataaaaagacttgcatactatgatagtaacattaaatttacatgatttatctttcttaatttatcgctattaatagtcaaaattaaaacagtttgacttggcactattctagaaatgtttatattttgggacggacggagaaataaaatggcaaaatttgctacaggacaccgaaagattgcggcctttgctgtgagacacccaaagatcgtgtatttgctcgtggacactgtaaaaatgtggtaattagctggcggacaccggccgcattattttatcatttccggacggagagagaaactttgattaaagacaagtttacccatgggcccacttgtcaatctctctttctctgttcatcttcttcctctctttctttgttcatcttcttcatcttctctctttctcattgcaccgccaccgagctccgccgtggccgagccgtcgtgcgtcgtcgccgtcgacagtgaacctcggcgatgcgccgccgccgcctcaccgtggccgagccatcccatggtgaccccatcgtggccgagccgtcctagttgcgagccacgatgcgttgccgccgccgccaccccgccgcggccgagccgtcgactgagccgccccgccgccactgccatcggcgaggacgaagaagccgttgagaagtgcgcgcgcttattggggctcatctcgccggagagcttgaagatgggggacttctgtggtggggattggaacatagggttggtgggggcggcggcgcctccgcgtgctggtggccatgggtttgaggtgggacaaggcggagaggtcaacgagaagggcaaggagcgcaccgacgagggagaagaggccggagaaggggaagtcccgccagaggcgtcgcgtggcaacgacgcagtcggcggcggcggcactgccaagcgtgcgccgcgctggcggtgagacgccggtgctgatgagcggcacgaggcacgacgcgatggcgatggtgaggctgacaaaggtcaggatgctgttcgtgcggtgcggtggcagcgtgaggcactcgtcggaggagtctgtgttggacgacgacatctgggccgccgcgaggaagaaggggaaaagaaaagaagagagagagaggaagaacagtgtcaaagggtattttggtacttacacaactctttctctctccatttcaactgaaaaaataaaataatgggaggagtgtccagtagctaattaccatatttttacagtgtccatgagcaaatacacgatcttttagtgtctcacagtaaaggccacaatctttcggtgtcctgtagcaaattttgcctaataaaatagagcagggactgaatcttcaagtcaaagaagaacatagtattataaaatatatacatatatctgcaaacacaagattttcgtataacttcgattacctgcattctaattaatcgttgaacggtattatgttttctgcaacagtgggcgggctaaggtgagatcaaggctaagacgagagtgccatcaaacgtcgaattcttcgtctggctagcaatccagggaaaatgcctcacagtttataacctcctaaaaaaattgatatcatcaacgaagttgtcactcgtgtatctcagttgatgaagaatatcgcaagcatatctattagtttcatgtgcttacagtaacagtttttctttttacacctactgacctacactaacagggtttggaggctatcaaaaggcggtgtttctttctaacttcttggagagctggggcaggattatttgagtgattggtgccttctggctggtagcaaggtgggcttttcagacgagctataggaaaatcctttgccaccttcttcatgttggtatgttggctgattcggaagaaaagaaatgctagggtgctcgaaaggacgacctcgcacgccatggtaactattcagggaaatcaaaacgaggtttaattcttgaaagaagtagttcctgtagtgcgaaatgttgaggttactagtgattggttgaggttggaccacgcctctctacagcgttctattgatatcatgtaatttctaataagctcccttcctggtcttaatgaaatttgcttggccgttttctttcgtccgacccggctaaaaaggctaaagctaatggagaaacgcagaccattcagttcagtatgcttcaacgtcaaacgccaaaattactttgaggcaacggaggagaaggcgaagttttcaaaaaaagttttttaaaaaaggagaaggcgaacgagcaaatttacctgcagagaaatcacctacttttcctccttgaacagttgcactggcctggttggaggggcgcaggcttcattctcccctatgcccatatactgtaccgggaggacgaggtacatgaaaaacctggccgggcttcatcaatccacgagtcctcccgcgcgacgactcacggtgcattggcgcccgtggtcctcagcacgttgtcctgcctgcgcatcagtcggttcggccagccggccggctaggcgagcgtgcaacgctgccaaaaagccaaaggccgaaggtaaacagcaactcgtgcaacaaccacccgcgacagcgaatgtacctacgaatggtgcagagctacaaatggcgagcgtgtgcaacgctgtcaaattaacagaataactggttttggcttctcctggcagaggagtagatcaggacactcgagttacagttgtacgcggccacgcagttatacttggcagcttagccgctacgcattcctctcgatgtctgtacgtgaccttgtcctactccatggaagacaccgggcttcatttcggaggacatagtaacagtgaccggtggattaacatttgttgccttctccatatatgcaaccagacgatccgggacagatagatcataagctctaagtctccatctccgacaataattgacgccctcgtcactcacttccaactagagccactatcgtgaacgcccgtacgtgcgccgttggcccgtcccctgtcccgttaatggatttccgcgcaacaccgatccgatctctgtttcctctcatatgtcgccatgaaagttaccataaaaaaccggcccaactccacgctatatcgtacgcagcgcgcgcggtgaggctccggtcccggcacgcacgacgccgcgcgcggacagacacgccccgctcctgccgatcgatgcaccaaatcctcccgttgcgacgacgacgacgaggtccacttccccacctccgcttgtccacggcccagccgcccgggttgcttcagctggaaggcgtctcgtgcagttgtacgagccaggaagtgagaattcagtagtactaagttgcacggagcgagagccttgctgctcccgtcccgatggcgactgcgccgtgcatgggggaaaacggcgatgtgtttgcatgtattgcatgtgtggcgtgtccgctccgcgtggtcgatcgcttagctataccggagtaccggacaagctaggcgcgagcggccagagcggtggcttggaccgcgcactagctgccactcgaatcgttcgtacgttgccgcattacacatgcatttatgctcgatctcgtcgcgtgccctcgcgtctgaaggtactcgttcgcatgtgaccgtgcagtgcaaagatgctacgcgtatgtgttgattggctaccttggctgtatcattatctacctggggacgcattacgagaggttggttgcagagaatgcaagcgcgttcaagcgttcatgcctgaggtgatcgtttaattatgacgttgttaattatatgcgtaggcgcggcatgtaacagaggagaagatgcggccaaatctgagtcgtacggctgctttgtcaccctgtcgtcgattagatccgggttgtgttaagttcacgttaaaattgaaagttcggttgaaattagaacaatgtgatggaaaagttgaaagtttatgtgtgtagaaaaattttaatgtgatggaaaagttaaaagtttaaagaaatattttagaactaaacgacgctggttattccagatgtggcattggctagctggaccctctacagtgattcacaatgctatgagatctgtagcattttttctcggtttgggtgtgtttagtttcacgttaaaataggaagtttgactaaaattaaaagtttaaaaaaaaagttaaaagtttatatgtgtaggaaagtcttaatgtgatggaaaagttggaagtttgaagaaaaaattgggaactaaacaagggcttcgttccctatctagatgttctcgttttgctgatgaactacgggtgtgtttagttcacgctaaaatttaaagtttagttgaaattggaacgatgtgatgtaaaagttggaagtttacgtgtgtaaaatagttttgatgtgatgaaaaagtttgaagtttgaagaaaaaaatttggaactaagcaaggcctgcgttacaccgcttctactccacatgattgcaagcctcctacctggaaaagtcagttgacaggccagaaatgattcagttttcattgtggacagtgttaatttctagagaaaatcccctatgtacccatgaaagttcacctaatcccttctatacccctgaattttgctcaatcccttacatacccctgaattttagtttggatcccttctatgccctttccgctagttgaccgttagttgaccgttaaattcttttgaaaaagtccattttgccctttgctatgaagaaacataataaattaatgaagtatattgttggaatgtaaaaatttattggatgggactattatatttatgagtatgtgatgcaccatattatttgtgacaaatttacttttacatatgatataaaaagttgatacttatttattattagttattaaaagttcttttatgtaacatatgtgttttcatagtaatacaacagatttgtttattacttcagaacacatatgctaaaaaaaatcttttaataactaataaataagtattaattttttatgtcatatctaaaagtatatttatcgcaaataatatggtgcataactatctcataaacataatagtctcatataacaaatttctatgctccaacaatatactctattaatttatatgcttctttataccaaagggcaaaatggactttttcataagaatttaacggtcaactaacggtcaactagcggaaagggcatggaagagatccaaactaaaattcaggggtatgtaagggattgagcaaaattcaggggtacagaagggattaggtgaactttcaagggtacacaggggattttctctaatttctatcacatctctatatgattgtttaaaatccaagtcttttttgtgctttatataaagttataaactactcacaaggtggcattgatctcaaatgatataccacaatgctgcctaaatattgaatccaacgccacaacttcaatacttttactatattgaatccaatttactactagcagtataagtttgagaaaaaaattcacataaatacatatactttgatcaaactatgtgtatcgtaaaactacaggtttaatgttaaatttatcccagaactacagatttaaaaaatatcatatcgtaaaactatatatttagtgatgaagttatcaattaagaactacacattttatattttatatccataacatattgagattacaaaagttataattttgtgatatgattgatcaatgtacatgtagctctatgaaatttactctatgttttttttggtattaaccctccatgggtagtttatagctaggatggtattattacgaacctgtacatacacatgaggcttcgatcgtagtataatttgtacatttattatcaaaaccttatgggcagtttatatagagtacaagacgacttggaatctaaataatcctagagagatgtgccatgatagccggatcttcccccagtctaatcgagtactcgaaacacaattaaccgatcagtggtagtagatcattattagtactttcagctgatccgggaatggtgggatttggggtagtttggtggtaaacaatggaaaactctgatagggggaacaaagttttgcgtgcatgtttgcttgttcgagcgatatttgcaatattgtttgtctgtagcctcacttccagtactatttgcaatacctcggtgttaatcgatgcattagtttatgtatacgactatatccctccaatctccagccaggcagaaattcaggattccgatcctaaaagtgagcattactcctccgtgtgctcgccccgtagcaaaacctggacacgggtcacatgcatgcgtacacgtcggtatgcacccctggttcctcggatactcatctcgatctgtatacgtcgcatttgggagatttctgaccctcgcaaaaagctggcctgaaaaggccacgaaagtgcgtcgtgaagtgatcggccaggtgaaaagagcgaagaattaagccgggtggttcacggttcaccggttacacgttgtcacgttgcagtcgcgacgggggataatgacgatatgccccccacgctggttgttgccgatcgatccagcgtcgcggaccgcgcgcggttgcagcggaggagctttggatgccgtgtgctcctgtgcgtgcaggtgcaggcgagccgcgatgggtgtgggtgtggccgcgcgtccgcgagagacgaacgcaccaaagtcagacgcgaggaatgggatcgtgatgcacgtaaggggtacggaccgatgccaccaccacgagccgttgctgcagcggcacagtattttatccgaatccacatgcattcctcctcttcctctacttttcctgactttcctcctcactctcctctgccacttcgcttgcgttctgttcttcatctcctcctcctcggtgccgcatttattactcgacagagtcagacagttcgagcttccatttcacacacactccaccggctcccccttcttctgcccccttgcatttcaccaacgcttacctgctccatacgacctccagtgcagtgcagtgcctctgaggtctctctctctctctcacacacacacacgtcctctggtcaccgacgctcctcctactactagtacagtggtaagcacagccatttctccatccatgcatccgtctatcttggcttcgttttgctacttcgttgatcgatccctcgttttacttaccttcgccttctcttggcctcgttttgctacctcagtgatcgagcccctcctcacttaccttcgccgaagatccatggcggaggactaagctccggctgctgatttcttcgctttggacgcccgcaaaaggtacaacacttctcatcttcctctggctctactgcctcaacgagtcactgttcagtccaggcgattttcctcttcctgcaatgtcggtgagcgagctaccgaatggtctagtagacgagaagccagttttgttgccagttttgtcgctaggctggtaaacggcgtcctcgcgagggtggtgcaggtgcaggtgaagcatcagcgatgccgggaaagaaaagaaagggagaaaaaaaaagatagcatgaacaatccccaaacttttcagctccgcccactttattacgccaatctttcccttcatcaggtcatggctttccgtttgtttcatgaccatgacttcagctgcctgcctagctagctagtacctttggggaaagcggccaacaaaaagcctacgtccccgtcctgttcctttcctcaacctcccacaccgccgtccagttcaaaattcaaagttcaaacacctcatcctccctccggacgctgcgctgcacggccgcgcggccctcctcggcctcgctgccctgaccggtcagcgtcaccgggcgtccgggccagtgggcagtggcagcagccgtaaacccgtataggtgggacgctcatcccgcaccataaaaatcccgtcaggacaacacgggagcggttagcgtgatccgacccaaatctaatctaaacccgtccccgtggattacgcatcattaccccgcatctgctcgtggattttattagcttctcctctcgctacgtttggggtttggtttttgatgggctaattattagcggtggtggaacctgaaaagtcgcgtgttttgtgctttgcgttttgctcgcttgccgtgtgtagcggtggactggtggcgtcgttcgtgtcgcgcaccttttctctttttttttcttcaccgggaccaactggggaagaaagatttggggggtttttggccgtttcggcgtctcatctttcttctcgccgcgcgcgctcgtgtccagtcgccgccgtagttgtacgagcgctatccttgagctttggctgcacgggattcattgcaagggatgcggtggccagcgtcgtaacttgctcgtttcagatcgtgacgctgtggggttctctttttcagttactgctgctactgccggtaccggctgccgaggaggggaatgaggatgaagacgctggcgtgctgccggcggcggccgcaggacttcagcatcgacatggaccaggagcctgacagtaagcctgaaatctcgaatctcccccgtttttgttttcctgcctcattttttttttacatttctttttctgttcgtggtgttcttgcccggttcatgtgcgtacagctgccgcattgtctcatttcacggtgtatttgctcatttcggtcctcatttctcaagtgcatgagttggttgtaagtactactagctgtagtagttgttagttgttggatcgatggtagctgcagcatgtctacaagccccgggcaacctgctgctccaaatctggccaagatttggagctgcctaacttttcttcacaatttttttacccgcacaaccaaaatccatacagcaaagaagtaggagcactagtagtgtgatgaaacaaaaattttcagagatatattttcttctagtactagatgtgaacgtgatagggtcatggagtgtgggatagcgctggtgtcagcagcagtagatttggcactgagcagtcacgaccaacgcgactgttcatgcctcacgggccctcctctcctctcctctcctctcctctcctctcctccctgctatgtgcttggtctccgacggaggctgcagcacagtgccatcagccactgacgttaggaacgtgggagtaaatgggagtcacgaaagatgcggcaactctacgagtaaaaaaaagcaaacaagagagagcaagcgagtcatggcctctgctatcttgatctgacgcgaatccgggcggcgccggccgcattcacgcctcgccactatccaactgcttccggtctacactagtcttgacttttaccagcctagtgatatttttatactcttttgtttgcgtttttgatctctctcttgtatccgttagcttctggtgtgtttgttcatggagtggtagtgcaggagtacaagactacaagcagtagaaactagtactagtaccttttatttttggagcggcgtgtgtcggggaccagctagctactttcagctgggtcaagtgcgacatctgcggcttcattgactttggaggataaagaagtaacgtagtggtaccctgctttttagacggtgagcactgagcaatgtgagcaggcaggaagttggggaggagtagggagtatgacttaacgactaactacaatttagaactataaatcgtgtgcgccatgtgagcatctcgtgaaagtgtaacatagtttttttctgtagggtagataaagaaccttttttctttgtcttacaggggaatctgggaatctcagtggtggttagcagtaaaagggaccacttagaatgttttgaagctatcggctttcaatgggagtgtctgtttgtgggttctgtggtgtcacaagaacctagcctggtttaatgtgtgcctacctgtgcttatccgagctaggtttttagtggtagcaagcttgaactagcgtagtttgtatggaagcggaatgaattatcagcttgtacattgcggtggagtgaggcattaagcgttacagatggcacactgtactatctgtagacagaagcacatggagttggcaaaacatcagaacatttgcaatggcatactcgtactgtcatgctaaaggcattttttttctcaatatcttgagtgtattacggtgtacagtgcataattgctagacttttcttgagttatttgtgaagtgctcttcaaaagaatcattgggtcgttgggaaatatttgtgttaaaatgtatttctgaatcagcacattagagtatactgaaccaaaccctgatctccatgtctgtgcattttaaatgtaatatggcggtataactaattttattcaccgttttcattatcgcaagatcaggctccctggaaattcttaaatttatgtcgcatggtcatctgaatgatttaaaatcttgccaaaataagttgaaaataccaaatgatgtaggggtgatgacgtacaatggccttgagagctgtattatcaacagttcctcttatgacgatgatagtggccttagtgcaacaacgggagcagatgggtgtgtaaccactgattccgttgatgatgaagtctcaagttgctcctcaagtaaagatgtttctagctcttcgttctcttcacaatgccatccactgagaaagcaagaggagcattcactttacgagttggatacactcagtgctgtccatctacttcctctcaaagggaagaagccaatcacgtataccttgagtgcttcagacattgaaaccatgaaggagaagtttgggaagctactgcttggtgatgatgcttcaggaggagctagaggtgtttgtgctgctctggctttgtccaatgccattattaatctctcaggtatgcttaaccatttgtttggaaactatgatattgtccattgtagaatttttttgggtgaactatcatctttctttcctttctttttttgaagtatttgttccatactcctatcatcatgaccaaaatgatcatttcttatgccagccactatatttggagaactctggaagctggaaccactctgtgaagagaaaaaagtcaggtggcggaaggaaatggactggttgctttctcctacaacctacatggttgagctggttcctacaaaacaaaatggagcagacgggtgcacgtttgaggtaaagatccattgaataaagcctgtaatttcactaagtgctgtgtctaatgtttcttttactgcagattatgaccccgaaagcacgttcagatgttaatgtgaaccttcctgcccttcagaagcttgattccatgctaattgtatgtttttgttattattatgttacactctagtaaatgaacatgcatatctgacaaagttgccatctcttttcattttattttacaaatcaaaaaatgttcataaaccatcgttcacttaattatgcaatgtcatagtttgtatctcctaatcctgcatgccacaaatgtgcaggaagtgctggactcgatggtagacacagagtattggtatgtggagagtggtagccgagctaatggccggggcaaaaagaatggtctgaggcagacgaagaagtggtggctcccatcacctcgtgtgccagatatagggttgtctcaatttcagagaaataggcttgtttttcaggctaagctggttcatcaaatcctcaaagctgcgatgtcaatcaatgaagaagtcctgcttcagatacctattcctccagctgtcacggatgctcttcctaaggcaagtaccatttcaagttaacttgtttgtgcttcatgacaatctctgtgaatttcatgcttcttttctccctttaattgatgattgtactgaatatatggtcttaaattcttttgcagtctggcagagctggcttgggtgaagacttgtaccatgctataaccacagagtacattcccatagaggaaattttcctctctcttagtttaaaaacggagcataccgtgctcgagactatgaaccggttggagggtgcagtttttgcatggaatcaaaggatctcagaggaaaagagcaagaaatccccaggaaggcattcctggaatttcatgaaggatagttcatcagaactcgataagatgtccatgtgcatagaaagggttgaaacacttatgcagcttctgaaatccagattcccgagccttcctccaacttttatagaagttgtaaagatccaatacaatgtggtaagttcgccattacataacaaccatttgtgctcgcgcagagcatgtaacctttgtccaaaatgcattatgaaaccttatgaaatccctgaacatgttttgttctgcttgctgaattttttgccttttgaacgaacttactacatatctacgcaggacgtggggcatgccattgtggaggcctactcaagggttcttgttggggtggcattcagcatactgtccagggtagcagagattctgctggaagatgacctgatcaagaagcccaacacccctctggccacactcaagttcgacctctcctccgacgtgtacctcgccggcatcaccgagacgccgccgggccacatccggcggtcgctgatggaccagatcagcctggtcgacggcagcctcgacgcggtcgtcaggaagaagggggtgaagcagcttaggtggtgaaaaaggacatgaagctgtgaagtttttctttttggcagttgtacagggtttgtgatgatgatgcatgctgtgctgcgcgctggctggctacataaagttggttaagttcaccttgctaatacgtcctgtatggaacgggctaaatagtgtatgcatggtaaaagctactagcattggccgcatcgtacatcaacgtttgcagcgatcaaagcgtgctgttgcggtgcattggaccgtagcctgtggttgactgctggatggcacggcttgggtgtgtgtgcgacgagcagggtttatcaaactgtttgggaataagttcaccggaggtccttaacttaacagattttgagatcccttaaccacaaactagaaatgtgtatctctaaactcacacaaaccattcatttaaggtcctatgataatatatatggatggtttcgctgacgtggcatcctagttaataaaaaaaatttaaaaaagtatgtggagcccacatgtcagctgtacattctcttgggcgaccgcggatacgggcggcgggcggagcgacgatgggcgaccgcggatacgggcggcgggcggagcgacgatgggcgaggcgggatgcgggcggcgggcggagcgacgatgggcgagcgcggatgtgggcggtggcggagcgacgatgggcacagcgatgggcgagcgtggatgcgggcggcaagcgagtgcggcagtagtcggcgggtggcaagcgaagtggtttggg

SEQ ID NO: 21395 - DNA, 26032 bp, Oryza sativa
tggcggtcgagtcacaggggagctctccgagatggaccttcacttcgggaggcttgtcgacgaaggggaggagcatgacaaggacggggttacggtcggggtcgccgtgcaccacgcggagccggtggcctctcccctccccccgctgctcttggatatgtggtccgccaccgccgcgctcatcccccgttgccgctccactgccgcgctcgcccgtcgtccgctccgcccgccaccactctatcgtggtagtcccgcggttaggtggctactacggttatcgcgaaaaccatatggttatcatgaagtatatcattgtttcaaaaattgaaaatgttaccatatatgataaccacgataatcgcatggttttataaacctcactctcgcttccctcgttccggagcaagacccgttcggtttcctgcagggacacggcgagaggaacgcgacacggacgtatcgctgtcagctgtcaggtcaatatttggcgtcctggacgggggctagagaccggtgagctgatgacctcgtccggtcgaccccgtcgccgaatgcttcagcgtttgagaaaaaaaggggaagcgcagaggcgttcacgggtcacggcttccacggtcgcccgggtcctcgagcgtccacgggcaccgccggcgcggccggcggacgcggcaactggcagcgtgctagtcccggttggttggagggttgacatgcgccgtgtggctgacttgccgtacgttggtcggcgttttggcgtggcattggagatgggagattgggagtgggagagaagggtggcgcgctgcgacttcgcggcgtggactccacaggagctttttacggtgcaactgcacccgtgtgcccgtgactcggtttggtctcgacattctcctcgactcctcggcgagatcgtcgacggtcaaaacaacgtgtcagctgctgtcgcgtcgcgacaagcccagaaacccgtgctcggagaaacactgatcccacaaatccactggcgtccttgctttatcaaagatctaaattccatgtagtttcacgagctttttcttttcttttccacggaagtagttccacgaactgtttataaaagaactacgctagtagtttcacataaatgtatagtgaaaaccatatctaggtggtacctgcaaacaacggtataacagttcttagaaaaatatcatacatatagctaagatgatattagacagccccagagttgtaaaaataaactcatcttcgtttgtaagatacttgtcattggttagttcattttcaaactaaccatcgttaaaaaacaaaggaagtataaaattgagaagaatattgctatattttaattgtgtgattttttgtgaaattccagtcacataaaaattgtacactaaattgttgcgatgtgcaatacgccatttacttttttatgcagttttattgatatatatgggtttactttatttttatttgagtttgaaaactttttgtatgtatttttgtaaacctttatgtattgtatgtttcttttttatgtagctcggtgattcttttcatataggaatagtttattgcttgaccttttgtcgagcaatccccttacctctggtcaggctgtcgggggaaaaccctgtcttggtttccctgagatctggatggacagcggcggtggtgctcatcgtcgttcattttcctggagatgtcattttggaggtcccttgccaaaacttccttctggtagttagtgcaagcttcctctatatgcgttgttttcttgcggcggtgctctagtttatatgagtaggcgggctgtagggggagagcggatccattattctttctcaccctcccccctcaatcccaaaggcgtgatcagagttgagttaggtgcttggttgtttgggattggttttgggtggtcccgactgtagcttccttgttagcctagcggtggccgatccaatgctagccttctacttgagtatgtatatgtgttgtcggtgcgtgtggtggtgttttttttatttctttcctaactactgccttatagggtacttgtaatttttttcctactctattcaatggatcatcacgcccgtgttgtgctgatcgctaaaagaaaaaaatgagaaaagtgattgattttttttctttaaatttgaatttcctgatgctcccaaatgaggaatagtggataaggaaaaaaagaatagtgtttttctttgcgatttggttagtttttgcatcctataatcaaagttgagtttgttcttattggatggctgtttatttaaatctaaacttcttattggatgattgtttatttaaatctaaactactccctccattttacattataagtcgtttgatcttttcctagtcaaacatttttaagtttgatcaagtttgtagaaaaatatataatagtattttcaacacaaaacaagcatattatcaaaatatattcaatattagatttaatgaaactaatttgatattttagatattgctaattttttctgtaaacttgatcaaatttaagaaagtttcactagaaaaaaaagtcaaacaacttgcaatatgaaacgaaaggagtagatgtgtattttttttacttctaacaaaaatgttttcaagtttccatagtatatgttctgcggttatatattcaaatcctgtgtcatgcattaatttcaacaattcttgggatttattcatacaaagtatggaataaaattgaaagccaacaaccttttcacatctaccaactctgaatatcgaaccaattctgacaaaggctgacctaacacatatctctttttttcttttgttccttgaacgtgctgatttttacattgttttgatattggtaccaatgacgaaattgcatttatctatctttccatgtgatgggtcaatcacatcgaatatatacacacacaacccaatatatcaatttttctagcacttgcgttaacttcttgttggtttctctatgttgtagatgacatgaataatttaaaatttgagcatcatatgatgatataaacacatcctaaagctatagtgtcgatgaattttagcaactatctatcttgaacactcaatccactttatgtttcataacacatctattgtaagaaaataaatatattgatttctacttaagttgttttcgtattaatatcactgacaagattgtatctatctatctagtctatagagtgaaattacgtcggatatgtaacacagcctaacacgtcaaattttctagcacttgcgtccactttttgttggtttttttatactttagggttgatgtactctagcgactacctatgaacactcaaccactttatgtcttgtaacacatctatctcaacaaaaagtcctacgtttctatcttttgggtcaattgttcacatttatttgtaaaatagcaataaatcacacatcaattatactatttcgttgtttccatttttttttaccaataatgcatttcacatattttcccactaatggtattcacatgccattcaaaatagcaacgaaccatatacaaccggagggcgaaatatgtactactttcagaacgtggtcaacaaatttgaaattaccgtgtaacctcctaacaaaaagaaaaacacaacgaaacacgagttggtctttcatcattttccacgtacaaccgcatgacgcgaagatcagaacgtatcagacggtcaccgtgccatctggacgacaaagcagcgtgggccggagcacgtgacggcgtcgtcgataattagaggccgttgctgctgtgcttaccactgtgtgcacattgtcatttcaccccctttgattaattaaaaaaaactcgacgcgtaaaaatatatagaagtactaagctaatcgctggacggaaaagggagcgaaaaagaggcgagagggaggtgtgacggagacgagcaaggaaagggaagagagaagagacgaaacagggaggaggggattgggactcgccgcccccctctccaaattccccactcctcctcctcctcctccgcctccgcctccgcctccgccgccgccgcagcctatcccctcgccaatccggcgaggtagaggagtgggtctcttctcgtgctctccccaaaaccccgcgcgcccaattcaccggggtcccgagctcccggcggaggctcgggagcgggagcgggcaggggcggaggagatcggatcgggggaggggggagcattgggcgatgaccgccgcctaggatgcagctggactccgccggcggccgcttagctgctgctgctggtgccgcttatttggaggagcgtgttggtgtgatcctagtgggagccgggagccgggagccaggtggattgggctgaggtggtggtggtgggcatttgatctccgcgggggcggcggcgattgggtgctgggaggcggttgcgcgtgtggtgtatggaggtttcctgggaggtggacgcggcggggccgccgtggaggccgagtgagtccacggcgttccttccgttcgctgctgctgcggcggccggggaccgggcgggggcgtcgttgtccggtcgacgcaatgggcttgccgcccgctcaagcaacctcagctccgtcaggaagaggcctgtacgtttcctgcaccttccccttctcacagggctacctaagatgcttgcttgatgcggctgcggtcaggcctcgctttgctgaattgtcaattgcattgagctattcgcacatggttacttagctggaatgcgattagcatcaggtgcttgcaaggaaccaatagcttaaactctggtcgcttgaactagctgtatcatatgatcacccattgttgctgccattttttcttattgcttgcacgcatggtctagattattcgattgctcagattttctattgattcttcagctacaaacttcatttctgaaagctctcagcattgctaaccagaaatccgacccctgttttctgctaaattcgaatgcactgttaagtttaatgtacactagatttgtttgcttagcttgttcttctaatcgtatagtcactagaacaggtactttactgctacaggcggtcctaattactttgatcataattcatgagcgaatgggaggcattgcacaactcaaattgacttgaggatcctagctttttgctaagttaagatgttcctttaaattggtatttattttttggcagcataactttgctatctcatccaggggtaagcacaatactttagggacaattttcaactttgttgatattctgaatgtattatattgtaaaatgatgagggaacagtctatgtgacattttttttgttacaattgttcaactgtgtatgacacctccttcatatacttgtgatgcttcactctaaattatattttcttattcctgcagtttgttgcaagattaaccacagacattgtccaaactttcggaaaatgcaatcctgagtttaagtactcagattcactgaaccccaagcgctttctcaccaacccttcagttccagctcacaatgatggccttgataatgcaaattctgacctcatcttgtatgtcaacttggaattggttaataaaaagtcggaccggaggttagttttcttcttgacttgttaacccttttatgtgattcaatatttgtgtctgttgtccatttcttagtgagttagagcactcaaaacatttttaccagatatatctcttttcactattttgttttttatgttataagttagaaatatgtatgcacattctgactctccattatactaagaactcagatgtggaaatatgggaagatgaaatatgtccaaaggactgccatattgccacacattgtagtttctttcaaattttcaacttattgaacttaggcgataaagctatccaattgatcaattcaactttgtgttcatattttttttatcagagttcctgatggttaaagttaagagtacctttacggtgctctctagtattctactacaagtattattgccaatagaagtgatctcaactattaatttatgagttctactaccagtagaaaatattattatactaccagtagttgatgtggtagtataaatagatatgatctattggagaaaaaaaatgatctagattggttctactaccagtagagagcattgtaaaacacctctaaagttaaactatgaacagcatcagattggactgcactcatctttttattgttctaagtagggtacgttattaaagaaatgcttggccaaggtacgtttggacaggttgctaaatgctgggatggagaaactaacagctatgttgcagtaaaggttataaaaaatcagcctgccttttatcagcaagctatcatggaggtctcactgttgagcatggtacagtagtttacctagcatttactcacttgtgattgatgtatgtaacgactggcatcacaactgtgtatgctcaatcttgcagctgaatgagaaatatgatcctgatgatcaacaccacattgtccggatgctggatttttttctctaccaaaatcatttgtgtatagcatttgaaatgcttggccataacctgtaagattgtcgtacttctcttcgctaatctattatataccatgtaactaattcatgtatcacttaaactcccacatctagttatgagctgctaaaaaggaatagtctaagaggtttgcaactgaaatatgtccgaactttctctagacaggtaaggttttattttcatatggtgcttgaatttttgaattttaaatgcattgattaccatattatctatgtctaattctttattggtcagatattggatgcattggttgtcatgaaggacgctggcattattcattgtgatctaaaaccggaaaatattctcataactccaaagttagttgtctcatctcaaatcagcacttgatttgttcactgtttgcatgctattaatccatccacgctatatctttgcagtgtaaaaacagcagctggggttaaagtaattgattttggatcagcatgcttggagggtaaaaccatttactcgtatattcaggtttcattcaaactcacccatcagtgtgaactctgaattcatgttatagtaaaattgttgatttaaagaagcttctccttttttttttcttttccagagtcggtattacagatctccggaagtacttcttggttacccgtatcctgtgtgacatctatttttcactaggaaataccttaaagctgcacaaatgtcttatgcttttaatttgtttttctctgttatgtccattttaaatttgtcattatgtggtgcagcttttgtgaattctaacatctggatttgtaaacttaacaagtactagatataccacggccattgatatgtggtcatttggctgtatagtcgctgaactatatataggattgcctttatttcctggagcgtcagaatacgatgtcctatgccgtatgattgagattctcgggttagtacatctgattgaacttttccctcccttttcttcattacaaccaacaatttacagtgaaaataacttatattcaattactttgtaactgtctgagttctttcacttctgttcttaacttttcagaaatgttacaacattgcttttatggaaattcaaaagtgtttttaaacatgtttgcctttttcttatacagtggacaaccaccagatgatctgctacgggaggctaaaaatactgggagattttttaagcaagttggaagtatttatcctggtattgaaatgcagaatggccctatcagtgcgtacagaatattaactgaagaggagattgaaactgtaatatttttattttttttaaggttacatatttgtcctgtcctatacatttacttcattattacttatctataccctgtttacatcctgcaacacagagggagtccaaaaaaccaaaagtaggaagatggtatttccctcgtggaaggcttgacaaactcatatatacatacccttggaagaatttgaatggggaaaacttgccaggtatgttttgtgatacttatttttaaggatggagctaagtaggtttacagctgattttgaaactgtgtttattctagaacaatctcagctagcagtgatcaatatggcagacccagtaattagcgtttcttgcggaatacgtggttcatttggtgtgcattgccttaaggtttattgcctttggtgtacgactatactgtggcataaattataatgggtgcccaggaagttgcagtagttgttatagaactgatagtgttgcatactatagcggtaccttttgggaaatgatcaacctagttaactataccttatttccggttgcagttctttattaaacaggtgtatgaacaataggttagcaatgctggcacataccagaatcatgcaagatactaataatactggtgaacttagaattatttcttagtattagtctcttgaatgataatatcctagtccttatgatgaagttgcaggtttgacattatcttctcacctatttcaattttgattcagagacagaaaagacagatcgcttagcactggttgatttcttgagagggcttgttgagtttgatcctaataagcggtggtcaccattgcaggtattcactgatgataacatttgattcctatttggttgtactctttgattgtgaatgggaagtcttattaatcccaatatctgaatatgctggggaatccttgtttcgtagccgttaaataaatgagctttaggcaggtcagtttggtacttaggaaattattaacttgatttcctattgcgctatttttttttcttcttgaataatcaatggaagtacttcacaattatgaacctatttcaggcttcatatcatcccttcataactggtgaagcgtttactggtccatatgagcctatccaggagactccaagaattgtaagtatgatcttgtttccagacaacctgctgtataatttttctctccttagagactgttgatacggaacgaccatcatttgtaacaattgactttggttttgctctgcatttaattgaacgaggtatttagatatcttcctttcacattataacaaacatggatacatgaaacagtgtttcttcccaccaacagactatatattgctatatactactccctctgtcttcaaatacttgtcactaggtactattcatcttcaaactttgacagctcgtcttttttgaaaaaaacaaatacttaaaagtatgtcatattaacgaagtgtgttgcaccctaaatatcacaaaacttttgtgcgtcatgctccaccattcaaaatttgttgtggtcaaaattataattgcactagtcaatggtgacatatctgaaatcagagggagtagacaatgtggagaaaccttaaaatacttgtaccttaagcgctccctttttttcatacaagtagtccgtaagtcatatacttatgtcttgttgtgttgtgccattgtagcctgttggtcgtgttgcagcagttgatcataatcctggaggaggtcactggttagctgctggtctttcccctcaggttgtaagtatgttctcttatgcttttgttaagttggtgagttgtaagataattattatcataatatattgttgattatgtttgtaggttggaagcattaacagaggcctaccatttaataacgcttttgcaccaaagattcccttttcatatggaagcagctgtggcagcttcggtagccatggtagctttaatgacaatgtaggtcttgcaagcagctatggaagctatgatgtcaacagtgtgaacatgtatcattcaccactaggcccttctggattcaatttacattcacaagccggaggaacatttttgggatctagtccagatattagacgacgatcttatctctatcatggtggtggcattcgattaagccctgggtgtccagggcctatgtctcttggggcaagtccatcacaatttactccaccaaattctcagatgcaaatcccaagtactgctacaggaaagtatggttccacttctcctgcaaggagcagtcatggctcattgggaaaagctgctgctgtaggccaatacaatagaagaagaaatcttggtcacccacctatatcaatgccgcctcatgaatacacatctcagctgactcagggacaccatggggatggcaccattagtaatcactttgatggctatgctcgtggcattctggttacccacaaagtgcactccctaatcctggtcatttcagttggagaccacatacatgcgctggcagtggtttatcaacagacacttcgaaccatgggtcctttccaccatctcgatacggtggttttcctcctacgcactcatccaatgtgtcagcagatacactggcttccacctcatcaataccggatccagctgattgggatccaaactataggtaacagtgcatcatacagttttgtctttgtaatgtaacatgtgttgatctttttcactttgttttgatgtgcagcgaagagtcacttctgcaagaggacacttcactatcagatgcgttgagcgatctccacctgaaggatgcaagtggtcaaacaaaccaatccagcagattggcccatatccaaagccatgctattgcaaactcaaactctttatccatgaatcaaaggtacttaagtgttttctaatttgttcatgtaatgacatttggccgacgcataaaaagctaatataatagaggcacccctcatctgatagattgcttacaatccaactacaatgatttgctctctgtatagttcgctcatatctttaggaaaaaaaaagcatacttcacttttcccaccttgtgctgtgctgctggtttctgcttaattattcaccatttttacaaatgctaaaattgtaatgtgctaacaaatggatttgattatatacatatgtaagggtatgattgtcattttggatggcatgtgtacaaagaatcgaaagagctttcatacacgtttattagacgctgtggggtgtaaaatgtaatgcctctcagtgcaacagtttgtttcatgacaataaacatcttaagggataactggataagggaggtgcttcttttacacgaatcttgttttctatgtgttgctttattgagagtaataccactgaaaatattttgaattttcttgggtggtgctatattgtcaggggttccatattgttatatttagtattattaactgatcattgttcatgcttttcctatagaggtgaccgcctgttccatgcatcaactcttacagagagtagtgcctctacaggccatgtgacctatgatggttaccataatgcaaactattctcagctgaattttcaaagtcgccatggacaaccatttcagcggtataaccatatgactgcgagctacctacgtccaatggggaatcatcacaatggtcagcctgtatggcctaattatggcatggcagaacctccacctgctactatggctgacggaatgccttggggtaatatttccatgttgtcatttgtatgttttatttaattgggtgttgttggtatagccattgactctgcaaaagctatcgtagcactagatttactaccatctgtggtcctctttttttatgtggcatggccttctagtccaacttaactaatttttttttgaggtatccaacttaactaaatgtgctactgaaaacttgcaatcttggtattaattttcagaacaatggccttgcagtacacatagtttattggcaaattttgtttaatagtatattgaaacatgtttggtctaggcttgtaattgcacatgggactgcaatggccaaaagaaaaggtgtaaccttcatgcatgagatatgtatgtcctgttgatatagtttgctttccaattggatcttccatttttttttcacgagtgccttatctttattaacctattatagcttaaaagtcatttcaatcggtgcatgcatttggaaaccatagaaggtatgcatatttatgtctgaaacataattctgaatgttgtgcaggaggaaggcctggtcactcttttacagcaggcggactgccgtcttcctttgcaggaaaggattttggaaggattttctagtatggatctggaggaatgccattcaattggttgcattagtagtttgtatttgcaactcttggttgcattgcttacgggctgttgattttgcagtttgttgcattcctctaattgatcccttcgcaatgctccggctcatagaactgtatggtatgggtctgtaattgtagcattctctgttggtttcttcttttcgtttttggtttatttgttatacatcgagcggaggcttctgcctgctgcaaaaacccagcgggaaaaagaagttgagcagcccctactttcagaatgccatgcttttcatgtgacttctgacgatttagacagatcaaatcaaaccagaccagtacaaatgcttcaaaacgttgaagatttgttaaaagcccttgtcgctaggggaaaaaaacaaacgctacaatccgcccagtaataataccgtgtcattaaaaggatcagatcagaccactactgtgtgattgatccaaattaaagacaagatgcttcgctgacacctatttactcccagtaggtacaccgctagatatataaactggcagccttgcaaagcgagagagcgagtgatattttccctcggaggaaaaacatgtgtgtgctccatttatcatgcatctcccctcctctgattgtgcaagtgtggcactgtgttaggaggcatcgggcaagtcgacatctttgtgttcagtattctacctcctgtctccttcagtgccgcacgcctgcaccctagatagagcgaagaatctgaacgtagtctatcgagatcaactagaagaagctccttcacacactccgatcggtgcatgaatcgacgaaatatcatcccctcctcgagctcgtgctgcatccctcgctctgctcatcagcgccgcccgtacgtccgccgtcgttcgtcacgccgacgagggcagaaatggatctggcactcgttgacgtgcagacgtggtgatatgcggtggagatacgggggatctcacgccggagctcttcatcgatggccggcggggacgcgcaacggcggcggcgaggcgccgttgacaggttaacagagcgcagtttggttaggctccactttgatttcgaaaatctcactgaacgtacttgaattttgagctaatttcgagaaaatagcattatccatcccctcaccagataaacttttcgtgtttcgtgttcgtccaatgtcacttcagtaacattaatgtggactttgtcgatgattatcgaagatatggcaaaatattgccgacaaagcgaatcaaatgttggagacacctgtaactactgttggaagctgcatccagcctccaggcatcagatgagctttaagccatcatctgcagttattcctgaaaatcaatggttgcccacggattgccctattgcgagcaataagggtgcatcaaatataacaatgtgatgaatggtagtacgaggtgaggtttctgtaattgctatgcttctgaggggtcgtcgtagattcggttgtggcaggttgaatcgcaagggtaagggcaatcaatcttctgaaacggattgcggtcgtagaaccaatctccaactgcatccgctattgtctacacaagtgtgaagagctcttgtcagatcatcattagatagctggctctagcagtagccggctctagtagtaactttggtttaattttgagttaagtggtgttgaagttgaaggatgtagtattactttggtttcaagcatgggggaaccagatgcaaaccatgtctcctgcgtctcagattggcaatgcacgaagcatgagtttataaacaatcctctggtggagggagtcccttgttccttcagtgctttcagaaaatcgtctctgaatcctgtgatggcatttagaatccatgcaatttttaaactgggtcgatagctggccaactagaaaatgcagtattacataccaatacactatctagtacctaccttgcaagatttgaagttgcgatgcaggacattgatctatatcatgcttacagctatgccatttaccatgagggtctgcaaatcctggcaccaagatgttccttacctgtaacacacgagacctaaattaatgccaaaacatatttttagaaaatggattaaagtctggcctctacatccaaatcggatgtacacagccacaatgccaaaacatatgccactacaaagcatatttatctaagggcaacactaaaaggatcataatcatagaagtattgcagaacgtggatcagatgataacctgccaggaatcatacgctgcgttgagaatgaacaaaggtgtctgaatctgtttcacctcattctgaggaaaaaagcactgcattcaaagcaacatgtttttaacaagtattcaagtgtaatctgttgtctaaattcgtattgtaaaactgcctgaagcttacaccttaccatgcctggggacaatctggaggtgcaagcagaaggtaaattcttcgctgatccctagcacatttgtacaaaatgtatttaggtataggagaaaacaatgcaaatatatgtgaaatagaactttggaaaatgatggtttgcttttcactctgttaaattctgatcctaatttgtaatttacataccaggtaagtttttttttggggggggagggggggggggtgcatgtgtgtagaatccttgactatctactagtataacagagtaatgactgtatgtgcatacatgggttgtagctacgccattgaaaaaggccacaatgtactccactccagcaatatccttcctgctaacacaaagatgggataggtgttagacatgaactcaatgttcagaaatggtgtttttttgttctaagttaatatactaatggtttgtccttcatattaaaatggctagtacatccttaatgtggaaaaaaatacataatgcatttaatttttccttcaactgccttttgtactagtattgtcttactcattgatgaagaaaccagcatcagaaaggcatttaactttggtatccactgggaaaaggtcacgaaatctgtcacagtgtagtatggaagttaaaccaccagcagaacagcccgaaattagagcctgccataaattcgttagtcttgaaaaccttcttgttgtcaagaattatgctcataagaataacatacattattggcactgttcattcctttcgcaagcagatcatccataactgcttgccacaccctagcacctctgtagtgaagctttgttgcctatccatatggaacaaaatcaaagagaaacttaacactggagcagcactaatcctcatacaatttgtaactgtaaaatcaagaaagaatggactatggactcacaggatctactttttccacatcgccggtgaaagatgacccatcacagtaccgaaccttgaccttgttccaattgtagaaatctggttttgatgattgcacaggaatcgatcaagcatgtgaactatactactccctccgtttcatattataagactttctagcattgtccacattcatatatagatgttaatgaatctagaaagtcttacattgtgattcattaacatctatatgaatgtggacaattctagaaagtcttacattgtgaaacggaggaagtagtaagtagtaacattatcttaaaaaaaaagtaagtagtaacatggagcctaggcagtccaattcctgaggtggtagagaactaggacaacatagtacaaaatattatttccttcaaacaactagtgaaatacagtacccgggttgtaatcaggggtgttgctcagtattccagagaaggcaatctgctttgccatctgcttcgatgatcctaaccgagtgcgtttgcgttgcaggcaggtcgtcacattgctgcaccatcctcctccctaacatttgcaagaaagacacagaaaattgagccgggcaaacatttgtagtagagttctaggctccagtagcacaattgcactgctatcctcacaagaactaacctcgaaatgaaccagccaactattcacgccggagccaaaaccccgggcgagatggtaggccggggggctcccatccaaacagactagcacatcacaccacacaccatcgaatgcacattagcacaacgagatactaattcaggaaagagagagagagaaaaagagatactaatacagtatgaatgaacaagtaatgacagagaagcagctgcatccacacctgcgcctttggccacagcgctcgctacgtaagtaatgtccacgaaatcaccatccaccgtgagaaacaccagcgcgcagacaagtgcagagcacgagaggcagacacccccattcgccatcctaacgagagcgcgaaaacgagatacagataaaaccacacgagctgcagaagaacacacataaccaaaccaaccacccaagaactcacccttttgtgccggagatggaacagcgcttaccggatacgccgtctcgatctaatctcgcatgctctttgttcttgccgaggcgaggggacgggacgggacggggggctcaggcaagcgaacagcgcaaaagcttggagctttccatccaagctcggcctttttttttctccaccgcgcctctgccgatgcaaaacgcagagtgggcggcccccgttcggtttccacgccgggccgcgtctcttgtgtgagctcgtgtgtcctctctttttccccttgggtatcatctagtgcgtgcgtacgccaggatctcgtcatcaacgcaacgcctgccattgatgccgcacgttaagacgtgcagtggtggtgaattgaacagtgaacacggggattgaatacagtgccagtgttaggcacatctgcactctgcagaaagtggaagtccagcctccagagcaaatacgggaaaggtttctgcgaggataatggagcagagttcattccgtcaggattggaatggttaatactccgtcatcccatgaaacccaatctaacatgagatgtaacacaacataatataataaatttgaacatactactctatcttaaaaaaataaattctagctacaaatctggatacgcatgtgtccagattcgtagctagaattggactttttttcttgagacgagggtaggtgttatatccagctctagattcgtcttttataggatggaggagtaggatcgagcctaaactattttttctagattcatgatctataatgatcaatccaccacgagatcatgcattatattgataggttatcatagacatccaaatgaatcaactatatattactaatagatcaagtaattttcaatataaaactgggacaaaaattcttaaactcattttcaggctataaaaatttttcaagttcagttaattttcatagaaatgattattatacagagtaatagaccgagagaaaatttactacacgtgcataaaacttggaccaaaaattttaaatcagtgttcataatataaaaacctattaaattcagttcatttttatagaaatgatttattatatagagaagcaaatttgcacaaatttagaccatttatacatgtgaagctgttttagattgaacattttagacataaattttagagtgaacctaaaatttcattagagtaaatttatatatcagtttaatggacaagtggagtcgaaccaaaccattgccatcctcatcatttggtgtaactttcttttttatttttcgaacgaatcatttggtgtaactttctgaaaatgtaaaaatggagaatggtaatcctgtcttgactccttgactcttgaggtacagctgcatctgtgtgagagcatgtactacctcaaaagtttaaccatccgtcttatttgaaaaatttataaaaaaatttaaaaaaatagtcacacataaagtactatttatgttttattatctaataacaataaaaatataaaatagtaatcataaaaaaatttcaaataagacaaatagttaaatgttagacataaatagcgtaaaactgtacttattttaggacggagagagtactaactatcattgttgtgcggccagcaaaagccacggtacccaatggcaatgtcagcatgtgacgagtcgtttctcgagaaggaaaccgatgctacggagtagagtagtatctttttgaactgttgatgaaagcatgtacctcgagtcgaggtaaaataattcatcgctcgccgaatgtctttgccttcaaatggaatgtccgaaggatgtctgtctactagtcttcggtcaaaaggtgagttccattttccatttcccccctagtgttcgtgtgttgtccagcttgaagacggttgctactctcatctcatggcagttggcactgcagagatggaggtcggccggcgtgtgtcgactagagatctggctgtgtctttaacgggttacggcactgcggtttaagtccacattttctcgttgggccggaacggaacgggattgccacgcatgtacggcctgctatacttgggacggaacgggattaccgtctacgtgaggccctttctacttgggcaggccggaacaggattatgatgcaagggcgtcctgtattgtatacttcctccgtctcataaaaaaccaacctaatatcggatgtgatacatcctaatactacgaatctgaacatacattattccagattcatcgtactagaatattcatatctggtcatatattcattttttatgggacggagggagtagctggctagacgagataggtcccaactcgcgccctgtttttttttcccaagaatacgcaaaagagttgtgcatcattgtattaagactttgagagaagcaaattaatacaagattatagcactaggaggctatactcacgataaaagagaaaacacaccacgccacgtgcccacacaccaccacaccctgaggaatacacagccacctctaaaacgacgccttcaataagatcacaacattaaaaatgctgtcatcgctcatcccaaaaggataagattttcacctagaggatccctttgaagagggaagggaggcacctcgacaacgctctcaagaggtacctcgaccactcgcggcctgttttggttggcctggaacttaacgccacgtgtttcggaatgctaggagacgagatcctatctcaagcatccgcattgtatgttgggatcctttataaggtaggcaataagaaatgggtagggcaatctgcatctgttccccgatttcatcccctaactctagcactagcttctttgggagagaagcctccctcactcttggtcccagcgggttctctaccgcttaatttgaccttacacaagagccaataagttgtagtgtttgacggtattttgtgatcttataaatccaaggagtatttgtattatcaagacaagcaaacaaaggagctgctatgatcgtcgcattcgttaatatgtgagactgtatatagcttgctcaattgcatgggatgcatgagccatgcacgtactacatatatatgtccatctatatatggctatatccatgtgtgtgttcagccatatatatacatgcttggctaatctgtacgtatgcatgcatgcacaaggagacttgagtgacatgtgagcagctcatacacgagcgctatatatgtattcaccgtacatgcatgtatacgtatagaaataccgcgtgatttctgagttaagaagcaacagctagctacacgtacggtggaaatgtgaagctgcccgtgggccggcagcccatggccacatttcgttctcatcgtatatatgcgattgtatatcagaatacacgcgtacgcgggatatctcaaccgcaagctactgatgtgcgcggctggcgccggataaacccaagcaacaaactccgccttatccaggtgattcggatgaaagtgatctgcagcaacgtcgccggaggcttcggagcgaaccaacgcgtgtggccccggcggcgctggagtatacgcgcccatccgttaggttttcctagcgcctataaaagccaccgagagccagccagccagaggccatggacaatcaatcaactcccatcgagatcaatctatcaacacacagttctatccatcggcatccatctgtctctgcccagccatcttcaactcatatccatcgacaacacaccggccggcggcgaagcagtatcacgtacgccggtgtccctcgggaggggcagatcgccgagaggcggcatcagcgcacatcatcggcgtccggcgagctggtgtcagtccgatctactaccatagattgatcacggaggggaaaaccatcggcgcgttgctccggcagcctgtagactactcgtcaacatcggcatcaatacacatccattcgtcggcgagtacagctccatccttttgtttgttattgtctttttacagattgatcatggagcacagacaaaggagaagaagccatgatgtggagttggccggtggccggaggacgcgctggccgacgacgccacaccaacgtgtgcgccaccggtggctgccggccggcagcatctgacgctcggcgagggtacatgcagccacccaggagacggcgccaggcgatcggcatccatattcatctactccgatcccatctcatccacagcatatatcaaatagcagagaagcctccagcgcggcgggcgggcgtgcacagcctcaccggcgctcggcccggcagggaggccgaggccaaaggaggagaaagccatctacgtcgtacgcgcacgcgccgacggccagcatccatctaccggcccccacgaagcgaccttccgacggcaagcaacggcgtttgacctcggcagccggcgacctcactgctgcacctcggcgtctaagacaggaagtgtgcgctcggtggccaggttaccacggctgcagcacaccccagcgtccggcgtgaggacgcgcacgccaaggaggagacatgtgccaggaaggagcgaggcgatgtcgttccaatctgttgtcatggccagggagaagtcgggtgtattgccgtcgcccggggtcactgggccagccgatctattcacgtcacccgcaagcctccgtcgagattgacgtcacccgttcaagccactggtagtgtcactaccgtacccaacgctgtgacaccaccaacacccgtccgccagagaagaccatcgtgacgccactccgtcggggcgcgccggagatcgtcggagcagccgcggacgccgccaagtcatgttgatccagaagttcttgtcgagaacgacacagactccgctgagctgcccgcgtccgtgaacaacatatcctcatcacaccggtagccacccacgccatcctgatggagcagccccatcgtcaaccgggaggcatctcgtccaccttatcggcaacgcccagacgctcgccgtccccgtcaagctgctggtgacactgtccgccgagtgccaccccgtcaaagtttgccgttgtgccggcaccatcgcaccgacgccaggctctcaggatgtcggcgttgtgatctctactgtgtgaggacatctcaccgagactccactggccggcgacgccttcacgctcgccgcggtctcttaggtcaccattgatgtctactcaatcatcttcgacggtcctgccattttccttacactcgtcgttgagccgctcgaggagatcgcctgtcggagcgccgctacccggagcccgcacactgtcgtcgtgccgttcggctactacacctctgcttcatcgcgccggacttgtgatgccatccgtccgcgatgactattcttcgccgagtcgctgaggcgctgccaagcagcgctcatctccgtcaactaacaatcatctgccacctgccggagaaggccgttgtgacgccacccagccggagcgtgccgaagatcgcatctacctgatgctacgacgtcgccaagacgtcgagcgtccttactttgctggtcgcaacctatgagaatggcgacaccatcaacatctactcaacctatgcaatgccggagtgccactgctgggtgcccgcacgctgtcgtcaagtccgccggcccatgatcccttcacttcgtcatgccggagcatcatggtttgcagtcatcgcgccgttcgtccgcaatgtcttcacctcgtcaagccggcgtcgtcgtgacgtctcctctccacaccaacatgatatcgtgacgtccgttcgtgatgcgttctcttcattatgccgagatgagatgttgtccgtccatggtgcttttcccctctttgtcaagatctgtgtcgtccgtccgtggcgctttccccctcttgtcaagaatcgatgtcattcgttcgtgattctctccttcttcgtggagattgatgtcgctgttcgtccgtgtattggagtgttgctcatcttcatcaacataaagcaagaatggtgccgtctgtgatgctagggaaccgttcgtgctgaatctacaccaacaatgtcctcggccgttccgccgaagagacatttacttcttccaaggtcgccgtcgttaccggcgcccttatatagccccttttatgggctcgtcatcatatcaactggatcaatagtagatccatcatccgaaggtgctaaagccacgttcatccggctattgtctacattgacttcttcatcaacatcttcattgcaagtccctgttgtataagggacatgacgaaccaagaggtgcccagccatgtgtaatccagctaccgtctacaccaaccgtctttgtcaactcttcgtcactttgatctcacctagccaggaggtgcctagccaccgtatattcggctgttgtgtacaccaactgacttcaccaattcctcttccctttaacatcattccgacgctactactgtgacgtctctaccgtccaagctatgcgagtttcatgcatgttgaagatcaacctatctacaccaccacgtcgctcaagactgatgaggcggagcgacgagggtgggcgaagccgatggaaggctacgctaccaacatcggcgcacggaccgacgaggccgtggatgcgttgccggcgcccacatatatatatccaccatcttcaccaacattcatcatgcatggagaacgtgaagcgaagacgacgagacgaccacaagcaacttaatcggaggttctcctacaggtgtagatctgcggaggtaattaaatgggagtctttcgagaccccaggaaccagaagaccacaccgctgatgtcaagatctgtccaacgacaggcaatggcgcgcgtattttatattatacatggaaactgtatcttgttaattcaattaataaagatcacgtgtttctgtgtctcttttgtgtttattttacattgtgtatctaggtacactggcacgcccgcgcttattttctttctaaacatagaggattatattcgtatttttctatcctaaacatgtagcacaggcaaccatgtgagagatggtgagataaagataaagtaaatgcatgagagcaggcgtgtagcaatggaagaagcaccgttgcggcctgcgggagctcgggaggtggaggtggaggccaccgcatgggagcaaaagccctagagttgcaagtgagcatgagcggatagtgaagttgtgtcgggaggcggatgcacgaggtcgtcttgtgcgtgtgatgcggtcggagaattgagggtacccatcagcgacaattagggaaacatgaggttatggttgcattttgtttcataccgacggtgagtagaatgggggttgaattgggcctaaatgcatacacatgtttttctaatgatttgtgaattatgataagttttttttttggggggggggagggggaggttcatacttttagggcttcacaggtcaatcattgggtgaattctggctacccctaatctcgtcctcagcataggccgtcaaactttcattggcctctgctcacgatgatgtgcgactctatgagaaggatgttgcaaacaaagcgaccactgccttgggcccaacgacgaaaaaaaaccccgccacctctgaccaggcatcgccaccactatccctattgccctctttcgctaggggtaatacaactagagacatacctagattaggggttgttggcggtatggcatgaggcccttcgaccaaaacctgccgaaggctatgcgaggagtggggatccaagcccgagacgtcaaagttagtcggggcgaagccccccccaatggcgaagactatggaacaaggacggcgagaggcgaaggatcgtgcgggtactctgccaagccggaggcctcttgggggaaggatgtagggcgaagagtatatgccgaagggagacgacttcgccaaagcaagcttgcccccgcgagggccgaagaagccttttccggcccatcaagcctaggggccattgggccgacgatcgcctaacggcccatcaggagtccatgaacctctattacactatgtatctatgtaaatgtccctttcataagggtaaccatgtaaattcccctgtataaccaaaaccctagtagtaagaacctgtaataggggctataaatagtctcatagggccatgtaatagggggatctaagaaaaattctctaatcaatacactttactttcaaccactgttgagtaaccacatctttcgacgtatgcagttgtcgtttcgacaacagttggcgtcgaccgtggggacctccgagcaaaaccactgagagcaaacgccaccgaagaatgtcgtaaaggagaaggttacaaggcgaaaggaaagcgacgccggggtggatatggctgccgaagagggagcagagccttcggcgcttatcgccgaagatgggggagcgccatctgcttccgcacctgcgccatcactaccgccttcggcccctgctacctatgtgccatggcgaaggcggctgcggcggcaagggcactccagaccagggcggagatcctttcgacaagccaactgctggtgccccaagccgctccgtcgcagccggcagcggcccaaactgcgctcgccgctgtgcaagcccaagtctaccctgaccccgagacacaaaccgaagccgacatggaagccgtgcgacagaacatgacacgactccaagacatgcttcgccaaatgcaagaatagcagcaagcgtacgaggcggcaaggcggtccaaggtcgcttcggcaccaatcctccagtattcggcaggctatgtcccaccccaagtctatctacaagtgccgacccagccccttccgccacaagtcgcgcaagcgccaatgtacttcgctgggcagccatcgaccgcagcagcgcatccggcccctcacgtgcaactgcaagctcaaccgatcgctgcccaagtacatcctcaacagcctggccaagtgccacaaacaatggcagaaggggcttcggctctgtaggcgcagctccaagctttccttcagcagctcagccaaccccacaacatttcaagtacagcgccttcggcccgcccggaggggaatacaagtcaaggtgcgcctagttgcttgccttcgaatcagccaggtctaggggcttcgccgtggagtcaaggaccgcagttcgactctatcaatgttgccaggcttcggagcaaaccaagcaccaaaccaggtcaccatgacatggtccagccaactttcgacccattcatggcggctcagcaagcatcaccatcggggccgagcagccgaatgccatgg

SEQ ID NO: 21396 - DNA, 8644 bp, Oryza sativa
caagccgtgatttcgcccttcgccacgccgtacccgcagcaaggtgtcgtgaacagcgcagggggcgaaaaggggctaccgctgagtgggggaatcaagacccgtccaatcccaccccagttcaagttccacccgtcccacgctacttaggcgaaactgacccaaaggaattcctctccatttatgaatccgcgatcgaagcggctcatggcgacgaaaataccaaggcaaaggtaatacatctcgccctagacggcatcgcccgctcttggtatttcaatttgccagccaatagcatttacacatgggagcaattgcgcgatgtctttgtccttaactttcgaggcacctatgaggagccgaagacgcagcagcatcaactcgacattcgccagaggccgggggagtcgataagggagtacatgcgtcgcttctcgcaagcccggtgccaagttcaagacataactgaggcataagtcataaacgctgcttcggccggtttactctagggcgaactcacaagaaaaatcgccaacaaggagccgcagacgcttgaacacctacttcgcatcattgacgggttcgcaaggggcgaagaggattccaagcgacggcaagcaatacaagctgagtacgataaggcttctgtcgccactgctcaagcccaacaacaagttcaagttgccaaaccatctcctctcgttgttcgccagccccagccggagatccaagcacaaccgccaaggcaaggtcaagcccccatgacctagaggaagttcagaaccgaccgtgcgggcaaggctgtgatggctgtcgaagaagtgcaagccctccgcaaggagttcaacgatcagcaagcaagcaaccatcagcagcctgtccgcaagaaggtccgaaaagacctctactgcgccttccacggacgctcttcgcacaccacagagcaatgccgaaacattcggcaacgtggcaacgcgcaagatccaaggacgcagcagggagcagcagctgaagcaactcgtgaagtagcttaagaacaagcacccccggccgaacagcgccaatatgcgcaacacagagtgatccaagtgattacaagggccgacccgccgatccaactgtcgaagcgatagaagaagatgcagctgcgaacggtccacaatatcacttcggcaggcgaaggggctccgcagtatctgaaccagcaaatcttttttggcccagaagatgccgcaggagtaatgttcccgcatcaagaacctctggtgatctcagccgagatagctggttttgaggtccggcgaatcctggtcgacggaggaagttcggctgatgtcatctttgccgaagcatatgccaagatggggttgactacccaagcccttaccccagcaccgacatcgctccgaggattcggcggagaagcagttcatgttcttggccaagcacagttgatagtagccttcggcacgggggaaaacagacgcgaagagcaagtattgtttgacgttgtcgacatcccatacaactacaacgccatcttcggccgtgcaaccttgaacaaattcaaagccatttcccatcacaattatctcaagctcaagatgcccggcccggcaggagtgatcgtggttaaggggcttcagccttcggctgcttcaaaaggtgatttggccataatcaacagagcagtgcacaatgtagaggccgaaccgcatgaccgggcgaagcacgcgccaaagcccgcccctcacgacaagatagtcaagatgcagattgatgatgccgaccccacaaagctcgtatcactggggggcgacatgggcgaagaagaagctaagaacatcctagaggtactcaaaaagaacattgatatcttcgcctggggccctgatgaagtgggaggtgtttcggcagatctcatcatgcatcacctggcagtcaagccggatgccaagccaaggaaacagaagctacgcaagatgtccgttgatcgccaggaggcagcaaaagccgaagtccaaaaattgctcaaggcaagggtcattcaagagatcgatcatcttgaatggctggcgaatctagtgctggtgcggaagtcaaatggcaaatggcgcatttttgtcgatttcacatacttaaacaaagcatgtccgaaggatgatttccccttgccacggattaaccagctcgtggattcgacagccggctgcgaactcatgagcttcctagatgcatattccggctatcatcggattcgcatgaacccggccgacatccccaagacagccttcatcacaccgttcggcaccttttgtcacctcaggatgcctttcggtctgaggaatgccggagcaacctttgccaggctgatgtacaaggtcctttacaagcaattggggcgaaatgtggaagcttatgtcgacgacatcgtcgtaaaaagccgcaaggctttcgaccacacgtccgacctacaggagaccttcgacaacttgcgcgcaaagcaagcttggccccgcgagggccgaagaagccttttccggcccaacaagcctaggggccattggaccgacgattgcctaacggcccattaggagtccatgaacctctattacactatgtacccatgtaaatgtccctttcataagggtaaccatgtaaattctcctgtataaccaaaaccctagtagtaagaacctgtaaaaggagctataaatagtctcatagggccatgtaatagggggatccaagaaaaattctctaatcaatacactttactttcaaccactattgagtaaccacgtctttcgacatatgcagttgtcgtttcgacaacaggggtcatgccctagcctacacggcgaggaaagaaagattggatttgacatggttgaagaagacctactcagatttaatcagactcagactgagaatgccaaaaatagctttacgagttcccttggaatatgagatgactagggatatactcctccgtccaaaaatataatgaatttcggacgattgagacactttctaatactatgagtctaagtctgagtctaaaagacttagactgagaatgtcaaaaatagctttacgagttcccttggaatatgagatgactagggatatactcctccatccaaaaatataatgaatttcggacgattgagacactttctaatactatgagtctaaacatgaagcatatctagattcgtagtattagaaaatatcctatccgtttaaaatctcttatatgttagaacggatggagtaaatatctagctccaagagaaagttagatatcgagattcaacctaggacacacaatcccgagatccatcgagtctgagcgaacggctttctccgtgctcccactgttctcccaaatcgtggaatactcgacgagactagcatataggcctatactggttctggtatttttgttgatcggatgaagaacagactggcagacgaatgatgcgtatcaaccaccatgggacgcacccacggtacgcatcccagccttcccaaaagaaaaccgagatctgcacgaatgttgcttatcaaccaccacgggagatcgggaggcatgcacggcacgcattccagccttcccgaaagaaactgaaatctgtacgccgaggacgactaccgctgcacgcaagggcggtgcacaggttcaactcggagattagcacacaaagactagcacacagcaaggcccgtagcacgcgtcaccacgggaagacgcgggtgcaggggaagtacagctcgaatcaaatgcaacccgaggccctgagcccctgagcttcgccatccctgaccggcagctgcaccacggcgcgccggctaaaccaaaacaaattctaacaagcgaggagaaccggacacccgatgttttttcacggaggtatgtacgtcgtgaaacgtcaagcgtcctcgcgtgcacgcacgcgcgcgcgaacgtgatcaattcgcctcatgctggcgtgacgcggaccgaggagcagcggtcagtgtcgcggatcgcgtgcagccgaaggaccaggagatttcgatacgtcgagagtttctcagatctcgtcgagtcgacaatgtggggatgggtccagcgcaggaatcccattcgattgatgacgtggcgccgccagccgatgtgtggacatgaccgagctccagcgccattcagaccggccagccgtaacgacggtgtgtgaatgaagggatagcggagtccgcggccgcggatcgacggactggacggggagttttgagattgcgtcagaaagcgatggaaaacgcatgaaaatccagccatggctgctgcatgtagccgttccgccttgctggccgctgactcctgtcccgtgcgcgttgcacggacgcggacccttgccggtctccccttccacactcgccaacacgtaagcacgtacgacgcgccccctttattaccgccctcgcgccacacgcgagagggaataccgcgccatcgagcgacagctccccggccgtgaaccgggacgagctgctacgcctgctgctgcacacaagctcaagtggccggccgagtcgtccgttcaccgcggcctactgcatctgccggcaaggagctgaaagatgagggctgcggggaagccgacgagcggcggcagcggcacgtcgaggtcgagcaacatccgtggcctactgcaggacttcctggagcagcagcaccggctggacgtgcgacggcaggaggcgctggagaggcacgcgcaggagcgggcggccatcgagcagcaatggagacagtcgatgcaggcgctggagcgggagaggctgatgctcgagcaggcgtggatggagcgagaggagcagaggagggtcagggaagaggcaagggctgagcggagggacgagctcctgaccaccttgctgaacaggctcttgcaggatgatgatttgtagggatgatgtgagatgtctaactcaaacagagaatttaccatgtcttaggatcatagctagatgggaattctttttttctagatttgtgtatgtgaatcttatgttgttccctgttgaattctttctgctaaatattcttttacccgctagaaaccatggaacggataaatgaatgaactgaaaatactgctgacgatggaataagtagtacagttcaaggactatactggtatgggcaaaatttcatgaaggttaaatttaacagagaaaaacaaaggaaaatgaaaatagctagctgatcaaatgtataatacatcattttacatgtacaaagcaaggataacaaaaatgactttcccatctttcttacctaggactgtctagtgcactaatctatcgtggcattgcaagataggtagatcaaccagggctacatgttactaagtaattgcctatcaaagcaagaaatatgcattacaaaattctgaatctctgataagatgtgtagacttgtgcccctttagatataccttcaggttttaataactactgcctgaacattgtattcactcgtctctttctgtatcggacatttgcatatcatcgtcagaatcagtgtcggtatcttgggtaccatcagagcctatgctgctaccttcctgtgttactaaactcgcaaaattgttcaaaacatgaggctctataattctccaaaaagattcagcattgctaccctgaaaacctatccaaaagaatctcccttcctcttcactttacttgttaacgactgtgtgtgcagggagttcacaattctctcaacaccctcgctattcccaccactgagcttaagaacaatatcacctgatgggagtttggagcctccaaacatgaaccaatatgctagaacacgtggagttaaccacctatggataagctttgggagcacaggctgacctttcagaaagaactggtcaacaaagaaactgaaatgctggtgaggtattgttgaaaactgatagggtatcttgctcccatcatcgaatgatctgcttgctgaagacaaccattcaaagaaacgctcatgaatgtgcacccttaaaactgaatgagcattggaatcttcctggaactgaaagtgcacaatatggacccctcgctgtgcataagattccattcgagtgcctcccagaagcaaaccaattaaaatttcacgctgctcttgatccagcttcatgctcacagtttttggtttaataactttcttgttgagaaggagaccactttggagcttttccaaagagtctgcctgtacatcatatttctttttactcatcatatcataaaccttttcggctttctgatagtcttctgcagaaagataacctcttagcataatgttgcacgacttcgtgttagtacctatcatcccattattgtgcatttcaccaaatacctcctcagccttctcgatatttccaacctttactagtgattccagataaatggtgtacaatattctgtttggacggcacctggctatgcattttaagaatgttaattctaacttttcatgcatatccagatccatgtacatgtacatcaagtcaaggaaggctggcatcaaatgcttcatatcactctcaataaattcattcataagttgttccacgatatctacttccagagcttttgtcattatctcaattattttatgatatgatgcaacattaggaggtatatttttatccttcatttccttgaacatatcgagagatttcataggctcaccagtccgggcataagcctccattcggcagacataggcctgaacagggaggtcagaaccactctgaagaatattgtgccacgtggcctctgtttctgcaacattcccttccttggaaaaggccctcatcactgacaccagcacatcaataccctcatcaaagcctgcttgcttcatctccttcctaagagctatgatcctttctctatcaatgacatcctggtagctgtgaagccagatgagcccagcgtagacatccttgtgcacatcaagattggtggtgaccacattatggtacacaaactcagcctgcttgagattgtactttgcagttccccctgtcttactaacaagcgcacggaacaaggagttatgaaggctaaggcgaggcttgtaaccacccatctgtatcatctggttgtagatagtgcatgcctcctcaaggcaacgccctttaggtacactgaggtaagcaacaatcagtatgtggaaggtagactctgcaggcacacggccctgcttgaccatcgcctcaaacacctcccggcatttctcaaccttcccatccctcccaaggcaatctgccaccctggtggctagtgcaaagttgaagcggaaccagtgctgccgtaccatccagctatacacctgaaaacaaccagtgaagtgagcaaggaccatccaacatccatgtctcaacctattgtgtctttgtgttcagaaagtctcttttacaacttgttcccttgggggaaaaaaagtcattttagaacttaagagagaattccttcattccacaaattgaaatagttatgacatattccataatagagtaaagttaaatctttcactccaaaaaatttcaagacaaaatattggacctacaaatgagaaaacaaagaatacagacaaatttatatttttcttgcactcttcacaaacacattggtctttttttttcctcgatacatagattgagctagtagttagtacatgtgggatggtatttagcacatattaacatcaatgttctcaatattttttggaattttttcacgactattagtaacaaagagtggagagcgtgtgaaggcgtgtaaaattccgccccccttgttgcctacaacaaaggcaattcgtcgaacagtacacgagcaagaactgcatgtatgcatgtttagtggggatgctaaaaaggtttagtcgagcgaggtggaagcgcgaagtactgacccggaaggcagcgtcgttgttgcggatgcggaggcaatggacggcgacgtaggtggcgtcgtcctgggtgatccacttgcgctgggcgttgaggatgcgggtgaaggtggagtgcttgtaggcggggagctccttgcagagccaggcgatcctggagcggcgccactgctcgggcagctcctccagctcgggcaccaccagctccggcgacctcaccgcttccctctcgtcggccgccgcccacgcctctccctggaacagcccaaactcggtctcctcgtcctcatcctcctcgtcgtcgtccaaatccaggattagggactccagcgctgacgctaccgctgggattccaggaggcggggacacggcgaggcggccggggagaagcttcgggccggcgagacggagggcgggagaggaggaggagaggcgaaggggtgggagagcgcgagagggcatcgtagcgatggggatggcgcggcgcagggagaggtggtggccatggaggattcgaccgcgtagcaccggaagccttgtcgctcctctatctccagttatcgcagtcggcaggcaccgccgccgcctaatcgtttccggaggctctgcgtgtacagtgtacactgtacacggttctcctctctggtgggcttggtaggatttgggcttttg

SEQ ID NO: 21397 - DNA, 7085 bp, Oryza sativa
aactgcagactgcacaaagtcaagggatctgtttccgattacagtgatgtaccagagcaattctctcttcaaataggacaaatcattaacccgagttgttgacagcttactgtttgttgaaaagatgagagaaatctaacattgttcatatggtaccaaagtagagcagaacacgtagagaaaacgagggctcgacaaaatatggctctagtataatctcactctcacagcttatagactgccaaaatctaacaaaaagaaacatctaaaaaaatctactagcaaagaacacacatctagaaaaaaactcaacctcagacgaccccggtagtttcggatagaacagttgttgaaaagatgagagaaatctacattattcatatgatctcatagtagagcagaaaacatatgaaaaacgagcgctggacttatctgtaaagcatggtacattcagttcagctggaactaacaagttaatttattgttgcattgtaacttctacaatttctcaatggaggacttgaacacaggttcggcttatcctttcacgcatgcttcttgttcttggcataccagttctcgatggtcatgaaccaattaaattggaagcaaattgctgcaaatcgcatgactccagcaccaataatctccaggaatgctgttagcggggaactctgtggggatagaccagcagtagctacagctaacattgctccctcgaaattgcagggtacaataaactttccggatttgatgccatctaaagccttcctagcaacatcatcagctttcatgccaccagatgatcctgctatgatattggtcaactctggcctccttttattctctgcaaccagttaatgaacagactaactgtgtaaggcacttgactatgaaatagtagtactgataaagtttagttgatggaaagagtgaagagtgcctccagaactagagtgccggaaagaattagataaaaaagatactttctcctgtgtacaatgtccaatgcaacttgtaacaatggcaaacacacaagcaatcaaccgaatgagtgagtattttggccctgaattctatttgcatgtgtgacatcatgattttgacaaatatagtatattacgtacaaccaacgaagtggcatcggtttcatcaatgcctgaagtaaaactgcttgtacacgatatattcacagaatcacagtgacataagcctgagaaatttcagtgaatatgaaagtgtgtgcctgtgaaaattaaatagggcaaccaatatattcagagatgcaaatccatcaatttaacatgtatggctcactgctagttcatcaatcgcttaaaagcatcaatggtcagcacataccttcagcgaaacccggtgtctctgtgtcaggagggaagatcaacgagacatgaatgttgtccgcaataacctcatgctgcaaggcctcacccaatccacgaagcgcaaatttgctcgctgagtaagcggtgtacccataaactccaacctacagcaagagcaatcatgtcagcaaaacctcatctccccaccatgaggcattacatcgaacacctgggctgcgacatgagcataacagcctgaatttgcttgtacggtgtacctggccggcctgtgaggacatgatggcgatggacgccgggaggcgcgtctcctttgtgcgttccttcatggcggggagcgccgccttgacgaggtggaaggtgcccatgaggttgatgtccaccatccacttgacctcctccatctcctgcttctccagctcctgcgggacgaacacgccgtggttgcagacgaggacgtcgacggggcccgcctcggcgagcgcgcgcgccacggcgtcggcgtcccgcacgtcggcggcgtggaccccgacgtcccgccccgtggcggcccggatggcgccgcgcgcctcctccagccttgcggcgttccgggccaggatggacacccgcgccccctccctcgccgccgccgtggccatggcgagcccgatgccgctggaccccccggtgatgagcacgtgccggcccttgagcgggatccgcgccgccctaggccgcgccaggaacgctagcgccgcgaggagcccgatgggcggcaccaggatgaggagcgagaggagcgcggcggccatggcgagcgaggtcgagctttgcgagtggtggctggtgggaggaaggggagcgaggcggagggggtggtttaaagtgggcgaggccgccgtcggagtggacccaggttgtactagttgtacaagggtggagacgtgaggagcttcgtggaggccgaggctgcgcggcccggcgggaacggcagatctgaccgaggacgaggtgcgggatgacttggtggagagtccgtggccgtgaccaatgagccggtcaggtttgccacatgggacactatgttgcaaggtgtgtgtgtgtgtgttttctcgcagtacatagctgaattcaaacaagaacagctaaaaagaaatcgacggtatgacgttctttgattagtcatttaattacaactattttggaacgatgtggctcgcaagttttctttttgttggcaagttcttgtgtgttaaaaataccaatcattgatcaacggaaaaaaaaacatatgagtacacttcgagcactacaagaaaacgccacgccggccattatggaacaggagagagggataattgaactcatttttttagtacatgaaatacgcatatactaactccatatatctagatctacaattacattagagtaaagtccatcaccgtctaaacttgtaccgttgtatcatcccgattcctaaactcgcaaatcgaccgttcaagtcctcaaacttgttcgagtgtgtcatcccggcccttaaacttgcagatcactcatttaggtcatccaacttgttaagttgtgtcaccccggtctctaaacttagatttgaatatcatctgagtcaaataggacggactaaagactttatatttaaaaataattcataactttttcatgtgaactctaatggagaaaaactttatatcaaacttgtagctcttgacgcgatctacaactttgtagttgaattttttttattgcaagtcattttttgtcccaaaatgtaattttaaaattaaaatttcaaaatctataaacatgcaacaatattttgggaccctaaacagttttaattcaaaaacttttcaactacaaagtcgtaggtcgcgtcgagggctacaattttaatataaagtttgtcttcattagagttcacatgaaatttttgatataaagtttttagaccgtcctgtttagggaccggggtgacacaactgaacaagttggaagacctaaacgagtgatctgcatgtttagggatcgggatgacacagtcgaacaagtttgaggacctgaacggtcgatttgcgagtttagggaccgggatgacacagcggtacaagtttagggaccggtgatgaactttactcattacattaacgacacttgaatgtaattgtgttcctattttagatgaaatataaaattctaaatcactataattgaacttaagaacttcatattcagtttgaatctagatgtggagctatgtcaaatgggacctacgaatgtgccctttaaaacacgtcaaaaaaataaagaaaataataaactcttttatatcattgtattaaaagacatctgccaataggtaatactatagtctaccctataatccaccaacaacagtcctacatactacatacttcatccttcatggaacggtcaggatctttcctcgttagatccaacgatcgatacccaccgtgctcccactctccggacaaccgcccacccgcgcccacccctatcgcgatctcctccccatcccccgtcgctcctctccctcccctgatcgcgcccctcgctctcacggtctcacttctccgccgccgccgccgccaaaatcaacgccaccaaatccagcgacgcctgcctcgctgatctcctccgcagtcgctgccgatctgcactactgctcttctcccgatctccatgccgccacaaacctgcgcccccgaaggcctcgccgatctcatccgcggtcgaccggcgccgccacccgcatcgccgatcaactccgcgcctccacttcgaggaccacatcaccgccatcatccttgacttctccgcccgatctcctctggattgccaccgactgtcaagcctcgacctccgttcatcgtccacatccacaccgcaactcgcattcctagaggctatccaccagcagccagacacttcgacttcaggttgggatcactgtattatctattgcattttgaatcatcgagggtgaaacttggtacatttatgttgaacacatgatagatagcggttcccatgctcaccatcatttttaatgaaactaaaaataaaccgaagtagcctcttgttatgtggttctcagtacataattgctattgggagatatatattttataaagactgagatgagaggtagatttcttgaaatgttctgtatgtataaagatgtcaatgaggtaatttttttcaaaataggaaaataaaagtgaatttgggtgaaagtatggactgaaaaatagaaaaatggaagctttactaaaaatggcagattcgttccatatgtaaacttttttatttaactacaactagccaacactatactgattgaacattatttcctaacattgcacgcttatatgtggttaaactagccagcactataatgatccgtgtctcttcgcccttccgcgcgcccgcacgtctttcaccgcccttccaccagatccctcccccactaccgccgccatcgatcctccccgttgcccacgccgtcctccaccagctccctccccaccgccgtcgccaccgaccttgccgtccctggctgccagatccctcccttccctcccccatttttttgatcaacatcatttttttaaagaacaatatttagaattttggaattttgtggactggatagtgaagagtcgatggtatgcattctaatgtattgaaactatctgtcagacaaatactaaaaaataggatgacatgtcagcttataaattccataagaacaatttgtgctgctttactcgtgataataaatcatataatctatagaaacttgtaatcttataaaataacttatatgacttgctggaccatttgtatgattgggcatgctgatcctttcccaagcatattattatcgtcagacatccaaattttgccatgcacatgattgatagctctacctggtgcttgacgttcatatgtacttttggtaaaggaaatttgtgtgctgatttttagctttggttgtttaacccttgacaaaccactgcatgatcaggtctttcattaagcttgactcgaatcagagtagaattgtgtttcccaacttggttctgtcactttcagaaaaagaaaaagacagttctgtctatttgcctgaatggtttatttttactgattctccccttttggattaaatacaagtcaacctgttcctatacatcatttttagccatgtgagaaaatgctctcctttgtgaatcattcaaagttaatgcaggtaacagtttctacacctccaaaattagagcaatattggcagatattagatcaatgaacactataggcgagttgcaaagtgcatagtacacttgtttgttttaaattcaaatagaactggttggatgaagctactaatgaaccctttcatgtttttatagggttccatatcatatactccggacttggcatccaatcgtcaccgcccacgatctcatgcacctcaccgctgccgccgcccgcgataaggttgagtttttacctctaacagattctttcctgattttgtgttatgatataataattttaaatgtgacatggtgtgtgtatgcgatggatttcatatgagaattaaatagattctttcacaaaagaatatcattttcttactctgttaagcaacctcaaatagaaacattactgaaataaattgacagattcgatccatagctaaaatttccttctctacttttagtgatcgggtgtaaactgttgggatttagttctacaaatgctattcttttccctttatctgatcagcaatgtaagccaaacttatccattgaggttatggagtatgggatttggctaatcacacaatacaaagacgtgccatctgaatatgtgttaattctcaagccaacaactgatgaaactcgtgcaaccaagttgtaaatccttccatggatctgaatctaggactctaaaagctcccaagctttaagatttgagcttccgtgcagaggcagtggaggccgagggtgccgccatccacagccgacaacgcgacgccgctgccgcctcaagagctaccactgctgaaaggtacaagaccccttccccacccctaccccatccctaatatgtctcctctttcccgtaagtatccctgccgtcgatcttttgtaaaaacatcatttatgctcaatatattcaatgtaaattgtgctagaaattgggaatcctcgatgagaatttctgtatatctacacccatggcccatcagtccttatgtttacaacattaatatatcacagtttttacctttcatgataaaatataagttattcagattaactccttttgcaaataagattgttaacattttgattatcctgttcaggtgagccactttttttcatactgtatcggtattgctctaccgctaatcattgacttgataactgatttgtatactgtataacttcttctttttatttgcaaccgagtcccaactttaaagttgacagtgaaatggatctggttgggcttgtattgttataagtataaaggttatattatgctttgttatttgtagtgatacattcaattgatgtataacatttctatatacagtatgaaaccacaattatgaattggatgaatctcaggtttgtttatattttatcagctaggtatggatccaaatgcttcagccaatggggggcg

SEQ ID NO: 21398 - DNA, 986 bp, Oryza sativa
aaatttggtgaagaaggtgtgacaaatgatgctataatgcaaaatttgacacagactgaattgttagtgaaagagaagaaagatgaaaagaatagaaaactgcgtgaatggcgagcaaagaggaaggctcagtctaattctgttgatggtggaggagcatcagccactgtcatgcagaatttgacgcatgctcagttgttagctaaagaaaagagagagaagagcagaaagcaatgtgaatggcacgagaaaagcgcaaagaggaaggcagagtcaaacaatgttccagatgaagtaacatcatacaaaacaattcatacaccgacctcttgccactcgcaagtgactgaaagtcaaaaggtcaatcattctaaaatgttgagcatagacaaaaagagtgaaaatgagatgtcgagtatagacaagaggagggaacagaagacgaaatatcagcgtgaatggcgtgcacgaaagaaggctaagttgaacaatgttgacggctggagtgctacatcaagcacccctgctattggtaagattaatgccttccgctaatttctccgtctttaatccaatattctgatattgttttgatatctaaggtgctttctccaccattaatgaaggatcgctttatggaacagtatgttccaccattctaaatgatgcgcaggtggccgacaaggagaatcatgatccagatgatccaaatgattggttacacagaaatgatgtctacaaacctcgattcaatgtaagaaaagcttcaaaccttgaacagacaggagccggtttagtcataggtgagaacattagatacaagtatgtgcattgctctctatttatagtgttaaccaatattaatccaaacatatacgttgtaaccaatggagttacacaaagtcaaactatacagaaaccaattgttcatcatgccattccacaaaccaactacgtcgaattcgatagtgcattattcgagcctg

SEQ ID NO: 21399 - DNA, 19912 bp, Oryza sativa
tacaaaattgaacattgacaatgaaagcaaacaaagataagaaatatttacttgtgtaattcaactctagtgagatgtcctcaaccggccagtcttgtttcttcccgaactttcgcatgacacggtgcggaaggtggtactcaactgcccaaaaacaaatcaatgggcactggtacatgaagtagtcagagtctcgattgcacatcgagttcagggtcaggcttgaagcctcatttgtatgtatggtaaccactcaatctgcaaaagttgaagagatgtcgttggttagtatatcaattaaagaagtaaatgtctaactagaagtgatattggaagtatttacatgttgaggctgtaagcagtccatctcattgacatgatgcttgtatgccacatcccggtgagcatgtgcagtggtagtactctcaaaaaggtaggccactgtcttctccatgtctggctcattgtaggggcaaggagtaaagctttgcctccacttaggccttccaaccggtagtcttaaccacatccacagctgaatcaatagcacacaaccactcatgttggatgatcgtgcctgacgacaacaggcctcacagagctgtctatatgtccacgccaacactgctgagccccaactaaaatggcccagatcaccaaggttggcgaccaaaggaatccatatcaccgaagcaatgtcacctccagcatcaggaaacagaacccctcccaacaagtgcaagatgtatgcacgggcataacactcaacacgccatggctcagcgtcgtcgtcaagatgtgagaagttctgactcagccaagacaggggtattccattctgcttcttcttgcccccttgcccctgctcaatgttcagtggaatgccaaacagctgctccacttgtgcacgccatccaggattctctgtcctgcccgtcacggcatgcccccgtaatggacggtcatcatcagagtcttcagcaaattcaacatcatattgctcaacacttgcctcctcgtcaacctcctctctattgacttctactgagacagaatcgtgaccaccactcaattcgacatcaaagtaatcatctggattcacatattggcctgctacttccgtcgggtattcagggttgcctccgtacgacaaccaatgaacactctccgacaaatgttcacttagatcaagccccttttgtactaactcccttttcatctccctcgctgcatccatatcatcagtaccgcaatgtctctttgatgatcctgcctcccctaaatcatttccaagcaaaggtctcttcttatctccttccccctccaagtcttctcgtaccaactcagtcttacttgcacccccttcacgatgagaagaatatgtcacaaaattcttctcaacgtaatgataagaaggagatttgtttagattcaaattttctacggtacgtaccaactttgatgcaaacacctctagagatctaaactgagactcttttaccaaatcaaagtaaacttcccattccaactgacctatgacatttaatatatacttatgcccttgaccaacatcgtatctcccataaaaacgaatctccacattatcctcggtccatccaagaacttctttcactcgtgaccttagttcatctagagttgggtgggtgggaaacaaaatggtcttcaatgacatatcctaaaactcaacatgtgcaccaacataaggttccaccactctaccaccgtagtaaacacgaacaagtctatccatctacaccaaaaaatcaaatgtaactttgcaacaaaaattaaatattcatttataaacgtagtccaaaccgacatattataaccaatgcataacttaatttgtcccaaagctactactccaaaaaaaatatttaatccacctacaactatcaacaagtttactagtgcattatacatcgaaatattacaaatactccgtcatacaacccaacctagttctaattaactataatcaatttctataatgcaaccaaaattttctccccttcatataattaattgttaaaagtttaacctataggctatagcatcaagtccatcaaattaaaattactttcatgcctcaaccctaatttttcatccatccatccaaccaaacaatccaaaaattaacattaccacatatatggttaaaaaaatcgtgacaccaatgcgtacattgcaaacatgtagcactacaacaagtaaatcccaagaacaaatgctaaaaatcacaaatttgggcataaaaggggttctagggttacccttcgatctacaaattcaaccaataaaaacgaaaaaaaagaggggggaatggaggagtctacctttctcttcaatttccacaaaaaatcctgcgaaaaatgagttcaaatggagtggatttgatgtggggaggtgagggggagagagagggggagagctgctgctgctcagctcgggctggtgcttgggcgaaaatgggagtggggaggagaaaggtggtgggacccacagggtttaaggggtcggcccacagagaaggggcgcgccagccatgttggcgccgtggtatgaggggtggcgccagtgtggctggcgcccatattctgaccagtcagcacctccacgacagccctagtgccacggtggcacgggcacggcgccagtgtgggtggcaccaccatgttggggtacggcgccagccactctggcgccccaaaaaggaccatttccggtttaagttttcccaggggtttatttgtaaaataagttttcaaaaaggaccaaaatgtaaaaatttcaggtgctcccgctgtaaacttttttaagatacatttcgtttagagaaaaggtcaaactttatggatcttgtcaacgattagtcaaactacaaatacttttagtgaaatagattcatatttcaaagtattttttataaatgttactaatattttctatcaaaaaccaatggttaaagtgtgatgttgaagactttttccaaataaaatgttgcatataaatatctatgcatggaggcagtactcttatgtatggcatgcatgctttttaaaaacaaaataaatcaaaccacatagaatttcatcaacaattagttaagttacaactttgtttagtgtataaaaaaatatgctgctacattcgtactataaagtattttgccaccttattgtctttgtaccctgtttattatgtgaaaaatcaatggccaaaccgtgcccaaacagagagaggtactacaatggatgagtatatgtatatcaactaaaaccaaaccagagagagaatactgcctctacatttttattcattagctagctagtggagtagcacgcctaagataggcgctgtaatcgcttcttcttcatttacattagagataatccattgtatgccactgagtttgtcataggtctacaatttgccactgactttatcacgttctataatatgccatcgatttttgcttaacttctacgatttaccaccgccatccggttagtctccgttagtactgtacactttcatccaaatgaccaaaatacccctgagacaaaaactttcaaattttggataaaaaatctgaaatgtcagacttaagtttttggacaaattttgaatgtttacaatcttatgtttataatatggcatttcagaatttttgtccacattttggaagttttatcccaggggtattttggtcatttggacaaaattgtacagtactaacggagactaactggacggcgatggtaaatcatagaagttaagtaaaagtcgatggtatattatagaacgtgacaaagtcagtggcaaatcgtagagctatgacaaactcagtggcatataatggattgtctctttacattaccttcgggcattaacttttcttttccttttgttggtgtgcacttttctactgtgaatgtgaataacattatatacataatttaccttccgcaaagtacatctcaaagaggctgcctctatgtcacttaataaaaaggaacgaaccatatggtaggatcaataattaatgcaagatgtgtggaagtggaaaggttcacttccatcctatgacacaaacttcacgccacgtaagaaacatggttagcaactactcatgcgctgccatctataaaattactatatgtaactctcatgcgacaacaacataactaaatagcgtgttcctaaaaacacccggtgtagccatttgtcctccatttaaccaatacgttcgctgcaattttcactttcttgtcacattcttcctcccactcgttttctccggtgtgtacacccatttttttcacagtattataccagaagtactgcattaacactaagctcttacctttcagcacatgcaaccatcaaccatgggtgatactatattgcaagtgcatgcacacggttgacaacccgtaactctagtctctagtacggcactagcacatgggattaggcaaaacggggagctcgtcaagcctctcctggctgaccagtgctgacgtgtcagcccgggaatggctaggaaaggaagagattatattagccagtagcagaagagcagagaatctagcggccaatcagcagcagcgtctcctccccccctgcatgcatgacgcgcacacgaacactgaaagtccgaaacatacttgtagtaaaaggcacatttccagatggatcatcggtggacgcgcgcgcgcacgcagtgactaaaaaaatgggcaggcaaaggccaaattgcaagccgacccggccgggcgcgcgctatcgcacgcagctgcctcctgcctgtcactgattgggctcagttcactcaccaataccacatcggtgtccatccatgaattccatcgatgggcaactgaataatgccgggctcgtgaccgcttgcctgcctgcccggctggctgaataattggcacagaggatagggttccatctgtctcgccattagagggagaggagacttcggcctccgctttcctggaaacttcgctttcgctctgttcctctgcatctctctttggctctttgcacctctgtttttttaagcgtctctctgtttttttttaagtatgcttgtttccatctccaaaagtcaatcactcgactcggtcaccaaccctgtaccgctgtacgtactacggcgcttccaaagttcatcccaagaaaattgtcaacaccatgtttaatttgagattcggtgggcgaatcgatagggaaacagatcctctcacattgtcatatcagtgtcacaactgtaaactgcacaaagttaggggagtctaatccaatcgatagggatagaattatggtatcatccaaacttcatcgttgtttcactagaaaagctcagtttcaacttgattaagttagttcatataagcatgggagattggatgaaaacaggataagtattttccacatacccatccactcacccgacctgaaacgtggggatgatattagagagaaaaatagatatgtggtactattatctaaacaacaaatatgaaataggatacgagttactgagtgatagattattgactctatccatactttctaactccgaaagaaaatatgggctaagatacggaaatacgatgagctgacgtaccaaacttgatttcaccccttggcagctaacatggtaaacggataagtaggtgagtttaagtgtaaaccatttttgatacctctataaatcaactggaacttctatcaagggaaccaaattgcatgtgttcgtccgaggtgaaaaatacttatcctgttctcatccaatctcccatgcgtatatgattgtatagcaacacgaatacacgatggaagaatttcataactccattaaccacattttatttgaattctatgtgatgccaacattatatttgttgtttcaattccctagggtgttgttccacgcgaccttggcctaattcatcgacgcttgaccaatgccaccgtgcccaatgggagcaacattacccgctacaatcttagtagttgttggccattatggttgtttttaacaaaatgaaatattttgaagggttaaaccatcatagtgcatttgggttgttttggagccaacatttagaccaagagtaacaatttgatttcaatcatctcctaattccatattcattttttttataaaaagaatcaagaacatgccattggcatccaaagttagcttctagaaccttaagattggagatggatcacagacgtggtacaaagagctagcccttccagtgctagagaggcaacagatagttttagtttagttttaaaagaactcatcatccacaatatgcatcattccatcagtttgactcgggtagtatcctatcccaaagtccaaccgatatttttatggatcacgctgcagattagaattagtttattggaagcatgcatgcatgcttacacacaagaagtgatcgaaaaaatcgcttgctcaactgcaatatagggtgctgggtagcaattcctgtgtgcgcgtgtatagggacaattcaatacttttctcaagaaggtcattttctcttgagttggacgaaacggtacagaggagtcgctctcccgtggcctggcttagcccgcgggggatcacgacgttcttcccttttgactctggcgatcgatgaatcgatccatccgtccatcatcgctcgcctcgattattcgacctatagctgcatctgcatgccagcctgctttcaggcgggcaacctagcttacatcccaatcagggcctcttcatcctccctgtattttctccccaatttctcttctcttctctactcttctcctatagttgttggccaaaaaaaaaactaagcaaaaaaggataaaaaatggttggttttacaattaagggccacttctttgtggcgctccctagctcagatgtctacgtagtgtttggtttttttcatcaactcctctgctcctcctctcgattgccaaccgtggtcctagctgaagaatctgtacaaggactctgatgatccgtgctaatacggaatccaccgttcggtctcccgctcccactgcggcgccaacaggtgtccccccggacggtgaccgccgcgaaaatggactcgcgcgcgctgcgtggcgccgctgcccgccgttgatgttggttttgccagctttccccagcttagctgatgctagtattcttcttcttctttttgtctccctgttcggttttcactcctgctcggtgttcttgcgggtgaagctcatggggaggccgttgagcggcagcgcgaaggggccgaactggacgccgctctcggacttggacgtggaccacctgtacttggttgcgaggtggtggaagagcacgagcatctccagcttggcgagctcgttgcccgggcacgagtgggtcccgttcccgaacggcatgaacgtgttgggcttgggcgccacctgcaacagtgacgggacggacgcggggtcaggaaaacccataccggccactgctcgcaaaccgcggaccgacttggctaggaagtcggccgcaccgggaaaggaaagggagggaagggaacaaaaacacggaagagtgggttcgtgatgctgacctcgaaccgggacgggtcgaacttttccgggcaggggaagtggtcggggttgtggtggatgttgcggaacagaggtagcactttccagcccttggggatcaggtaccctgcacagagcagacgatcgaacgaggttagattctgggacgactgatcgagttagtctatttcagttaaggaaccagtctgccccattcggtccagttcactcgcagcggaagagaagcgcgaggctgtctcgaaagggacggacaggctgccaccggacagctctgctctgctgctcaccttggtattccacgtcctccacggcctccctgaaggtgaaggagaggatggacgccaccctcatcgtctcctggatgacccggctcgtcatcttcatccgccgcgtgtccgcccatgacagcggctcgcccgacgcctctttctccttggcaatctgcagctgctcttcctgttccatccatggcacccgcggtcagcctcaccatcaaggactttgatatactatgagatatgaggaggcgaacttacggtgacggccttgaggacggcggggtggtcgccgaggaacttgaccatccaggtgaggacgctggcggtggtgtcgcgggcggcgaagatgacgccgatgacgttgtcggcgatctgggcgtcggtgagggcctcgcggccgtccacgaacgaccctagcaggtcgttcccccgctgccgctcgcgccgggcagagatgatgtgggccacaatggcgcccagcctcttccgggccttcatggccttgtggaacagggtgcccggcaggttcaccggcatcgagttgtaccccttctccagcgtcaggtagcactgcttcagctcctcgatgtagcgcatctcctcctccccgaagatggacagcaatgccacattcagcgcgtactgttgtatatgccatcaacaacaaacacatcggatcgatcagcaaagcagagtagagcagagcaaagcagagtgggaagaggagttaggcagtaagaactcacagtcttcatctcttggaaggtgttgacgaactggccgtcccaggagtggagggagcggagcgcgatggcctcgatggccgggacggaggcgcggatggactcgggggagaaggcgcgggagacgatgcggcggaggtgggcgtggtagtcgccctgctggaagaagatggcctggggacccagcatccgctccttgctcgccgggaaggtgggcttgaagaggtgcgcctgcgtcaccagcacgaaccgcgccgcctccgggctggacaccatcacgcaggggcatcccaggatgtgcgtcttgaagatgggaccgtacttgttccgcttcttgttgaagaacacgttggggttcttggacgagtacagctggaacgtctccccgacgtacggccaccccatcgaccccggcggcagcggcaggccgcacgccgccgcttccgacgagcccgcctgccggcggcggccgcggacggcgcagacaagcaagaaaggcgcgagcacgcacacgaacagaagaaaagcacccattggcgcctgctcacttcacttatctttgtcaatcgcagaggagtaggaggagaaggaagaagaagaggaagagaaagggaaatgggcggtggtgttgttggggggggtgtggagggaaaggcgagaggggtggcagctatttatagattggccgcgagctgagtttcccggtttctcctccgtttcgctctccttttctgcggccgcttgctgcccaaaaatctactactactagtagctagcaccaccactacgcgctagaatagccgagctgggtgcctccgcgcgcgagagagacagatagacgctgccgaataattgcgcaatcaatacggaaataaagggaaaaaggcgtgcgggcgagagagccggattaatcaactgatcggttaaaccggttaaccaatacagtgatagctaaatgggcctctcttctcttctggccagcgcgcgagagaatcatccctttctccagctcacctctccctttccgccctgtttccacaccatcagctactgtacgcgctctcgtacgtactacgtactgccccggcagcagctgctgctgctcctgctcctgctcctgctcctataatgctgctctcctttggccgcttcctctgatcatccccaaccagccatcatactggcctgaacactgttctgcttaattacttggtgtccggtgcggcggtgttttttttttctttttgtcggtaaacacatctaccgattgttcctgagtccatcgtaagatactcattttatgatttattgatgcgtgaataatctattttttcgaagtaaacatcacttgggaatttttgccggtatcactgaccgcggctagctaaagcaggttgcaaagtaggaatgcgtgccgaaatgcttaacctgctcatgatgggaatgacaggtgttgaacaaaccgttagtccgtcgcgaaatggtcgtgcgcatgcagctctacccctctttttttcttctgagaaaaataaaagcatatttttttctcttttctctcttttttgattcgggcaaaaaaagatcggatggtagcagttctagtagtaggttaacatcttaatcagaaattcaaaggcatgtgcattcagatctacaggttgacctttgcatgtgatgggacagctgtgagggtgtgcttcaattcatctcttattcatcaaatccaaattcagtcgttcaactcatcccgtcaaaaaatctttcaactcgaaactgaatactactagtatatgtgtattagggaaggacgctgaggaggtgtagtagtagtctactgtggaaactattagtaacaaaatatctgccatggtttctggacacgtggaccattgaaaataccctcttgttcggttgttcctaatctcttcctgactccatgcaagcaaaaggacaagtggcacggaaccatcatttgcgttcattcttaatccaacgtatcctcatcgctatgagcaaatgtaaaagaggctctatattagtatacaatataatgtaaaaggagtggcaggcatttcgtaatatagtctaacagttgtgatgctgaatctgaatctcacacaactttcgaatgagctgcgttataaacgtatactcaacctatttcttcatcggtcatcgcagatgaggccattgccttctagacgtttgcaacgcgccatgctgccggcaggggaggatattgatcgcttgttctcgttcaattatgacggcattatcagtgtaccggcccaagctaccaacaggctacatgtatgtgtgtacaaactcatgcttcacgtaagagaacaaatgaaacttggcctttgatcagtagtagtagcattctgtgaaacgaatatgcaatgcacaatattaaaatgttatagtgcgatttgacaggatattttctcgcaggcaaaggacaattacgtacatgcatggggggctaccctttgtgaattatgcattctgttccgtcctgtagtgtggtagctaccagtccatctttgtatctaaacaagtttatctatgaggaatatgagacccggtggtcaggtcccacgggggcaggagcccaatttggatcgggaagtggctgaagcacagcatgagtgtgcgattcggatagattcttgggggaccaaactgtccgtggtggtatcctagttgcacatacatgcagtgccatttcgtctcaggatatgcacggcggcggatgccgctagaaagcctgcaaggtttgcaggttgatgggcggaactacgtgcgagagagccgcacggtgctggcacggcgccgtccagggcacgcgggcagggaatttgcacgtagcaccccaccgcggcgcgcgcgcgggcgcggcggtcacgaatcacatgcgagcgcggggcggctacgttgcgatctaactttggagtcaaggcctcaagggcgccaaaatgcgtgctttgtccgggctcttgcctgcggtgtgcagggcgcggacgagagccgttgatagtcaaatagcctcatcatagccgcccagagccaatcaaccgccgcggcgcgcgcgcgaccggtcgtctcggcgccgtccttactccacgacaaccgccgtgggatcatcaatggctcctggccgcttcgtgcggtcgcgggacacctgtgcgcgtttcgatcacctcctgatgagacgatgcggcgcgcttcggtgtttgtcctggtcgacgagaggtggaaccacgcatctgatctgataggggatgcacgatagtacgtcgtcgtagtagacgtagcgcggaagcggtcccgggccgggaggcgcgcgcgtctgtggtcgcagtgagctagcccacggcacccagcaaagcgggctctagctaaaggaaatatcgggggccggagctcgcggaggcgtcgttgtggcgccggatcgacgcgcgggccacgttacggcggccgcaggacatacgtgtcttcaatgattgcgcggatgttcatatgtgcatatccgcgcgcccggtcgcagctctaccgctccttgaccgatcgatctcttccgttccgtgccgtgcggcgccgctccgcgcgcggtcgagccgccccgcgcgcccacatgcgactgcgtagtacagttagccttccccgttttggcacgtttcgatcagcacggacgatttgctcgctgctaacttgggtaacacgcagatcgatcgtccaccgacgggatatgatggagtcgaagcgtagcagtgtgcgcgtgcaataggccaggcgttttgcgtgcgatgtcgcgcgtgtccagctgggcgagcaataaaatagcccgatcaatcaaacacgagccggcaggcgtggcagcgacaatgtcactccggcggcggagggggcccggggacggcactgatcgataaggctggtgatgctggtggacgagtcggcgcccgcgacgtggccggcaggcgggcgcgcagcggccacccgacgctagctggccggtggaatactagtatttgagatcgtcgtgctggtcaggaaatactagtatttgagatcgccgtacgtgtcttccaacagcgagcgcatgcttgaatgaatacgtcggtactactcggcattcggcaaggaaacgattgaggaactatgtgtctgtttgaagagatttgttctggtccagcaaaattattttaaggtaccggtacctcacggtaccaaatcgtttccgatcgttggattagctagacaggataagcatggttagattcaacaattgaaaataatttttttggtaccatgaggtatgatacttcgagataccttttattggaccggagcaaatctactggttaaaatgagacgatgcatacttatgggtataagatctaaagatctaatatctgttgacactaaaccgatatttgtcagtaactctcacaatatttgacgtgttgagtagttgttgatatcgacaatatttttttaacgaacaacaatagtgtgttgttttatattgatatagcataccaataatactttcatgtcacccggtgtgccgaaatccttatttccactaagttagaggaaaactcattgtccgaagcatgattttctcatgcatcttgcaaactaaaaaagtttaaaagatagagaggcagcaagggccacaattatgacatttactctaatcaaaagactaaagatttcaatcccacaaagctatcacatccaaaacttaggtttagttctggagacagtttgacttgaattttagtggcacgtaaaatcaaatactccatccgtcccattttaagtgcagttatgattttccacgtttaaattagatcgtccatcttatttaattttttttaaaaaaaaattaaaaacataagtcacgaataaagtattattcatgttttatcatctcataactacaaaaatattaattataaaaaaattcaaataaaacggactatcaaagttggacacggaaactcatgattgcacttaaaatgagacggagggagtaagtgattagcaaataatgaattgaatactaattattataggtgtcaaaatagatttacttgattcttttaaataaaattatacataaacttatgcacgaaatttagtagtttggtaaacgttcatgacagggatttttttttcagcccaacctccctcgagagcccagcatagtgtaagtagcattgttctaagtaactttaaacggcgacccatttgttgcacttgtgacaagaggccggttagttcctgcagtacattgtactcttatttgtttcaatttaaaactcgcccacacgcattagaattttcatcaaaggaaattgcagtggttaaattgcccctgcaagtcggcactagactctgaattttacgtcccccgtcacctcatttacacccggtctctgctgggaccaggtcttcgtacaggtctatgtagacaatatcacaatataccatggaaaggtacatgttgatgttggaagaagcaggtcgttacgagtgtcagttagtgccgttgcattatttgtctgcataagacgatcgaaaggtctcctggatatctagaatctttgtttcgctaaactttagttgggtgtgtacaagcactacagcgacttccattcatgtctacatcggcacatcgcactatgtacgtacgctcacaatcttattttctgcatagataaattgcagaaagtatggcacatatcatccatgtaacttttgtcccgactgttcgttgtttgctggctcaatattggaaggatatccttcgctttttatcacataggcatctatcctgtttcctcgccgtacccaatctaatgtatttttttggggtttttttttttagctatacgttccggattatcagatcatcagctaaccggccgatctagatacaccgtacagtacaaacatattgacattgtgaaactgccgcagcatgcatggctgcatgcatgtgtatgcatgaggtacgtacgcaacaaataacaggttggtccagctacaaaaatagccgctccctcgcgtgacgttccgttccgtgcagaaccgtgcatgcacgcgtacgacggactccctcccctgacacgcacagcttagccacaggacctcaaattctctgtccggtatctagtctggccgcactgtggcacacatcgtacgcagcaacacgacgaggcgcgaggcaggggagatggatcgcgcattcgatcacgctagaagtggcggatcttagccagccattcagccagaggctgagaggcgtacgtactgcctagccgggtcctacgacgcgcgagcaaacagaagaaggagagaaggagagtctggttgattggggcgcatgcggatgcgacgcgcgcgagtggttgcctggtccctcgcgtagccagcgggcaggtacccagggcacccggcacgggggggtcccgcaccccgatcggctccgccacacatatctggatatatatctcgctcccatcctcgcatgtacgcgcgcatgcacgcgctaccctacacgccccaatcagggcacgcaactcgcgcgccccaccgtgcatgattcacacgaattccagacgctgatcctatcgccaatcgatcaacacccgcggattctgcgtatcaatcgatccaaccgtgcgttgcgtatctcgaattctcgatcatgcacctgaccaggtaagtgcgtgtacggtcgatcggtacgcctcgcctgccacccgcagatcgatcgaccatccatgtgctgctgcttgtataacggtcgcgatactgctcggctattcatacgagcaccgattgttgacaggtagtggccccctggaccgctagctctggactagcgagcgaacgaacgaggtcaatctacaccgtaccgtacgtcctcgcgttgtcataggcgaaccatgattttgtcgtccctaccgaccgggcaggggcaatgccgactatacatgcacatatggcgatagctaagctgcttgcttgtttcgttgcgtacttggctcggtctcagtcctatcagtctcggcctctcctctcatccaagtcatacatacgcatttgcatgaggaaggtcgcggtagttgacttggttttccacggccaagacaagctgctgtccgagtggccgactatatataacaacaaactggttatgtttcaccgctgtcattaaaaccgtttaaagagaccttatccgtcgatatattggaaacctgtatcgaacctatcaggaaaattgacgcgcgtagtttttgaggagtcaagttcaatgccgaccgtacatgcaagagggcgattcgtagtcccggttcacgtaattgactcatagaaagaaatccatgccgacttgtactagtaaaagaactgttccaccaagcgttaaaataggtatagcttgttgtgtttgtgaacataaacgtcagcataatcaaagagggtacgtctagctctcgccaaaatttctagattacttgctccgtctcagaaaccggatgtgatttagtactaaattaacttattctggatggaatctctctttagaaattttgctttgaaaagtgtgcagctctgtttgcacagtcgattttccaatttccattattcctcaatagtgcacgtgtaacttttgccatgagatgagcaaaggatatatgaccaactggctatgtaaagcacgcagcatgggcgaaccaaaacgacgcgtggttccatccatctgtcagttttctgttgcagcgaaaagctctttccatctcatctcatcaccagaggaaacgacgccacgcccacgcacaccaccggctcggtcaaggaccccgcaacggcctatcgtagcattccggtgaggtagtttctctcgtaatctcgttgggtttttccagtttcaaccaatgacgcgcgcgtgcgcttttagtttgctgttgattccctattcccccctccacatcttccgtcgtcgatgaaacgcgagcgcgacggctgactctgacttttccgcgtcgcctctgccgttatccggcgccgcgcgcgcgttccgtggccccacgcgagcacgcgccacttgcgcttgcgcgccagagggcgaccgcggtcgcctcgcgcgccagagggcgaccgcgaccgcacgcgcgcgaggcgagaggcgaaaacccggaacgcgacgggacggcgagaggccgagacagcgacgcgcgcaggcaggattagccgaactcttaaaccgggcaggttcaaggcacgcgcatgacgagagagaatcagagggagctgatgtgattagcgccagaggaaaaccacaaaagctgagacgggaagctgaaacagctctggtattgtgccgcaacttgatagccgtgatgttggttgctgctggggctgttgcacctggtcggccgtcccgataccgttaatcttacacccccgctacatgctaatatgtgtatgcgtgtgccgtgccgtcgctttcgctttccgtccccgcccgggatcctcctccctctccttttcctctgcctttctggtcgccttttcgggccttgctcccctgtcactcgggtggacgcttcgccgtgcactgatcctacagttgtactcctttgtcctaccggttgctctctccacatcgccttcccccaagctaagctaataagctaaaacagctagctaagctacgtgctcatcactgatgctactatgcttccctgcttccttgggtgcttccttacgttgtattttactccataatgatatccaaaaggcgaaaaggagcagcgatcgcagaccgtgctagtagctttgcatcactctctattatttagtggcaatctggctagattgggatacagctgctggtcagtctcaaagcccgatcaaacgcgaacagtagtatacactagggcctttggtgacagatcatcctttgttctgatctttttgccccacgagcactctctgcctggttaagcaatcgagtctttcattattttagcggaggcaaaggtgaggatatatatatgctagctgctacactaagccagttgtcagggtggacttgattgtaaggccggacccatgcattcgccatcaacttttctttcacttgtttttaattcagaaatctcgatgcgtaccatattaaaaattttcccattcagctgtcattgttatcctttttccgatcacaggccaccacagcacagtcctcagatcgcttagtttaagatatgtgcatccatgcaattgctcgagggagatactgtcatgaagcaaagatccaagctaatgtgtcagtcctttttttttaattcgttcacttaaggagtacattgctaaatcgatcgctttggtcgatcgagctgcacttgtgctttcacttaaaaagaaacgcgatttgtagccagaaacaaaatcgcagctggatgcgcgtcgctttagagaggggggggggggggacacaaattaatgacatataaaggcttctcatgatttgagatcagagtcatcacgaactacggcctcaggctccactagcgaccaccggttgatacgtggctcgatctgctttacagcgcatttttgtgtgtccgtctgacagtcgcggattggggatatcaaaacgcaccaaaaagacggctacagatcatcagaaaacggagataaccaggatcttttttttttttggcttcagcttttgccgaggacttacgtgtgcatgcaacctcacaaaatctttacacagatagccatgggagtatttctctgatataaaaatctcgttgccgatgtgttgtgtgggggtggtcactgaatttgattcttgtgagattgtggcttagatccaggaaccgggtacgtatccgtttcaatattttatgcgaaaaaagcagccaacatctctcctttttcccgtatccttttccattcagaatttcagacatcgtgagtcactcaccagaaaaactacgatgatacgatatgctacgtttttttatcacgagagttttcgtcaggattatgggccgaaatcgcaagtttcagaaacctgggctctcctctgcatcagccggccgaacacgtcgggcacaggaattttgtggggaataagtccactttgactcccttaaaagtgaccaaatctaatccatgaccctaaaccgcaaaactggatatctcgaccatgaactattgaaatcggtgcaatttgactctcttggcggttttggaggacggtttcgctgacgtggcgctgacgtggcggtgctaacctaatttgtggggttgacatgacgcttaggtggcatttgaattaaaaaaatatatgtgggacccgtttgtcattcacacccataaaaattgtggggcccactgacatatgggctccacatgccatcctctctctcttcttcctcccctctttctcccttctctctcagtacaggaacgagtagacgaggcaacacagcaccatgggacagcgatgccgatgtacaacgccctggcgagggacgccgcgttgcgccactctgcctcgatcgtgccgaccattcccgccaccatgagcaacccaaacaccacacccctgctcgtgccgtcgaaggagtcggcgacgaaggtgtatattgtcgggatttgcagtgccagcccgagtccgttcaacgccgccgtcaccgccatctgcatcgcaccatgtacgcaaaagcatgtcaaccatggaggagcatggaaaggtgaagggaactttgccatggtcatttggttggcgttcgtcgccgctgggctgctggcctactgttgctgtcactggtggagaaagggttattactcccggttcgtaacccccctatagtaccggttttcgaaccggaagtacgaatccgggactaaagatcgctatctttagtcccgggtgaaaaaaccgggggtaaaaacccatctttagactaaagatgctaatccggttgctctttccggttcctttttattattttcttttcttcattatttttaaatatattgatttcactctatcccgtccccaaaatctcaaatcaatcattctcaaattgcctccaaatccacaaatcgatcatctcaaatactcaaatacatcacaaaatcttaaaaaaaaattacatcacaacttctacaaaattcatcacatattcacatcacacacaa

SEQ ID NO: 21400 - DNA, 16070 bp, Oryza sativa
ttgaggagaggagttaaaggagaggaggaggtaccggcctcgatccgatcgcacacacctctccgatctccgcgtcgatctttactcccggttggttttaccaccaggactataaatatatctttagtcccggttggtaacagcaactgagagtaaagcgtatggcgatcttttttcctggttggtgttattaaccgggactacaaatagatctttagtcccggttggtaacaccaaccggtactaaagattgaaaaagtactctgtagcttttaaaccgggactaaagatatttttagtcccggtttttaatacaatcgggactattgtaaaatctggtcgaccgaccaaagatggtttctccaccagtgtgttcatgctcatgaccggcatgcttgactccgccatcccaacgatgagcagcggaaagaagtggacggaggtgatcaaccagttcctcaacgcgctcttcaccatcatgtgcctgtactagcagtccagcacgccaagatcttccaccacctcgtgctgctcctccggtggcgccccggcaccagcgacgaccgcgaggagatccacaaggtgtactgcaaagactgcgcgccgcggccgcacgaccgcgcgcacatgctcgtcgtggcagtgctgcttcacgtcacctgctcggcgcagtacttctgctgcgctctcttctggagctacgcgtgcaaggaccggctaggctgggctccatgatgccggcgtggggagagaaggagagagaagggagagagggaggaaaaaagagggaaggggagagaggatgacacgtgggccccacatgtaaagggtcccacaatttttttttaatgtgaatgacaattgggtcccacaattttttacaaattatagtgccacatcagcgccacatggaagtaaaaccaggtcaatactgccatgtatgcgccacgtcagcgaaaccgccctccaaaaccgctgagggagtcaaattgaaccggttttaacagtttagggagtcaagatatctggttttgtggttcagggtcagggtcacggattagattcgtgtcacttttaagggagtcaaattgaacttattccattttgtggtccatgaagaggccagagcaccagcctatcgaagttaagagatgggtcctgagcgtatctggagggaggaaggaaaatgtttaattgagtccctcaaagatagtcaagacttattcctacccctcaaccgcaaactaggtatagtgatttcttcaactatttaaaccatgcaaaatgactcccttaacaatatagttggtggtttcactgacgtggcatccatgtggcagcctagtcatcacgtaattttttttttaaaaaaaatacaatggggctcacatgtcatcccctctatctccttactttcctatctatgtttatccccttctcggcagtggtacgacgacttcttccataggacggcggtgggactgtagcaaaacacgatatgctctgggtactccatgcctccatggtggtgccaccgccttcgttcgccttatccaagaactcatgcaggcattcgttgtcgaccttgctttacattatatatggttttgtggttgaaggatatgaatttatcatatccgacctatatcgaaggagtcagattgaactttttccaacgaggaatgggtccgatctgagattgcacccactttattaaggactcgattgaatgagtcggtattgaggcccattcaactgtattggccaaacattttagtataatgtcccgcttatgcattaggatggcgaaaacgctaattggcggctagttgcgcgcgcccttctttttttccgtttctctttctgtttggttttctccggttttttttggtttctctttctgtttggttttttccggttttttgtttctctgtctattttggtttttccgttattttggggttctctttctgttttggttttttttgtttccccccccctttttttttccttttttctcttttcggttttttttaacatatacgtatacaaactttttgtattcatgtatacaaactagtttatatacgtacgtatataaagtttatatacgcacgtatacaaagtttgtatacgttatgtttttttgtttttttttattttttaatacgtacgtatacaaagtttgtacatattgtatacaaagtttgtatatgtgtatattttttatacatcaacaatatatacatataaaaatatattttttatagaaataatactagtactaatagtagtagtgtaatagtaatagtaatactagtaactactagttgtatagtatagatactaagaggagtggggggtggtcgcgcgcgatggggcaggcgcgaccagtcgccaggtagccacccccttaggatggggccaggatttatgcacatccaggttttgagctaacgtgcaaggttcaggttcttgtacgctttgaaataaaattcactttaggtccctcaactataggtcgagttttattcacaccactcaaccataaaaccggagtgtccctcaacttttaaaacgggtacaaattaaattcctcgacaatattgaaagcgatttctagttaatgtgacgcctacgtggcacgatgattgcttgacttattaggcccatcccgtgtcggcatgacccaacctttgcgccatgcctgggcctctgtctcgacacgatgggccgatacggcattggcccagtccaacgatcagggagttaaatagatgagagagacaaaatagatttattcagccatacaagaaatgacccaaacagatgagggatgaaaaatagatttattccaaccatataagagacggcccaaagatatgagggaagcaaaatagtcttttatccaaggaagagtgcaatggactttcgtggctttgggctagctcgacaccatccaagtcttattgggtcgtgcataggcagatggtgcagcaagtggatagacccggggcagcccgatgtgtaggtcgagtctgccggctcgactaatctcggcccgggcccggttgtgcctaggccagacggcccatttggtcattgatctatacgttggagtaagggcgtgagacatagtggagagtggggagggggaagaagtcacatgtgaagctactagtttatttttatgctgacatcgacaccacatgctgttcacgtaaacgccgcatagaaaaaaccagtctagtttgtatgaggggtgtaaattaaacagttttatgagttcgggaaggaattatgtcggttttagagtaaaatggattcttttagataaatgtggtagttgagggggatgatatgaacttatcccagctcataatgatattaatcaatatcaacataactgaatgtatctctctgtgaaaccagtcaacagttggtgcggtaagagcaagtttaatactactaactccaaatcatttatagttaatttaatagctaataaatatactacctcccccctatcatacacataaatctgtagcccgctgcttttctctctcttcttttatcttcttgatatgtgtttataactggcttatagtatgctattgtacatgctataatagagctaccgaatagtatacattttccacgaatttttgtgtgcaagaaaacaaagaacacacgaccagatgcaagcccgtatgaatgacagcacatgcagaatcctattgccttgtttcttccaccttcggcacaccaggccaacatgtttgctgttgccaacctgaaagaaaacatcgaacttgcccgcaacggcttaaaaatccccttcaccgttgcataccctttttagctttatgacctgataaagtgtactgtgtacggatagttctaatatgacgtttgcatttttctgcgttgcattgctctcccaatagtccgtattgttggaccagcggcgcgtatcattataactctgcaatttccatgatacttctagttcaaaaactggagattgccctatgaaaagatagaaacataggataatgcgactgcttatgagccaacgtgcttgtcattctcattgcaacaatgcgactgataaactcgggggccatcacatattatccccgtgtcatttttgtcttctcaccagaagaagaagaaaaaaaaaaggaatttacagtctacagagccaaaaagaattgttcatatgcattcccatcatgctgtctgttagactgttacagactagataatgtatagaggacagagccagcctttgccagcacaagtgaacatgctaaaacatgaggacctaatcaagaaacacatgctaggtatatataaatattactacagtaatacatctcctgttatctaaaaaacaaatatataaatacaataaaaccatcacgaaaatctggcataggcgagctaaaaaaaaatagaatcctgctatacatacgactaaatcgtacgactcacattcgactctgccacatccaccaatcaccatgttcgaactcggctatgtcttaagatgctgtaattaattcatgtacaacctttactttctttgcgtggatctgtttgatctggtttcatttacattttgcacggtcttggacctcttggtcagtaattttgtcagtaatgctatgtactacctttgtccagctaaaatatcttctaacccaccggtatacccgcccccacccatcaccagccgttggcctttgccagcaagcggagattgcccccacgccgcttggcctttgcgggacgaacagcgcggagcaccgtccacccgcctctcctccggttggcccgtcccgccccgcgtgttccgccccggccaggccggcgggtcactgcttcgatcgcccgctcgcctgctcggcgtccgtggccgccgcgtcgagacggattgtcgttgtggcggatgctgccgaggtggcgcatgaggatgatttggtggtggaggtgaggccgaggatgaggagcgccgtgacgacgaccagcgcggcggccccgccgaacacgccgttcctggcgacgtagcagtcgccgtccatccagccccggccgtaccgctgcccgtggttcatgctcgccgcggtcgccagcaggacgacggccagcgcgaagctcaccctgcgtacatccggcgcgcgcgccgcgggcggcgattcagcgatccacgctcgcagaaatcacgcattaattctttgtttggcagccatggccgtactatagggcgtaccatgagaggacgaggatggcgacggacgccgcgcggcgcctggtggtggacgacttgctgcgcttggacgcggcgcacatggtggtcgccgccgccgtggtgcccaccagctgcgccacggagaggaacgcgatggccgcgacgcccaattcgaaggcggagctcttgggcagggagcagaggctaccgtccagcttcatgtccttctcctgcgcacacacacagacatgatccagatccaagggcgtgagtgagaccgacccgcccgccaccattgccggcgtcggagagcgcaagagcaagcgagcctgaccttgactttgcggaattcggcggcgagggagcaggagaacgcggtggcgcagagcaggacgacgatgccgcagatggcggcccggcaggagagccccctgctccacttctccatcgaacccaacccaacccaacccaccccgagccgaagcaaccctgtaaacgcctcgcccacggctaagtacgtaaaattcgaccaaatccctcttcctacctcgctttgcttctccagagcatgtctaactactgcatataaatgagaggaaattctccgaacacgtcaagacgccaagactaattggctgctctgaataatcgaggagggttggtggcctctggatgatgatgatgatggaaacagaggaggagagagacgggatgctaaacaaaaccaaaccacatggccccgtcgactcattggtcaatacaatagtggtaattgtttagcagttttatgcacggatactagaagaagaagaagaacgaggaagaggaaaggagaacagaagaaagatggaattggcaaagatgagaggccctcctgatcgatctgatccctgtgtcgatgacttgacgggttggtaggctggtttggtcaaccggatagcgcctgtactggtttgggagaaggtggctgattggctaggaaaggaagcctgcaaggaaagaatcacgctacatcatggctaatcgcgttcgcccctgcaccagacactacctaatggtgcggccattgtttaagcccaagtcgtgtcacccatcgtcagatcagggcatcaggccacccaaacgaacaggaaacacgcatcgaccaataataaccggtgtttgtgactgcgtatgctgctgctgcactgctgcttgtgcgggcaaaaaggagaactacgaatgagaaagaccgggaggggagtgaggattgcgacgaatcgctttctttctttcgcagagttcccccccccccccccccccccttttccttgacgttttcgtctttgcgttcgctgggtggcagcggcagacggcgaggcgacggcgatgttgtggcgggggccgtgaggaatggatctcttcccggatgtttgggccgccctctggtcggtcaccttctgttgtcgcgtgcgatgcgtggactcggcttgggtggtggcctggtgggcgcgcgcgtgtggcccagcgttggggcgtggtggaagcggcattctcctcgtcggggcagacggatccatccgaatctggccgtttcgttcggtctccggtctccgccgcccatccaccaccaactggatgcgcgcatccatcatctcgctttcttctctttggttcgttgatctaggttgccttcccaatcgccagttgatccacttgagtcgtggggacgatcgtttgcgcgctgcgcaaacgatttcgcatgggtcaccggcttacgaacaggcagaaaagctaaacaaatcgtcacgcgtcgcatgtgtcaaatggacggacaatgacattggagaaacaaggcggcgttttttttttttcctaaactactcttcgagttcgagccttcgatggaggaagaatggaaaatgttcctctcgagttctagcctgcaatcgttgactgcataacgatgcagccgtcacccgtcagccttgcaagcagaagaggcagcccgacgtggactgctcgcgccaacaagcaacggtatcacatcagcaaaaccgtggtccgccgcctcgtattttaggttcggggttgaacggagaaacggttgagagccttactaacaatggggatattggattacgctatcaaaaaaacaatattaacccggggatttcagtgtgtctgctgctgtttggggttagttgaaagaggatcgccaattgtgattggtttggtcgtagtggtaatctaatcgtggtattaagacgatgggattagaccgtgacacatcgaacgtctcggttgatcccgaataaaattgacaacttttgaaaacgaaatcatcaatgatcaccccatctttgacacacgactctgctgatcccaaaggttgacatacaggtaccatataaagtactctatccgatattctttagacgacggcaatggatcattggatcacattgttttatttggttgttgaaaaatttatatccatattaattgggtgctcagagaaaaaaaaaacacccacaactatacctatagatattcccgaggaaactcctatgttaactgaaaattttagtcgttgtatctggaatcatgattgtatatcgtatttagagttttttaaacaatacatgcaattaaaaaaatcatctcttttcaacttctaccaaacatgttcaaataaaataagagtatgtaccaattacaaacttggaaacactaaaccaaaaataaaaattaatatatctccaaaagtctaaactgagtacaactcgatatttacaaattttaaatttcagaattattaatttatgaaatatagtacattgaatctccaacacaaatacaaataaatactccctccgtactcgtaaagtaagtcgtttaggacaatgtttaagtaaacattaggaatataaatcatgagtaattctcaagttgttgagtttgaaaatataaaaattatatgaataaatttgtcttgaaaaatactttcataaaagtatacatatatcacttttcaataaatatttttatagaaataagaagtcaaaattgtgttttggtgatcgtgtcactgtcctaaacgactttcttagggagtacttattaattaaaattttaaaaatattaaataaaacatacaaacaacagaaaacatatagaataaattttgatttagtgttgtatttaattctaaaaatcgaaattaataattaatgaatagtaattgacatggattattattttaacatgatctattttaatttgaaagttaacaaacatatttgacatataattaaaatttcaatatccatgttatttaacaaaaaaaaacccttgcaattattaaaattacagtgaacgggtcggcaagtagtcatcatttgttaatttgtttctctaccgcacaaaaatccaaagagaaaagtccagtttactcacccaaacaatttcattgtattacttaaactccaaaactattttgaactcattttaccctataagctactccctccataccaaattattgggcacccttatttctaaaaaaaattaaacttggtaatttttgactaataatcatgctaactatatcgataccaagtattatgcatgttatattattatattttcacgtgatgctaattttatattcattgggaacatgacatgaaataaattaatggccaaagtatatcattggagatcatgtaaaaaaataggccttataatttggaatggagagagtattaaaaatggttctttcatttctcttatttgtttctctttatacgagtcatattttaagcttatattttgcagagccacaaatgacaccattatcagagttctaaaatagtttcattttttttcaaaactatttgcttgaaatttaaattagtatgagtgtttccaacctctacaacaattaaaaaaaatcaaaaaatgttgagatataaattataatgcgtatatcaatgtcatcaaatttaattgcaaaatatgacatacatatagagaaaagaagaagacaaatatcattagggagtaaggtgagccattttcaatagttcgtggtgcaaaatgagcgaataaatagtatagaaggttaagtgctccggcgaaaggggggaaatatggactcttttttttttcaaatccaaatagccgtctgtggcatgtactgaactttctttcagtccatccatagaccgagggcctaggcccaagcgaggtactccagacgcggaataagttcacatgaggtccctcaacttaacagcgagaatttttttaggtccctcaaccacaaaaccagaaatgttcgcacctaaactcattcaaaccgttcacaggaggtcccttcgcagtataggtgggtggtttcgcttacgtggcatcctagtcagcaaaaaaaatattaaaattatgaggcccacatgtcagctgcagtttatttttcttctcttttctctcctcttctctttcctctcctctctctttgccggcggcgagcggcgatgggcgagcgcgcggctggagtaggtggaggggcggcgtcagcacgctagagcaggcggagcggcagtgtctgggcgagcgcggctgcggcggcgacaagcagcggccaagcgcgacggcgggcaagcggcggctccgagcgtgggcggtgcatggccggagcaggcggagcagcggcgtctccgggcgcgggcggagcagaggggggggggacgcggggggcgcggcgggtgagcggcggcgaggcgtcgcctctttcccccctcccgccggcctcatctccccccgctccgtccgttcccgccgctgcggcacgccaccacgctgggctcctccaaggagtgcgacggcggcgacgggaaccagcggcaagaacgacgtgctcgttcgctctgtccactttgtgtgccgctctcgccgccaacgacgacgcgaccggcggagtaggccgccacgctcctccttcggccacctccgccgttgcggccccctcctccgcctgccatgctcgtccgctcgcttgccgtccgctctgcccacagcccgtcgcgcttgccttccgctcgcccgccgccgtccaacgccgcttcgcgtgccgccgcgccgcccgtctccgttctgcccatagcccggcgacctgccgttcttcgacctcatgagcatccccggcaagctcatgcccgaccttgggcgctcggcattcgaccgccacccccttttgattcctccgccaccggcggcgacatatccgtcaccgcgggaatcccctcccggagcaggagcccgtcctggatcccgcccccacctcccgccgcggtcgcccgcagtcgctcttgccagcttcgcctgccgcggccacactcgccctccgccgccgccgccgctctcgccggccgttgccccacccgtctcggtcgtcgaagaagacgatagaagagaagaaaggggaaaatagaagggatgtggggcccgcaccgttttctctcacttacatgtgggccccacgtactttatttatttatttttctgactagggtgccacgtacgcgaaaccacctatactgccaagggagctcctgtgaatgagtttagggcgaggttaagggacctcgagggacctccggtgaacttattcccgagagatatcatgatgggcccaactgcttacatacagtcgattaggccggcctaaaacttttccgtgtgttccaccggctgttgatggaataagtccattgtgcgtccctcatctcttgtgcttgtgtaaataacatcccccaaccggaaaaccgggtataacgtctccttcatctctcaaaccagagcaaatcacctccctcagtggttttgctggcggtttcgtccgacgtggcgttgttgacccggttgacaagctgactcagcgtagtgggacccacatgtcattctcacacagaaaataataaaaaaatggtgggacccacgttttcccttcttctcgttttcttctcctctcgattcttctctctgctcttcctgtcgatgctgagacagagccggcgctgggcggcgatgggcgtggcgacggcggcagtcggcgcggcgacggcgatggcggccggcgcggcgaccgagaagggcggcaaggcagaggcggtttcggcggaggcggaggcggcgcccgtgcgggccgactggccgcgcgcggggtggcgctcgggccgatggtggggactggggaggcgatggtggcggcgaggcagaggcggttggcgcccgaaggcggccacgacgcgataacgacggcctgatgaagacggctagtcaaaggagcgcgcgaggaggcggcgccccggaggaagaagaaaccggcggcgacggcggtttcggcggaggcggaggcagcgcctgtgcgggcctaatagccgcgcgcggggcggcgctcgggccgatggtggggactgggaggcgatggtggcggcggtgaatggtaagtgaaatggggaggatgatgtgtttggggattttttgtgggggattttattgcagtggcttcgaagagaaggaaggatgggtgcacagtggtgatggcagaggcgacgcagcggcatgggcgtggctcacgagggcacgaggtggtgcaccgggtgtagtggcgttggcaaggtggacagctgcggtggcgtcgtggagtccagatccagttggcaaagagaggaggaggaggaggaggagatggtggggcagctgcttgctgcggggagtcgtcgatcagcgtcgaggttgcctcctccgtcgccgctccgaccacggcgatggcggcctccccgaacggagcctcggtagcggcgggcacggccgcagccgcgaaggggtcgagcacgtgcagcgaccgcggccgccgcagccaggtccacctcccgcgccgattcctcttccgcccacaaccgccggagccgtgcctccgccgctgcccttgtcctctcgtcgctggcgtccgtagttgcccatctccaccatccgagccagccaccgagttccccgtccctcactcgttcttcatccgtttcccgctactcctacctcgccgccgttcgtcggctcgccgtcgtgcgtcgccggccgtcgatctccccggtggtcaactgctgtcggtccaagatgacatcgctgcacactgacatgtgagtcccaccacgctgagtcagcttgtcaaccgggtcaacaacgtcacgtcggacgaaaccgccagcaaaaccaccgagagaggtgatttgctctggttttcatagatgaaggaggcattatacccggttttccggttggggatgttatttacacaagcgcaagagatgagggaggcaaaatggacttattccgcagttgatggcttcatgccaagcaccacgcccaaactgcgaccgcggatcgagcccgcgggcggacactgttccgttcgtggctgtgcggccatctccacgactccaccacctccacctgtagcatcgctttgatccatggaacaataaagaactcttgcctgcaactgtgcgtggccggtggcgatggcgactctaccctagtgtattctccgctctgccgcctccaccaggaccaccaccaccttcgctacccggcgccgtaccctgcgcagccgcggggcacctcggcggcgtaacgaggcgagggggatcggacgcgcgcgcgcgcgcgaggagaaaggccgggggggatcagcgatgagcttcgcggatctggaggccggcgcggtgcgggcgcccaggagggcgcggggccccgacgccacgcgcgcgctcgtcttccagatcaccaccgccgtggcctcctaccgccgcctcctcaactcgctcgggacgcccaaggacacccccgcccttcgtgaccagctgtctctcctcgctcccccccactcctcactcctttaattgttgtttgcctctacacgtttcatgtcctagaatgctagatgctcgcgattattattatttttttggctcagctcaagttaattgatcgaaattgtgatggttggtagctcatgccctcgaggcatgtcgtttaccatcactctggtgttctgattggttgatttctccacaggcagaagactagtcataacattcttcaattggcaaaggatgcgaaggagaagctcaggagagctgctgaggcagacaagaacgccgatactagtgttagtagtaatttactgtttatttataccctttgttttagcccagtgaatttgtcttggacaagactgtttccaactatatgtgtgatcatgtatgcatctttctgctcttagtttacttagctaccatagtgattaggaatctgggtatcatgtgcaggcagacaagagggttgctgacatgaagcttgccaaggattttgccacgacgatggaggagtatggaaaacttcaaaatcttgcgattcaaagggagatggcatataagccagttgttccccagacatctcagccaaagtaatgcttgtacacttttcattcgattcatctcaaacttttctctgtattgtttgattgtttcattttcctgccatgatatgccattggtttttaatagtataccgacgaatggccatgtgtagaagttaatttacatgcacatgttacttatcagtggcttccacatggattctaacaaatctatctatttatctatctataaaaaggaatataaaaaggagcctccacgttcgctctcacggcctagaaattctcatattaatcggagaaaaagaaaaacagagtccatatggaaatacaatttagaaatacttgaaattcggaattaaaaaataaggaatattggaagaggagactagagtccatatagaaatacaatttagaaataactgaaattcggaataaaaaaaaaagaattttagaagaagagtatagagtccatatagaaatacaattaagaaataatagaaattcggaattaaaaaaaataaggaatattgaaagatgagtttagagtccatataggaatttaaaactaactaaaattcggaataaacataataaaactaaaagtagagtttagaatccgtataaaaatacaatttagaagtaactgaaattcgaaataaaaaattaaagaatattgaaagatgagtttagagaccacatagaaatacaattagaaacaaaaaaaaaatcagaattaaaaataaataatattggaagaagagcgtagagtctatatagaaatacaatttacagataacgaaaatttggaattaaaaataagaaatattgaaagacgagtctagagtccatataggaatataatttagaaataactaaaatttgatattaaaaataattaataactaacacgtatataaaatacaatatgaatattacacattagtagtttcgtaaagttagtacaaaatttaaaattatgttgtcattttaatatattttaataataaattgagaaaacatatatgctattatatgagataaaatatagatgctagccgcaatctgcacgggccaccatgctagttactagtatagtaataaccaattcctttgccctcattgcttgataaaagagtttggttgaataatctgattgtcggcagaggctggagatgtaaaccatttctattatcttaaaaaaagttgaataatctgatactgttgtgtatgggccattttggtttggtgccaatttttgccctaccaattctttggtagttttgaatagtgcatgttagcattttggattggagccaatttttgccaaatcaatagagtggagccaaatctatgctatcaaaaatttggtagtgccaaaatttacccaaggtttggtaccagtattttgatagggtttcaaaccaaactagccctatgtgaaccattggccaagtaatacttctcacaactttttggcatagtttgttactgtgttcatcatgatccatttcatttgcttatgctgcaaccttctaggattctgcctagcttatattggcatttttttctttgaataggtcatataactttgcctatgttattgctccattagcttctcttcctttgaagtatggagatgggtcttattattttgcattgtaaaaacatacaatttaactaatttaaagacacattgccttctctttgtcagtgtcatgaccatccgttttacttgcagtttacctgatgacctcatttagtgacatggtttatcttaaaactaaaggtattcatgtgcagagttgactgggttatcttctaatatctttgagaattttggtcactatgatgtagctatactacaggtggtatagaagccagggattctggtaaaattcctgaacagcatgcgctactcgcagaatcaaagaggtcagtgttctcatagctcttctttttctgcttattttttcaactagtgatttagtacttactggtggaaggtcagctttaatcgtatagcgcatgttttttcattctatcccatcagaaaatattcaattttagtgacttcctgtggctgagttttcatctgtggtgcatggaacttacataagtcgcgtggcacgtcatttatctcatgggcagtatatcacctcatgaattatatacctggcacactttctatgtctttttgggagagtacatgcacctaaaatctgttagatcaaatgcttctgctggaatacataggccaagtggccatgcattattttgaccgagcctagattgtgtggcagttacagtaaattgcagtgttggtactttacacag

SEQ ID NO: 21401 - DNA, 963 bp, Oryza sativa
tgataatgacgatagtagtaaatctggcaaagggaaaaaggacaagtttgtcacagcgagggagtactattgcttcaggctgcaggttagaaggggacttctaaacatcatttgttcggaggatgacttttccaacaatgagccgttgacatgtacatcaaaatcgagtatatgagactcgattggtactcaaaacctgagaaccaaaaaaagattcgggctgagctataccaggtaaatggtataacatatttctacaactattgatattgtctcccatctgtgattcaacataccagttatttgatcatggtgttatttaataattgcagggcgtggttgacgtgctttcttctggagagacaagcggttcggcagttggtaagaggattgtgctacctcgatcttttccgggaggtgatcgcgacatgcaacgaaggtttctcaatgcgatggctcttgtccaatgttttgggaggccagattacttcatcacaatgacgtgcaacccatactgggatgagataacagaacatcttgaacccggccagcaacctcaagatcgaccagaccttgtcgcaagagttttcagggctaagctgcgagatgtgttggatcttattgtgaagaaaaaatattttggggaggttcaggcttacgcgcacgtcactgagtttcagaaaaggggactaccacatgaacacatcctgttgatcatgaagtcaagcagtaaattgacaaccccagatgagtacgataaagtgatttgcacggagataccagacaaggccaaataccctgagctacatcgtcttgtcatcaagcatatgctgcatggaccatgtggcacactgaataggaattgtgcttgtatggtggatggagagtatcgcttcaactttcctcgatagttcaatcaagcaacacaacaagggaaggactcgtaccctttgtacaggagaa

SEQ ID NO: 21402 - DNA, 15103 bp, Oryza sativa
gatctgggaggagggaggggagatgccgctgccgccttctgcgccgccagatctaggaggagggagggaagacgctgcagcctccgccctcctcgccgtcgcagccacacaccccgccgccgtccaacccgagccgccggtcaccggcctcccccctcctccctccggccagatctgggaggaagggagggaggggagctgtcggccggcgagcacatactgcgccccgccgctgtccgccccacgccgccggccaccggcctccccgaaccctagcgcgcgccgcgtgctccctccgcacggtgagccgagccaccgacaagcgggtcccactcgggaccacgcgagaaggacccagcccaccggctccctctctcctcccctctcgcgcgtgccttgggccgccttctcgggccggctggcccattaagctcggccgagccgtgcctttttctctcgggccgcgccctagccgcccgagggaagtctatttcccctccctctttcttttctttttccaaaagggtttaattaaatccttttcctttagaacaaaagtccaataatcttagaaattcaatatcttctcaactgtatgtccgtttgactccgttcaacttccaaaaaatcctcaaatctcgagatctatctaatggcacgcttagaggtcaataatagggctttattttcgccgtttgttgagttgtcccgttttgcgtgtagtttcggagcccttagacccgcagtgcgagaatttcgaggatcaagcccaagatctcgagcaaggcaagtcacctttgatcatcttgcacctataacttaaatctaagtatttcttttccgcaaatattgcatgaataggattaacacgagtacttcggccacggcttgcgagatagcctactggccccaatcctaattgctgcaattaccctccttgaattattgaacacttaaacctcctttgtcaactgttgtgcttcgatgcacgggcctcctggtacgcgcatcggaacaccttccctcaaatttaaaatatccaatgatgggtaaaacttggggctttacaaaagacttgaaaaacccgacacttgggtcggtacttgcgaattaaatgaatttccaaaaccgcagaccggggaacgtaccgagagtacggttttccgctcttgcacttaaggaccgttttccttggaatttcatccgaacataagacaagtgtgatgattggtccaagtcttggcttccgctttccccttttgtgatgcagttgtgagctcgggatctgtccgcagcccaacatgactgtactcctactctgtaataaagagacctctgttgctgtgatattctgtcttcctgtgataccagcactgtttcctgggactggtatcgatgaacaggttaatttggagcgtcacaggatagttccgttcagggctagttcggggtgtgtccggtggagccggtgcgggaggctgcgggtgaggtaggggaccgtgaacggctcagcgggcgacgcagcgcgtccaccagcggcgccaccgccacgtgctgcagcgctgtggtcttgcctcgtgcgagcagcggccgcagtggccggcggtgacatctctccgcctcaagtgaaaccgagatgctctcgttcgctctctctcttggggtaccacgcttggtactcaggtaccaagatttgatacctaggtaccaatttgacaccagggtaccaggtaccaggtttacgtcggcgcacctcccgctcgtggaagcgccgccgctcgtggacgcgctgcatgtgatgcgtcgcccgtcgagccgcttgcgctccccgaccttgctcgccgcctcctgctccggctccaccggcgaggcgtgctccacttcctctactgtaacgctccacttttcgtgagacgttaaaaactaaattacaaaaaaatcctatatgcgaaaatttcgttccttgagtgctgagtttaagtcgtgccgtggatctcaatttaaatctccttgatccctctgtgtccatcaatcgatctatccacttatctaacctatctatccatctacttctcggaagaagtctattttacctccctatatttttggatggaccggtttcctcccccggccatctcccctcccagcccatcaccgccccccctctagcacgtgcgttgcacgcaaccgagacgagagagagagcgccgctcgctctctctgtttctctctctccctcgtcgaactccctctccccggcgccgatttcccgccgccgccgtttgaaatccggccgcgccctcgtattcgcgcgcgcgctcgccgaccgcccggtcgtcgccgcgttagtcctggccgcctgcgccacgcagccgcccatgccgccctgccactcgctccacctgtgcgcgcgtgcgtccaagacatggaggcagagcctcggctcccctctctcacgctctctccctcctccctctgctcgcccaaatcggcaaggagccgagctcctttcccctccccttttgctttttccctctcagcccggccacccgtgaccacctcctgccactccttgaccgcaagcgccgcgccagccgagctcccttgaccacctaagtcggtttcctccccccaaaaccgacttcccgtgcctataaaaccgcagccgagcccctcctctcaacccctcccgcttcactctccacgctgccgcgccattgtcgcccctgccctgcagtcgccctcgctgtccgtcgccgaagctccaggaagaccgatgcgtgcgaaggacgcaagaagaggactccacgtgccgtcatcttccccttccccggcccgaggccggagagctcgctcccgcgccgtcggtcacccatcacagcgcccgtctcgactcgatagtgcctctctccgttctcccttctcactcggcctctccctcttttggctcgcacgtagcttggtagccttcccgaacgcgcgtagacgaagccccaattcccgccaccgcccggcatggccttgtcgccattgccgcccgttccggggagccgccgctcatcgccggcctccctcggggcccctccgtcccatccggcaccggaaatgaattccttgcaccccggagatactctcgccaccttgaatcgacctttcatcgccccaccgcgattttcacttttgctcgccgccggccgccgccgtcgcaatccaccgcccttgacctctcccggcgaaatccgagccgttggctcgcctcctctcgcgcctatcttcgctccggtggtctcccctccttccgccgtgcctcgcgccgctccgccgacgcgcgccgccgtccgccgtccatccggccggccttcgtcttcctcctctcaccatccgacgcggccgccacgtaggcgccacgtcggctaggccgagtcaacccgtcagcctccctcccccatcccggtgcgcgtggtccacggtgcgctagccgccgacgcgtgggcccgcctcttcctagtccatccggcgcatgcggcatgagccgagcccactaaccctagcaccacaccccgcgtgcactcccccccaccgtgaaccaggccgccgccaagtggcccccgtcctgggacccccacgcggtggatccggtccaccagaccgcctccctctccccacccgagccctaatgggccaatctcctttgggccgcgcctcacgctcggcctaaaaagtctatatttcctccctccaccaaatcaattctcatacacaaaagtccatctttcccccttgttggacccacatatcaatgagtaattaaagaatattcttgggaatattcttttccataaatttaatagatcatttcttaaaccatttctcctattccagaaattccaattaagcttccgaaattcttatcttctcaaccgctcatccgattgactccgttccacttccaataattccgtaaaattgagatctatttaatggcactattatttagtctaaatagggtctttttcttggtctttttttctaggttttcgattgtttgcgtatagttgcggttaccggattttcgtcgatcgtggatttctcgaagattcgtgaagctcagtgaagaccttgagcaaggcaagtcaccctttgaccaattgctcctataattgaaaaatcattattattttgtttgcaacttgcattattagaatcacacacttaacttgcttggcctcggtttgcatgctaaaccgacggacctatccagtagtcgcactacttcctgtaggctgacataccctgatcccttgtcgctccaccattgtggtacttcagtatccgtgctctctaagcctgtatgccaattatcccacatacaccgttgtttgtcgaaaatttgggcaatgggtttgagaagccttgaaaacccgacatgtggtgtcggtgtgattgaaaataaaatgaattgtgaaaactcgcgatgcgggggttgtgcctatgtggcactgtcccgtattcgcatataaggaccgattcctgtgggaaactcatcgaacatgatcaaagtgcaaccacaaggtggaatgggacaccctagctaagtaactagtcggttcagggaaacctcgcatgccaatagttgggaacgccggggcggggtcggacaaaccgggttcctggtaaggcaaggacgagaagcttgctcacttaccgatcaaggtggttggagttgatttgtgaatgcctagaatggcctgtatttatgtgaggatttgatccttctatgtggcatgaggtaaccctgggtcggcttgagaaaggctttgtcgcgaacctctgataccggccagtgtctggactaagttcgtgtcttgtgggtaaagtgtacccctctgcagaggttaactaactattcgaacagccgtgcccacggtcatgggcagatgtgaggtggttcccgttgcgtagattttattgcctgtgctttgtgaaaagttgttgtggtgtgggaatcgttaccagaatcagcctatgtggcaaatggatgacctgagtggtcggaaacgaatctgtgtgattcgggatgtctgcgggcatcatagactaggcttcctgagtggaagcggattgttgtgctgctgggcagctggactctgggagtccgagaaaatgaaaaaggctctgggagccgattaatcaagtgaaatggctctgggagccgataagtaatgatctgacccgggaggtcggtacattaccatttgagttgttgaaaagcatctcttaagtcaaatcgagacgtaagtctcttttcgatccaaactcaaaaagaaataaatcacttagtgacttcaaaaatgatttcaaacaaaggatttgcaaaacaaccttgcctctcttccaagcttgcattaaacacctaaattcccgtgacttgctgagtacgaaattactcacccttgctctatatatatatatatatatatatatagtacatttgtttggtgctccatggtgcccgggcaccattgttgaaattgagtatatagttcctctgccttgaagtgaagatgaagtgaagtgaagattagggtttcgtcctggttcccagccgtcgtctgtggtgttgggtgttagcccgttggttccgctgctgctgctgttgttggtgttttctcgtccgcgtcgtcggttgcattctcggctgttctgagctgcaacctaagttaaggtaaataagtcctctatttattttaaggattgcaatgattcatatttgtcaccgtgggtaccagcgctatgtcctgggactggtactgagatcgcggtttcgtaagaagcggttcgcgccgttattcctatgacacgctcctgtcaggtgccgttgtacggcggtgctggattggggtgtgacatccacctcttccctcacgtgttcgacctccgcggcccgccccgctcccgctctccctcttgctcaccacgcccgccgctgagctcctcgccatcgctgcctcccccgcggcagcggccgccggctacagcgagcggtgcggcgacggtgacgggccggggagggctgtacctcaggtgccatctgatttgggggaggagtgaggtaggaggaggggatccggattagtatcctgtctccatgggataccggtgtatagattttctcctaaatatatgatagcgctgaccttttgatttatgcaaaaagagactatgactaaaatgtattaaaataaacctgcacttttaaacataagtctatgaaaatatattaaaatcggtgagtacgaaacattgcacttcacatctcctcaaaaaaaaaacattgcacttcacatgtgcatcaataaccttacacatatgccactcatttaatattttgatattcaaaattgataattagggagtatgtaacgaacatgagcattttttttaatttagcctgttataattcaaaattaaacaatgtactcaatatatattaaaatttaatatctattctataatgactggtgcgacgtatttgttgatgatcagtaattttcaataatacagaagttaagtctgaaagttaagggtgtcaaatgtctggttttgtagtttaggggtgtaaattcgaactgtcaaaatagttgaaggggttatttggatttttttttcctatactaggtattctctgaaatgtttcttccaattacatttttcttagtcataatacaaaggaagcatgtccttctgtccttcggtgccaattacagaacaatggaaaaactaaatatagttcatcataagaaggtacattaagaaaccacagcttacagatactaagcagtagttcctcttgaaagaaattgattaatacagtacaccttctgcataaccttacactgtatgcaatcaacaaagccgaaaacagcataccttaaggttccactgaaaaagaacattccaaaccatacccaaaacccgaaaaccactccagccattacacagaaggatagatactggtcctcgcattttctacaaaatctctcatccgatgcaagtgaagaacttgtgcatgaaatgttcaatggaaagccacatagaccataattgttgtggtatattgatgggtcactgagggtttgaagttgattcccagtgggtatcttacctgatagatgattattcgagagatttagaatgtcaagagtagatatatcagcaaggcttggaggaatggctcctgaaagttagttcaatgagaggtcaaggaactctagatttttcgtattaccaatgtttttaggtatgccgcatgacagatggtttcttgacaagttcagaaatagaaggccttggagggttgttaactcatcagggatacactgcgacaatgagttacctgacaaattgatacccgttagtaattcaattgttttttcgaaaaattgctcttgccccttccagattgtatcgattccatccgagtaaagcagccaatttatgtaagaagaccattctaatgtttcttgagcagataaagtatttggattcttcatggaagttaggttgccaaaagatttgggaatcaatcctgtcaaaccgttgttgcttatgtctaacagttgaagttgagagagattcgacaactctgaagggatttcacctgtgaagttgtttgatttcaggctaagaaacttcaacgacagaaggcctttcccaatccaaggaggaatacctccaaagaatctgttgttcccaatatctagggtgatcagcgccttacacatctctaacgatgatggaaaaacaccggtgaagccgttgtcggcaagatgaaccgattcaagagaacagttgtagttcgtctggactgtagggatttcacctgagaatgcattgttggacaagtcgatgaactgcagattttgcaggttccaccagcagtcgggcagcttaccagtgagcttgttgtttgacaggtacaggatctttagggagagcagttgacagaaatccgaaccagatctgctgttagaggaattccctgacgaatgatcaactccctgcatcttgaaattgtttcccatatttcccggaatcggtcctgaaatggagttatggctcagcttcaggaatgtcaaatggctgagatgacccaactcaggtggaatacctcctgtcagatcattatctgacaaatcaagatcctccaagcttgtcaaactccctaatgctgcgggtatgctgcctgataatctatttccaaacatgaacaacactatcagtttccctgcctttcccagctccggcggaatcttgccggtgaacaagttgttctgcacttggaaggatatgagctcgggccagctcgtgaacaacgccggtgggatctcaccggtgaggttgttcgttgaaatgctgaacacccgcattgcttgcatcccggcgaactccggcggcaatccaccggagagctggttcatggacagctccatgacagtgagattcttaagatttcccagctcaggcggcagagttgaaacgagctcggcgttcatgatgctgagctgctgcagcatctggagctggccaagaacaggtgggatagtaccgcccagcgggttgaatccgagatcaagaaccttcaactgcgacatcgaccccaggaacaccgggacgccaccggtgaggttgttgctgtcaatccgaaggtccaggagcttcgtcaacctcccgatcgacgccggaatttgaccggagaacgcgttgaaggacaagttgaggtacatcagattcgggagcttttccggcagcatgtctggtatggacccagagaaattgttgtgcgacaggtcgaggaaagtgaggttgccgctgcggatgacgaactccgggaagctgccgttgagggagttgaggaaaagagacaggaacgtcatggtgggcatcggcgagaacttgcggaagtcgagcccggtcaggtagtttgctcccaggtcgacatgggcgatcttggggagccggctgagctggtgcgggatggcgccgacgaggttgttgttgtagaggcggaggtcgacgaggccggagaggtcgccgaactgcggcgggatggagccgtcgaaccagttgctgccgaggtcgagcgaggcgagtgagcgcagccgcgagattctggccgggatcgcgccgacgaggtagttgtcgttgaggtcgagctcagtgagcgccgggagcgccgcgaagtcgagcgcgtggatgccgccgcggaggcggaggctccggagccggagcgaggcaacgctgccggcggcgtcgcaggccacgccgcgccaggtgcagaccggcgcggcccgcgtccagtcggacagcgaggccgcgtcgtccaggctggccttccacgccagcagcgcgtcggtctgcgacgacgacgctgccgcttcggccgacgcagggatggcagcggccgcggcgaagaggacgacgacgtcgacgaggaagaaacggtggacgacgggagccatgtgcgcagtcggttccttcatggcttcatggcagaggcgtagtagctcctagtagtaatccagttagctgactaacgagcagaacggaggaaaaacaggagctggttggcacgacgtggcgatctcgcgttggagtcgtctccgactatgcaggtatgtcaatctatctatctactcgggaagctattttaatccatctaagtggatgttcaaatggttataaaaatttcttaaaaaatttaacaatgcccatacaacatatatatatatatatatatatatatagtatatgctcactacacaaaatcttaggataaaattaactcacgcatcgaagatataaaaagacaaattcaacgtacaaatagcagcattctgttcgcacctgaatttatctttttctttatgtgtaggtcgaatttcaagttgattattgatagaccaatagatgtcactgtactttatattgtcattttttttcaataatttttcacaactatttgtgttggctttgaaaaaaagtataaaggggacatctaatgaaggtactagaatccattccctatctactcatgttttactccctccgtatcaaattttaaggctatattattttacacggttttcagagacatatttggggctttccaaagccctagttcaagaaaaaattattccatatcatattcctaacgaatatgaacttagcaacacatgaaagcataatacttagcatatatatgtttagtatgattatgagtccaaaagttatcgagtttgatttttctttaaaaaagagggcgccctataatttgggacggcatattatatatttttttctaaatcaaacttacgtttgactcagattaaatttagtaactttataacaccaaattagttttatcgaatgtaacattgattatatattttgatagtatgtttgtgtggtgttgaaaatgttactatatttgtttataaacttaattaaatttaaagaagtttcactaagtaaagaataaaaatgatttataatatgaaatagagagtgttaatttatttgttattaaagtaaagtagtaggttaggtcaatcatggaccatatcctatgcatacaagctttccattcacaccaactagcaaatatcataaaaaattctagaagaaaatggacacatactttaaattgtattacacttatatgtgaaaccttatctttaaataaattatattttagccataacaaaagagaaaattctgatagatttttattcttaaaaatattagatttttcttttttatggttaaaatataataaatttgaatatcagacgttgcaaagatgtgtaatattattaggagcacaaatccaatttttttcaagaactttccatgataattgttagttggtgtgcacggacagtacacgggaagtttgtgtgccagaatatgcttttgcgcaatcaagtggctagcatctatataaatttatgatgtaattgtgcggctagcatcaatataattttatattatgatgtaaattcatttgtattttctacacattaatatatataaaatttcttaagtagtcaactgtcacactccaatctggcaccgccgtacaacggcacctgacaggagcgtgtcgtggggaaaacggcgcgaaccgcttcctacgaaaccgcgatctcagtaccagtcccaggacatagcgctggtacccacggtgacaaatatgaatcattgcaatccttaaaataaatagaggacttatttaccttaacttaggttgcagctcagaacagcccgagagtgcaaccgacgacgcggacgaggaaacaccaacaacagcagcagcagcagaaccaacggactaatacccaacaccacaggcgatggctgggaaccgggacgaaaccctaatcttcactttacttcatcttcaacttccgggcggaggaactatatatatatttatatagagtaagggtgagtacttttgtactcagcaagccacgggaatttaggtgtttgatgcaagcttggaagagaggcaaggttgttttgcaaatcttttatttgaagacattttgaaatcactaagtgatttatttctttctaagtttgggccgaaaagagacttgcttctcgattcgactttaagagatgtttttcaacagctcatttgataatgtaccgacctcccgggtcagatcattacttctcggctcccagagccattccacttgattaatcgtctcccagagcctttttcattttctcggactcccagagtccagctgcccagcagcacaacaatccgcttccactcgggaagcctagtctatgatgcccgtagacatcccgaatcacacagattcatttcttgaccactcaggtcatccatctgcctcataggctgattctggtaacgattcccacaccacaacaacttttcacaaagcacaggcaaacaaatctacgctacaggaaacacctcacatccgcccatgaccgtgggcacagctgttcgaacagttagttaacctctgcagagggggtacactttacccacacgacattactaacccggatcacccagcccgtgagatcagccacgtcgagagaccctaaggctttcatgacaaggcatttcgaaagccgacacaggtttaccatatgccaacaagaggggtcccagaccaacaccaggttaggtcccagaccatactgtgccaggaagcccgagggttctccctgacaccaccccgttgaatccacatgtctcttggcatcatggctcccccgattagctaattactcagccaggggcgtcccattgcacccgtgtggtcgcacttattatatgctcggataaatttcccacaggaatcggtccttatatgcgaatacaggacagtaccacataggcacaacccccgcatcgcgagttttcacaatctattttgttttcaaacacaccgacgccacatgtcgggttttcaaggcttctcaaacccatttctcaaattatcgacaaacaacggtgtatgtggaatagttgatatacgcactcagagaacacggataccgaagtaccacaaaggtggaacgataaggaatcagggtagtacaacctacaggaattagtgcgactactaggtaggtccgtcggtttggcacgcaaaccgaggccaagcaagttgagtgtgtgattctactaatgcaagttgcaaacaaaataataatgattttccaattataggagcaattggtcaaagggtgacttgccttgctcaaggtattcactgagcttcacgaatcttcaagaaatcccgcgattgacgaaaatccggtaaccgcaactatacgcaaacaatcgaaaacctaaacaaaagaccaaaagaaagatcctatttagactaattagtagtgccattatatagatctcaattttacggaattattggaagttgaatggaggcaatcggacaaacggatcgagagatatgaattttctaaggattatttgattttctgtctaaaggaaaaggaattattaattctcttggaaaagaaaaggaaggagggatcggatttagactttctcgagcaacttaggcgcggcccgagggattcacaaggcttggccggccattgggccgagcgtggccacggggaggcggcccattagggcgcgcggggagggagggaggcccgacggggtgggcgcggtccgccgcgcggggtcccgagatgggcccgcatggcggcggtcgggtgtatggtggggagggcgcacgcggggacgggcgagacggaccggtggattgggtgcggatgcggtgcgctggtcgacaaggaggcggcgggcccacgtgcagcctcatggctcaccggggtctgcgcgcacggggatgaagggacgagggcgagcggctgaccggcttgaccgagtcaagccgacgtggcacctatgccaggccacgtgggcggcgagaggaggaagaagggggatgccaagatggacggcggacggtggccgagttcaccggagtttgatgcggaggtctagggccaaggggagcacaccagaacgatggctaggataagagggagtgagcctccggctcggattccccggggggggggattcaatggcgacggatttcgacggtggcggccggcggcgatcaaaaggggaaatcgcggtggggcgacaagaggtcgattcaaggaggagggagcatctccggggcgcggggaactcatttccggcaccggatggggcggaggactgccgaggagggctggcgacggcggtggcctccgggagcgggcggcaacggcggcaagcctatggcgggcggcggcgagacctggggcagcgtccatgcgtgttcagggggctagccgaggtaccacgcgagctagggagggagaggacaagcgagaagggagaacggagggtggcactaccaagccgagacgggcgcagtgacgagcggccgacggctcaggagcgagctctccggcctcgggccggggaaggggaagaagagagatggccggagtcctcgtctcgcgtccacacacgcactggcctccgacgcgtgcgacggcgaagagacgaaggcaagaggtgggagcggcggcaaggcgtcaacaatggcgcggtgagtgtgaggcgagcgaaaacgagagaagaaggggtttggggtggcttgggttttatagtggaggcgatgtcggtttggggagtgagggaaaccgaccttggtggcggtcaaggagagcgagctggcggtgagctggtgcagtcgcacgaccagcgtccgcgctttggccgcaagcggctgggaccatggatgacatcggcggtggtcgggaaaaaggggaaacgaagagggaaaggagggcttgacccttgccgaaacgggaaaaggaggagggagaggggagtgagacaggggctgcctctctcggccttggaagctagcggcgtggagcggcggagcggcagcgcggcagggcacgacgcaggcggtgccagggtttgacgtagcggcgaccgaggcgttggccacgcgcgaacccgcgcgggaagggcgaatgcggtgggagcggcgtccttgccggtcgaccatgcgcgagcgcacgggaaacggtgacacggccggaattttggggcggcgtcggcgggaagcgaagccgagagagagagagaaaaaggagacggcgctgtctctcgctcccgaacacgtgcgacgcacgcgtgagacgcacgcgtgagagagctgggccgagaggaggggatgggtcgggagagagaggaatcagctgtagcgcccgttccgtcgtggcgcctagcgggaaaactatctcttaaaaaactctatttgcgaaatctgtttctttgcttgttgtctagtgtctgtgccatctcagatctcaaatccccgatctatcgccgagttcaatcccgaatccaaatccttcccaaatcaattcctccgcaaaagtctattttgcctccccggggtcgatgggccgaatctctctcggcccatctaccccggggtgg

SEQ ID NO: 21403 - DNA, 32364 bp, Oryza sativa
agggagaggcgctcggtgcggctcacgcgcacgcgcgtgcggcgcacgggcagagcgagggaggggagagagagaaagagagagagagagagaaaatgggccgagagggaatcggtccacagaacctgagggaggcaaaatagacttttcgggaaggattgagattagggatttgaatttgacgatggattggggatttgagatttggaattggcacggaaactgacaacaagcaaagaaacaatcttcgcaaatagggtttttagaattaaaattttcccactaggcgccacgacggaacgggcgctacagaccaacccccctaacaagaatcttgaccccgagattcagcacgtaagggagcagctccggaaactcggcgcgaagatgatcttctcgttcccaggttgcttcatcttcggaatggttgctccattggaccttgtagaacttgatggtctttcgtcgagtctgacgttctgccttttcaagaactctgatcggcctttctttgtaggtcagattcttttccagctcgatattgcctaggggaacttgttcttctggaacacgaagacatttcttcaactgagacacgtgaaacacgttgtgcacatctgcgagaccttcaggtaacacaagctgataagccacttcgccacgtgtagcgcccgttccgtcgtggcgcctagagggaaaatgtaattcctaaaaacccaaatttcgaaatatgtttccttgcttattgtctagtatccgtgccaattccggatctcaaatccccgatcgatcgtcaagttcaatcccgaatccaaatccttcccaaatcaaatccctccgcaaaagtctatttcgcctccctcaggttcgttgggccgaatccctctcggcccatctccccctccctccccatccctctctctctctctccctctctctctctctctctttctccctctcccccgctctgcccgtgcgctgcgcacgcgtgcgcgtgagccgcgccgagccgagcgccctctgccctcgttgccgtttcccgccgacgccgcccaaatcgccgcgccgcccattgcttcccacgcgcgcgcgcatcatggtggccgaccggccagtcgccgccgccgtcagcgtctgccgcgcctgctgcccgtgtcgtcgctccgctccaaaccgccccgccgtcatcgccatcgtcatcgcctggccccccgccactccgcgcgcaagctgccaaaggacggaggcagagctcctcctccctctgccgcgtcgcccccgctccctcctccttttcccgaagaggcaaggggacaagcccccttttctctccctcttttcccctttttcctcccgccggcgtcatcctcctccctcctccctgtcgccgctttggccacgaccgccgagcgctagccctctcctttgaccgccctaagtcggttcccaaaccgacattgccatcctataaacccaagcttccccctttcctttcctctcccattcgcctccacgccattgccgccgcctcccgtgctctgttcgcagtcgccgttcgtcgttgcgcgtgtcggaggagccggcacgagcaaggacgcggaaggggactccgagcgcgccctctccttcctcttccccggcccgaggccggagagattactcccgcgccatcggcctctcgtcactgcgcccgcccgcacggtagtgcatctccccgttctccctcctcgctccatctcctccccttagactcgggtagtagcacgagtagcctccccgtagctagccggcgccgccccgaccgttgccgccgctcgccgtgtgctcgccgccatcgccgcccgagctcggaagcgccgctcgtcgccggcctcgctcggcgcagctccgcccaatccaacgctagcattggattcccgtagccgcgtagatgctctcgccgccgggaatcggcccctcgtgacctcgtcgccgtttcccccttctcccgccgccggttgccgccgccgcaattcgccgccgtcgggcatcctccggcgaatccgagccgttggctcgtctcccctcgtcctgtgcaaccacccggtgtgctcgctttcgcctgtatcgccgtggttcgttccggccggcgtcgtcgtctatctcccgccggcccgcgtggcagccacgtaggcgacacgtcggcgccagctcggccaaaatcgggtcgggccgaccccggtcagcccctcccgtgcgcgcgttccaccgcgagccgtgaggcggcgcgtgggcccaccgcatccgcgtcctccgcgaaccgcgcgcgtgcaccgcgtccctcccccgcccgcgcgcgtgcgccgcgtgctcgctccgcacggtgaaccgtgtcaccgacaagcgggtcccacccgggaccacgcgtggtgagcccggtccactggctctctctctcctcccctcccgcgcgcgcgccttgggccgccttgggccgccttgggccggccggcccatttagctcggccggaccgctccatttgtctcgggccgcgccctagccgcccgaggaaaagtctattttccctccctcttttcttttcttttcttttctttttcaaaaaggatttaattaaatccttttcccttagacccaaaaatccaataatcttagaaattcaatatcttcccaaccgtaaatccgtttgactccgttcaacttccaaaattcctcaaatctcgagatctatctaatggcacgcttagaggtctttaatagggctttattttcaccgtttgttgagttgtcccgtttcacgtgtagtttcggagcccgaagacccgcagtgcgaggatttcgaggatcaagctccagatctcgagcaaggcaagccacctttgaacatcttgagcctatatttgaatttaattatgttgcttgaaaaatattatgcattgataggatcgcacttaatctgtttgtcccgtctgcaaggcagattggcggacctacctaatttgttgcatttgatccttcctttgttaattgttatatcatgtccccttgtaaccatctagttgcgcctcgatattcgtgcaccctatgctagtatcgacggtcgccttcaaacttaaaatctgaaaaacttcttgggtaaaacttgggttttacaaaaggcttggaaaacccgacacctgggtcggtgcttgcgaactaaatgaatttccaaaaccgcggaccagggaacgtaccgggtgtacggtttcccgctcttgcacttaaggaccgtttccttggaatttcatccgaacataagacaagtacgaccacatgggtggaatgggacacccctggctgagtaactagcttatcaggggagccttgatgccgagagacatgtggattcgccggggtggtgtcggggaggacccctgggcttcctggcacagtatggtctgggacctaacctgttgttggtctgggacccctctcgtcggcatatggtaaacctgtgtcggcttacgaaatgccttgtcatgaaagcttggaggtctcccgacgtggctgatccccatgggctgggtgatccgggttagtaatgtcgtgtgggtaaagtgtaccccctctgcagaggttaacaaactgttcgaacagtcgtgcccacggtcatgggcggatgtgaggtgattcctagcgtagtgttgttcgactactgccttgtgaaattgctgttgtgaaaaggggatcattgtttggaaaatctgcagctgatgggatcagctaggcccgggtggccatttgaaagttgttggcccgggtggccatttgaaagttgttggccgggtgccaatcttgatcaattctaaagactgatacatttgcacatactccgaccggacgagacgcactgtctcatccatgtcgtttgagaagcactcacttagttgctttcagaaaagagttcaaataaaatcaattgcaaaaacaacagcctttccttgaagcctgcattaaacacttatttcccatggcttgctgagtactcctgtactcacccttgctgtacataaataatctcccccccagttgctgaagaagatgaagcggatcccgctgacgaggagttcttccaggagcaagccggctacgatgagttttagggtttcggcctagttcccaagtcgcgcctatgttgtttggtccaagtcctggcttccgcttcccttttgtaatgcagttgtgaactcgggatctgtccgcagcccgacttgattgtactcctactctataataaagagacctctgttgctgtgatattctgtcttcctgtgataccagcactgtttcctgggactggtatcgattaacaggttaatttggagcgtcacgggctagttccggtcggtactagttcggggcgtgacatcagcccatcgacaagggaggcaaaatagatttttgctgaaagattttgatttggagagatttggagtttgggttttgaatctaaatttgatactttgtacacaagggttcaaggagtcaaggaaggaaacaaaacatgagtttggatattttgggatttggaaatttatttggcgaggattcaaaggaagagattgactttcggaattagattttagagacttgaattggaagaggaaatttgaggcggaggattttgatttcgatgagagggaacaatgggatttgaaaccgagatccatggcacgacttagactcgcactcaaaggacaaaatttttcacatttaggatttgccgaattagtttttaacgtctcacgagaagcggagcgttacatcaactcgtctcagtatcttaatataggatatctttacatataactaatggctaacattatctttcagttgataatgtgaagtaatttattcatgggctcaagtcaaacatgatgctagctgattttggtgcatacgagtggaacaacaaacatagcatgtatagtaaaaagaagggtgaatagctaatacgatccctgaagtttcgcttcgggcttaatttagccctcgatatttcatatcgtccaagcaagtcctccaaattaattatttgggttaatatagtccttagacccaaaaaaataccacatgagtatgtcaagtcatccttgcatgcagcggtttgaatgaaatgaccattctaccctcatatatcatgtagaaaagaaagagatttgtcaacatagatggtgatatcaataggattggaagagatttgtcagcctatgcttcctttgcaatgaagtctaaggcttggtttagttcccaattttttttcaaactttcaatttttttcatcacatcaaaactttcctacacacaaactttcaactttttcatcacatcgttctaatttcaatcaaactttcaattttgacgtgaactaaacacaccctaagacaagtgtcatcgcctactaaatttatatggttgtttgagttagcaacttagcatcggccaatatactaatacctcggtcccacaaatacttgtactggtagaaatgaagttttttgaatggagggtaattaattaccgaaggagaaaaaaagagaatggcttggctcgactatgatcacacttttcaaaccagaaaagtatatgaattcccgcaaaaaaaagaaaagtatatgaattcttgtccaagtatatgaatttgactatccaaaccagaaatttcatccaaatatagcttgccaatcaagtcaaacaaagaaaaatcgccctcttcaggcaaactgctgagttcaagtgcagactaatctcatacgatttgggggggccttagctccataaatacacttcgtctccttcggtccttcctcctcaacaccaaccagacagaacagaggacaccgctcacaagcaaatacagagtcgagagtgagacttgaggcagaggccatggccggaggaggagacgagctgaagctgctgggcatgtgggcgagcccgtacgttctgcgagtgaagttcgcgctcagtctcaagggcctcagctacgagtacgtcgaggaggatctcatgaacaagagcgacctcctcctcagctccaacccggtgaacaagaaggtgcccgtgctcatccacaacggcaagcccgtctgcgagtcgcaggtcatcctccagtacctcgacgaggcgttccccggcgccggcgccaccctcctccccgccgacccccacgaacgcgccgtcgctcgcttctgggccgccttcaacgacgacacggtacgtcggtaccatgtcacctcacatcgcgatcatccgcatcgtctccgactcttccgtttttgattcaatttgatttgttcgcagctggtggaggcgtcgcaggcggcgtcgtgggggaagacggaggaggagagggcggagggggagaagaaggtggtggaggcgctggagaagatggaggtcgggctgagggagtgctccaaggggaagcccttcttcggcggcgacaccgtcgggtacctcgacgtcgtgctcggcggcttcctcgcgtgggtgcgcgccaccgacgtgatgcgcggcgtcaagaggttcgacccggccaccaccccgctgctggcggcgtgggccgagcgcttcgtggagctggacgccgccaaggccgtcatgccggacatggacaagatgatcgagttcggcaaggtgctgcaggctcgcgccgccgccgccaccaactgaagtgacagttgacttgtcgtgtcatgccgaagacgaacggatgttgggattgtttccatctgtttcacagtcgagtgtcgtgtacgttacgagttcagatgtgttactacagtagtagtaacttgggttgaaaaaatatctagggaacagtttgtccaaggtaaaatgttataaaccgaaatgaatagtgttaattagagaaaagaaactagtacaagtggcgtctgggtgagaaaggtctttacaacttaataacatggcccaatgaaaataattacagatttggctgtgaaaaaaaaagagagaagactatactgtgcgggacaatgaaaaggtacaccaataatatattagcggtcataatctaataacaatgcctattcgtaaataaattttaccggcattaaaaagaaggtaccgagagataataaatttgatacgtgggatactgagaggcatcaaattttaccagaaaggctatttctctttggtacctttttaagagagtatcgaacattttaagataagtttatgcatatgtatgcatttaaaataaaattgtaacaattattggggaatgctatacagcacgagattgtgctatttcactagatataggcgtaaaaaaaatacatcccctagaggcaaaaaagagctgtacaaaattacataagcgttgtggttaagttgggaggaattctccaagtcaccttgtgcctgccattattcaggttcttgactcttcctttatttttgccataaggttgggggctaccgtttccttgtgctcgaagatcctttagttcctttctttctagatttcttaggctatgagtaggattaaggatcgcagccctttcttgggcactttctttttgttggctagcatttcccaccattcatgtacgctttggcatggctcccaattgctcaggtccaattactgataagccacccagccgaccatcagtctccagatccttctggtgtatctaaaggaagctaataggtggcatgtcgtctcgttcgtcgtacggcatagggggcacactccgctatttggccatcctcttgtagctagtcgatcggaagtccagactctattttgaattacaagccacgcatagaatttgcattttgcaggagcccaagatttccaaattaggggattaaagtttgtgccgactattcctagacactgagccttgtatgccgaagaggccgagcattctccatgattcgagagcttccagacgatgtggtctgactcattttggtttagtatgatgtcctgggttgcgctccatagggacacaagttggctgatcaggtccactgtaaaagtagtgttcctatttagctccaggtcatcgatccaggtgtcattttcaatgccttcatgtagtgatttacttcttttcaatatgccttcgtttaattttttagaccaggttagcggatcacatgtttcaatacatctgaatatgggagcgcgcattcaacgagccacgcaatcagtatactagctaccccgtccacagaacacgaaccaaaaccatttatttaaccatctcaaatctcaaaacctcactcacacgattcacagttcaccaccaagctacagctagaagaagctaatggccggagcaggagatgagctgaagctgctgggcatgtggacgagcccgttcgctctgcgagtgaagcttgcgctcagcttcaagggcctgagctacgagtacgccgaggaggacctcagcaacaagagcgagctgctgctcagctccaacccggtgcacaagaaggtgcccgtgctcatccacaacggcaagcccatctgcgagtcgcaggtcatcgtgcagtacatcgacgaggcgttccccggcgccggcgtgcccctcctcccctccgacccctacgagcgcgccgtcgctcgcttctgggccgcctacatcgacgacaaggtgattcacaaattgcctcaaatcaatcgcaacgccctgtcttgaatttgcatcgaatcaataccaaatgacgatgtttctggtgattgattaactgtcaactgctgcgcttggtgcgtcgtcgcagctgttgaagtcgtggctgcaggcgtcgatgggcaagacggaggaggagaaggcggaggcgttgaaggagacgttcacagcggtggcgaacctggaggcggccttcgaggagtgctccaaggggaagcccttcttcggcggcgacgccgtcgggtacctggacgtcacgctcggcgccctggtcagctgggtgcacgccggcgaggccctgtacgggatgaggctcttcgatgccaccaggagcccgctcctggacgcgtgggtggaccgcttcgccgcactggatgcggccatggcggtcttgccggacgccggcacattagccgagtacgccaagaagaggcaggcggagcgggcagccgccgcggctgcgaacaactgaactggcatgcaggggccgtggttcgcgacgtggttgggcctcgacgatgaatttggtgtcatggtgtgccacttgtagtcccgtcacatgtggcgatgtgggctttgtttgccacgtgaatttgttgtctgtctgcgttcttacggttggatattgttcgtgtggttttggttagcccgtttcttccaataaatggaattattaatttttagaggaacaagagtgaacattttttttttcaaagatgacgaaaattattacatcctgggcttttacataaggaaaagtgtagttggactaaatcctagttacccttaagtaataaaaacaactgaaagccaaaaaaatcacacaaattttaaggatttagcaaatatatgttagctacctgagccaattattaaaacattttggtttattattaaaattggtagtgaatatgtctcttgcatattgcgaaaacaatatttctctcgctaaaatttattgaaatggctagaaatcaagtaattttaaagtggccagacgagacagtcgtgcccgctacaggacatgggtgcctctgtgatggcacgacagagcctgagctggagccacggatatgatgtggcgagctaatgggcactcgccatgtgcccccactgtaaatggccttattgcaccatttcttatgtttcctcttttatttctccaagaaaggatggaagacatgactttctcggttacttactaaaatgcttttagaaaagaaagaaaaataagtaagttgtagtttgtaattaaacaattagcccgatcaaaagtgtccacacaatatttctgagtatatgtctttttttttccttttagttagtattctctttcttttttttcaaacttattgtttgaattcatttttaattcatcaagtgggccacatggataggggagcaatgggagacgcgttcggcacaacaattgtgtgcaggtcccagttggtgaggatcttctagcataattttttatttttgagaatttgtttttttttcaaatttgaccaaattttgttacaaaattccaataattttggactgaaatttttcaaaattttggaaatttcgccgtaccccacctctggatacaaatgccaaaaacgaaatattgaaccctgatcccggcatggtacaaaccacctattagagttaggtaccccatgcagatgcattttaaacagcccaaattcggctaaaccataccacacggatgggagaatttggggaaaagtgaatcaaccgattgttcctttacagtttacagtcatctctattgtagtattgcatcacagtataaatgatccaaacctattgacaatttcatcttttgattatgtggccaactatatattaataactttggggaatccacataaatgacacttcctctaaattttaatatatgatgtcgtttactttttgacatatgtttgacggttagtcttattgaaaacttatgcacaaatatgtgaaaatgtaagtaatgagtaaagtacacttaatggtaaagcaagttataataaaataaataataattatgtaaggtttttaataagataaatggtgaaacatctgtaaaagaaaatcaacaacattatcatttgtttagaacctgaggtagtaaaatggaacctagtcaacttaattcccaaaacagcagaatctattcgtttctgaataatctcagtctgcattcatcgatgacatcatggatgatgcattggcacgccgcaggcatcatggatgatgcatcgatcacccgccaccctccacttcaatctggagcaccatatatacatcaccaccctgctctgatcaagcatccaagtatacgcagcaaaacacaatccaaagcgtgttcatccaatcattctctgttccgctctctcaccccagcgagatggccggatcaggagacgagctgatgctgctcggcaaatggccaagcccattcgtcaccagggttgagctcgcgctcggcctcaagggcctcagctacgagtacgtcaagcaggacctcgtcaacaagagcgagctcctcctcgcctccaacccggtgcacaagaagatccccgtgctcatccacaacggcaagccggtctgcgagtcgtcaatcatcgtgcagtacatcgacgaggccttccccgacgccggcgccggcgccgccctgctccccgccgacccctacgagcgcgccgtcgctcgcttctgggtcgcctacgtcgacgacaaggtaggatagctaagctacctttccttcatttgtgtcacagttcgagctgttatctcaaaacacaaatattagggaatgatctaatatcaaataattcgaaggatgatgctctaaacccaaatcggctagcccactaccttgtgaaactagccagaaaactcccgggcatttctctcgaggtttttatctcactgatgcgatgatgtgttgggtggcgcgtgcgtgcagttcgttccggcatgggtggcgacgttcagaggcaagacggaggaggagaaggcggaggggatgaagcaactgctcgcggcggtggagacgctggagggagccctgaaggattgctccaaggggaagcccttcttcggcggcgacacagtcgggatcgtggacgtcgcgcttggtggcctcatctcgtgggtgaaagcgaccgaggtgctcgctggctccaagatcttcgacgaggagaaggcccctcttttggccgcgtgggcgcagcgcttcggcgagctcgacgtcgccgagaaggtgttgccggatgtcgacggggtggtcgagttcgctaagatgaggctggcagaggcagctgcggctgccgcggcggcttcaaaaaactaagatggatatgtttggttatgtcgtggtaactcccattgtttgggagaaaataatgtgcttgttggaaaaattatttgggagaaactaatgtgcttgttggaaaagaatagatttagttgatttagtgttttttctgtatcagtatcttgatttatgtctgaataatgcaaggaatattcaatgaagtcatgaagatgcttgtcctctgtttattcagtagttaggggatctttttcttctgttggtgtctattagtttgtgtttgcttagctttgtttatactatcgtgaactttctatataagtttttttctgtgtgagttctaaaataattgactataactctttaagtaaaggccggaatgttttattctattattaaaaaaaaaatgaagatgcttgtcctctgttttctctgttactcgctgttggccctgttgcccttcagagattttgcaacttgcacggttgttttgttctcctgtatttatccatttccttcattgaaaattcggcagtgtgtagtaggaattttttttccatcactttgtctttttttaccattcaaaagtttattggttgggtacctacgacagagacagggacgtaacccattttttttctttataaaagagcctatagggtgaagttttatctcaaatattgtggattccgcccccattccttttagcttgtttatcatatcattgttgcgatttatttactccatatttctaaaagtatgatttctcaaaaaaaaattcttatatggtgttagcagatcacttgttgttacgagctatttattaattttattttttattaaagtacttaattatcctgatagatatctgtgatactaattcggtgaataatttgttccaagcattgcaactactcataccatttaattattcagatgaatcgtatgttctatggtgcttgtacctttaattttgggaacttttacagtatatagtggtaaaatatatcaccaatataaataatccaagagtttagattgatttgttctctcacttaaatagtttgtagtataaaattaaaagggtaaaaatattttcactattgggtgtaaattcgtagaatatagtgtgaaacaatactacgtgttttcactaatcgatctcattccttattcctcatcatccttcaccacgatgagacgccagcagccaccatgagtccacgcgcgccaacaccttcatagccaagtaagccaaccaccacatttttaatcttgtggcaaaattttaaaatatttatattatattgacggtatatattttcttgtaattttacactagggatgtatgttgacatctttagtgatactcagggccggatccaggaaaaaaaattagaagagttcagttacatagtttattcaatctccaaccatttagaaacctttaatttatcaattatggtgaaaaaatcgaagggggtgttacggagatatccatgggtcttatgagtataggggagactccacgttggatccacccctggtgacactctcttattcccaaaagccaaaatacatgcatgcggataattgtgaaataatttgcgaaaaatattactaaggttttgtaatcatttcttgtgccccaatgcacaaacacccacaagtgcccgcgatgtccatgtcatccactgccactggttttgttcttgggctctcaaaactcacaggtcaaagtaaacgtactttaactggtaaagcaaagcgatactatgacggggagcagcgccatgatctgtaggtttgtttaatttaatgccccagatcctaagcttcctcttctccaagaaagagtagaagacgcatcttgacagtctcagagatgctgactggagtattttcaggaaaaaaaaaagtgtactccagtttgaaaacaatcagcctggtcaaacgtgtcggtgtcaccatatccgtttattattgatttatctgcacatgttttgactaaagttactgatcgcatgtttttgaatacatctgaacactgaaaagagctttcgacgtgttaaagagtagttgtggaaacccctatttcaattgtgcaatcaagcatcactcgtgacgcactactagtcttctatagcatatacaaatattcacggttcgtgttgtgctccgatcaagtgctagctagctagcaaaagacaactcaagccaaaaccatctcagagcttcagagaggaagacaatggccggtggaggagatgagctgaagctgctggggatgtgggcgagcccgttcgcgctgcgagcgaagctcgcgctcagcttcaagggcctgagctacgagtacgtcgaggaggatctcaagaacaagagcgagctgcttctcacctccaacccggtgcacaagaaggtacccgtgctcatccacaacggcaagcccgtctgcgagtcgcaggtcatcgtgcagtacatcgacgaggcgttccccgacgccggcgttcctctcctcccatccgacccctacgaccgtgccgtcgctcgcttctgggccgcctacatcgacgacaaggtaatcgacgaattgcctcaacccaatcgtcttgaatttgcatcgaatcgaaaatgacgagatgaactgatgcgttgtgtgtgcatcgttgttgcagctgttgaagtcatggctgcaggcgtcgatgtgcaagacggagcaggagaaggcggcggcgatgaaggagacgttcgcggcggtggcgaacctggaggcggcgttcaaggagtgctccaaggggaagcccttcttcggcggcgacgccgtcgggtacgtggacgtcacgctcggcgccgtgatcgggtttgtgcgcgtcggtgaagccgtgcacgggatgaggctgttcgatgcgagccggagcccgctccttgacgcgtggctggaccgcttcgccgcgctggacgctgccaaggcggtgttgccggacaccggtaggctggccgagtacgccaagatgaagcaggcagagtgggcagcagctgccaccaactgagccagcatggccacgtctggtactctcgtggggagatgaagttggtgttggtgtgccacccgtaccgtacgtagctagtcctgtcacacgatgtgacgactgtgtgaactttgctactatacgcaataaaattgtgaagtcgttaagttttcgtaagtacacaccggcaacgtgtaatggaattatctctactggtcgtcctccttaattagtccttcactcctaccactacttagaaaatgcatttttcaaatgtggggttttttttttcacaggcgaacataaccattgaaaccaaatgaccgcatacaaaaatataaaccgggctgaagcttattgtcttgcaggcggaccattccgcctgcaaataccctttattttcacaggcggatagtccgtctacgaaaattagtgtacaatataaatagaggcgacatcggagcggttttttttccaagtcccatttctcctctcctctcccgttccccgttccccctcccctccacctgtcctctactctccccttccctaacctctcctttccccggccgtcggccggaggcggctacaaggcagtggtggcgcaccccagcgagggcagtggaaggagcggacgcgggacggccagcggcggctctcctccctccctccctcccagatctggccggagggaggagggggaggccggtggccagcggcgcggggcggacccgtgtcggggcgtagcgtgtgctcgctggccggcgacggttcgcctccctccctcccagatctggccggaggggggaggggggaggccggtggccggcggcgtggggcggacagcggcggggcgcagtatgtgctcgccggccgacagctcccctccctcccttcctcccagatctggccggagggaggaggggggaggccggtgaccggcggctcgggttggacggcggcggggtgtgtggctgcgacggcgaggagggcggaggctgcagcgtcttccctccctcctcctagatctggcggcgcagagggcggcagcggcatctcccctccctcctcccagatccggtggcacggagggcggtcgcggcggcagctaccggctgtgatggtggaggcggtggcgtttgttttgattttgaaagttaatttgtgatgcgtttgatttgattgtgaactactatgattcttctatgttaacttgtgatgcttttgtgaatttgatttggtttgatggggaatggaaactggattggatgggggaatgggaggaaaacggagaacaggaagctgctgctaccggtcgaaacggcggtgggcggtggctgcccttttttttaatgctgggagctattttcgcaggcgttcatttgtaagcggaccagttgtccatctacaaaaacttgtttagtccgcctgaaaaaatgttttttttccagttgttgacgaaaaaatcgaacacaccggcctgggagatctgcttagctcctgtgcaggtccaaatcttgatgagatgcgggcgtgccagtcagtttgatcctgcaactgacaagatatgcaaatagtagaccaaaacagccgatcggctgacaagccgatgtagtagttccagccgatagtgataatagctgatgccgatgccagcagatagcgatagggtttaagcaatcggttatatgtccaatgtagataatgatataaaggcaatcggctgatgatgatgtaataaaataacaatataatccagtataaaccaatcggctagtaataatatgataaataagcatcgatccgaaggttaaagtacacatcggctggaggtctgatgtcatgaaatccacaatattagattaaacagtaaaacctttgttgcgataagctaaatccaatatgtatgcaatccttataagccgatgcaacatccagataactcatcggctgaaaccccgatgaaacccttattggcaatcaaaaagtaggctagagattatggttctaaacacgacttagtagatcaaacttaactgatgcagcactaagtatgaaaagaaacataatatctagacaatcaagccgttgactgagttttcagggtggtagatgtctaagctaatctaatctagcaacacgatttagccgataccggcagaaaccctaaagcgagaagcagccgatagaggtaaattgatatgctaagactagattaacagagacatatgataaataggtagacaaatatatcatccaaaccggaacaatccaagaggtcgaatgtattgatgcagccttgaacgacgctgatgtagatgatacaatttcctggaccggcggaacattggacttatcccttcgccagagatcgaagacgatgcagccccgcgtcgggtgccaagtcccgccggacgataaaataaagtagaaaaggtaaaaggtggcgatgcgccgaattgtattgatcgtgaagatagattacataggtcccgggtgcacatatttatacccgtgggttgatacaaatccttgtcggagaagaaagaaaaattcctaaagataaaaggaaaagataaagtccttataggacactaaacacactttcctaacggtaaaaggaaactaacaaactgttcttaattaatagataacttgccatgccgcatcctctttgaacttggtctcttcttgataagcttcctttagtagatcaatttccttaaccgaatatagcaagaatccgacaactgacgacttgacaactctcatcggctaatctaaggacttcgaagccaatgactactccgggcttaccaaatttcactgttaacacatgccccccagttttggagtatgagaattcatgcttcaaaatttcttgtcttgataactccaaaaccgatcttccttcgcttcttgcaatcggctttcatgagctaatactgatgtgcttcaccatgctgaaacttatacgcttgccccccgagccgagattgaatgatcttggcattgacttcttcttcagacatgtggatataaaattcgtggtcccaccaggcgtgccaatctgtgttgacgagaaaatcgaacacaccggcctgggagatctgcttagctcctgtgcagatccaaatcttgattagatgcgagcgtgccagtcagtttgatcctgcaattaacaagatatgcaaatagtagatcaaaacagccgatcggctgacaagccgatggagtagttccagccgatagccgataatagccgatgccgataccagccgatagcgatagggtttaagcaatcggccatatatccaatgtagataatgatataaaggcaatcgcctactgataataaaatataacaataatatagtccagtataaatcaatcggcaaataataatatgataaatcagcatcgatccgaaggttaaagcacacatcggctggaggtccgatgtcatgaaatccacaatattagattaaacggtgaaacatttgttgtcattggctaaatccaattcatatgtatatgcaatccttatgagccgatgcaacgtccagataactcaccggctgaaaccccgatgaaacccttattggcagtcaaaaagtaggctagagattatggttctaagcacgacttagtagataaaatttaactgatgcagcactaagtatgaaaaaaaacataatatctagacaatcaagccattgactgagttttcagggtggtagatgtctaagctaatataatctagcaacgcgatttagccgataccggcagaaaccctaaaacgagaagtagccgatagagctaaattgatatgctaagactatattaacagagacatatgataaataagtaggcaaatatatcatccaaaccagagcaatccaagaggtcgaatgtactgatgcagccttgaacgacgccgacgtaaacgatacaattgcccaggccggcggaacatcggacttaccccttagccggagatcgaacaccgatgcagccccgcgtcaggtgccaagtcccgccggacgataaaataaagtagaaaaggtaaaaggtggcgatgcgctgaattgtattgattgtagcgatagattacatagaccccgggtgtacatatttatacccatgggttgatacaagttcttgtcggacaaaaaagaaactttcctaaagataaaaggaaaaaataaagtccttataggacactaaacacacttttctaaagataaaaggaaactaacaaactattcctaattaatagataacttgccatgccacattctctttgaactcggtctcttctggataagcttcctttagtagatcaattttcttaaccgaatatagcaagaatccgacaactgacgacttgacaactctcatcggctaatctctggacttcgaagccaatgctgtctctaagccgatgactactccgggcttatcaaatttcactgttaaccgatacatctagatagctcgactattgttgttcagagtattgtcataaaataaatgatattgcataatgcaagcaatcgatcatatcaaacatgagtcaccaaccgacgacaccttttgtgtggatagttctagaattaagtagccccacaaataatgcaacaaaagaaagtagccccacaagcaacctagcaggatccacattaaaagtgcctctggacaatgtagctctcacacaaaacaactgtagcgattgaactacaatgggctattgaactgctagatcacaaaatagatgttattctctattcctttaactaatgtaggattgaaatttgaaaacttaagcctactagagatggtgataggggagaacaaataaagattcacaccaaataaaagacaaaaagggaacttttttctattgttttgtcactgttttgaaatataaaatcaaataaaactaaaacaaaaactaagcaaaactagaagaacacgaaagagaatgagattaccacattttcctttgtgtaaagatggtatttattacatcaaagtgtttatagtgtgtatccaattactcatccactatactagagaaaagcactttggtgttcgttgggaaatttaagtatgcataaatgtggatacaacacagccaactgctacaatattgcacctataatcactacgacataggcagcaacacaactactgtagtatggcagccgaacaagcccatagatgctgggatttcctatctagtaccactcaggcaggactaatgaccttggataattggtgtggttccacagcaaacacctttgaggcacacatgtggcaaaaaaagtctcaaattctcaatgcatgcatcggctcgattccaaccgatgcattgagttgctccccgtaaccccaaaaaaaaatcgaacaaaaaaaacttatgtacaagctgaatcacaaattaaaaaaataagacctgttgtacattctaagtcatgactaaataacaaatccaacaaaaaaactcatcgtcatcgaagggatgggcggcaacgattgggaaagggaaagggaacacaacgagatctggtggttatcgagctcgagacggcatcgtcacgtcgccctggtgagcgggcccagggggaggggttgtgctctacttgttgtacacggcgaggtacctgatcttgttgacggaccatgcagcagcacccccaccaactgtagcatctgcttcccctttcccttctccgcctcctctccgcccctcactgcctccctcccacctcatgcacggtgtgcgacgtgaatgctgcgccatggtgccctgtcacaccccaatctggcaccgccgtacaacggcacctgacaggagcgtgtcgtgggaaaaacggcgcgaactgcttcctacgaaaccacgatctcagtaccagtcctaggacatagcgctggtacccacggtgacaaatatgaatcattgcaatccttaaaataaatagaggacttatttaccttaacttaggttgcagctcagaacagcccgaaattgcaaccgacgacacgaacgaggaaacaccaacaacagcggcagcagcggaaccaacggactaacacccaacaccacaggcgacggctgggaaccaggacgaaaccctaatgttcactttacttcatcttcaacttccgggcggaggaactatatatatttatatagagcaagggtgagtactttcctactcagcaagtcacgggaatttaggtgtttaatgcaagcttggaagagaggcaaggttgtttttgcaaatcttttgttttgaaatcattttgaaatcactaagtgatttatttctttctaagtttgggccgaaaagagacttgcgtctcgattcgactttaagagagatgtttttcaacagctcaattggtaatgtaccgacctcccaggtcagatcattacttctcggctcccagagccattccacttgattaatcggctcccagagcctttttcattttctcggactcccagagtccagctgcccagcagcacaacaatccgcttccactcaggaagcctagtctatgatgcccgtagacatcccgaatcacacagattcatttcttgaccactcaggtcatccatctgccacataggctgattctggtaacgattcccacaccagaacaacttttcacaaggcacaggcaaacaaatctacgctacaggaaacacctcacatccgcccttgaccgcgggcacagctgttcgaacagttatttaacctctgcagagggggtacactttacccacacgacattactaacccggatcacccaacccgtgagatcagccacgtcgggagaccttaaggctttcatgacaaggcatttcgaaagtcgacacaggttcaccatatgccaacgagaggggtcccagaccaacaccagattaggtcccagaccatactgtgccaggaagcccgagggttctccccgacaccaccccgttgaatccacgtgtctcttggcatcatggctcccccgattagctaattactcagccaggggcgtcccattgcacccgtgtggtcgcacttattatatgctcggatgaatttcccacaggaatcggtccttatatgcgaatacaggatagtaccacataggcacaacccccgcatcgcgagttttcacagtctattttgttttcaaacacaccaacgccacatgttgggttttcaaggcttctcaaacccatttcccaaattatcgacaaacaacggtgtatgtggaatagttggtatacacactcagagaacacggataccgaagtaccacaaaggtggaacgacaaggaatcagggtagaacaacctacaggaattagtgcgactactgggtaggtccgtcggtttggcacgcaaaccgaggccaagcaagttaagtgtgtgattctactaatgcaagttgcaaacaaaataataatgattttccaattataggagcaattggtcaaagggtgacttgccttgctcaaggtcttcacgaagcttcacgaatcttcgagaaaacccgcgatcgacgaaaatccggtaaccgcaactatacgcaaacaattgaaaacctaaacaaaagaccaaaataaagatcctatttagactaattagtagttccattgaatagatctcaattttatggaaatactggaagttgaacggagtcaatcagagctacggattgagagatatgaattttggaagtttaattggaatttctgggcaaaagaagatatttgtggaacaaggggaaattgatttatgaaatttatagaaataatattctcaagaatattattgaccgtcactgacgtgcgggaccaaggaaatgatttatggaattttgggaataaggaattgatttatggaataggggaaaaagggtttattaaatcccttgaaaaagaagggagggatgccatatagacttcctagggcggctcaggcgcggcccgaggggtttatgcggcttggccggacctaatgggccggcgcgggcacgggaggggcggcccaagagagggggcgcggggagagagaggccgacgcaggtggacgcgatccaccgcgcgggacccacatggcggtggttgggttcacggtggggagggcgcacgcgggggcgggcgctagggtttcggatgcgcgcggttcgggcgcggcgcaccgggtggatggatggcggcgggcccacgtgcagccgcacggcttgccgtggaccgcgcgcacgggagggaagacggagggaggaggctgactgggcgcgacttgacccagtcaagcgggcccagggctgaggtggctgccacgtggtcggccacgcgggcaggggtgaaaggggaggaggaggaggaggaggcgcccgggatcagacggccgacaacgcgtgaggcgttccggcgagcggtggctaaccggagcgagcggctaccgccggcagctagaggaggtcagggggaatccatttaacggcacggatctgagaggggaggtacgacagtggctggcggcggtgaccaagcttgtcggatcggggatgtggtcgcgcaagggaagggacaagggggcgcaaactcgggcctagccgaaacggtacgcgaccgtgatgcgcacgcggtgacgcgggacccgatggtcaccggcgatgcacgcgcggcgttgttatgcggcggcggaaacggcgacacgacgcggagacaaaggagaaggccggcggccttggggcagccagggggaggtcaaggggatccccgggagcgtggcagcgagaggaatcggagcgaaaggagccgacggtggtggattgcggcggcggccatcgccggcggagagaaggggaaatctcaccggggcaacgggagttcgattcaaaggggtgggagcatctctaggacttagggatcccgtttgtggcgtcggatgggatggggaggcgccgtggaggtccggcgacgagaggcggtctccgagagcgggcggcatgtcacgcccggaatttctatccaaaattccaaacgcttacatgtgtgtgaaccctcgtccaggaatcagccgaggcacacaataacaaattgataatagagtacaattattactctaattaataagcgaataaaatgtcattacagaggtagatagttcctctcaatcaataaagatctaagcagcggaaaaagataaacggcgcagacggctccactccacaggcagcttgaccaaggctacacctaatcctccacaccatcagcatcactgtagaactcttcctctgatgaatgattgcaaggtgagtatatgacatactcagcaagtcacgcagcaaatatgcaagtgcacaaggataccaaaggatggcatagtagggtttcatttgcaaaagcagcatttagcaaacatttcagaatttaataaaacagttaagtattaaacaatattaatccaacgctatacaacataccctgttgtataggcccaaccattctgaacaaccatcccggctgcacagttctatctccaaaccaggagctaatcaaattattaccaattaaagcaccttttattatggtgagaagggtgagactaatcacgaaagatattgttagacccgcccataaccgcgggcacggctattcgaatagttttactctgatcagaggtgtaccactgtacccacaagacacaaccccacatcatgtcaccatgtgcctcaataccaccacggtacctcggaaaggagttgtgacaatacctctcgtacaacacaatccactgcagcgcacctttcctggatcataatcacccccttataaacaaggcatagactccccagcgacccccgtgggcttatctccgccacttctcagtctggtgccccgcaatgaaccatgctatacaaaagataaagccgttgcccatgctggcttgtggttggcacggttaatgtttcacaaccgaaactcgtgaaccagtccttaattgtcatgagcacgaccatcaaaaccatgtgctcacaacccaccattatcaggttttagttggcacattaattaattaaccaatcatgatagaacatcgtgaactatcattaagccatcattaagtaatagtgagtcataagttatcccaatagtgtgctaatatttctaagcatggctaagcaatcatatctaatatctagctgaaccaatatatataaagttcaactagtcaagttatattaccccaaggtatcaaggaataaagtaatcaagaacaaaagggctataacaaagaataggttaattccacccaatgacattcgaaaataaatgcaataattgaatagaaacaatagctttaaataggatcaacatgctcaaagggttgtttgggatctgtgtgacttgccttgctggccttggaactcttcaaattcttcttctgcaaaaacggactctccggtaacgacggaatctaagaagaaaagagcaaaatcaccaaaacagcacataaacaagcatgaacagtacatgtggatatttttaacatgtagatctcaattttagaaaaatttagagacttgaaccaactaaatccgactaagatgaattagttatgaatttttgaagatttaatcggattaaaacacttatattgattttaattgaattatgacgcaataatgaattatttttcaaaaggaaaagaggatttattgcgtcagcggctagggtttcggtggaccgggcgcatgggcgacggttcacgcgaacggacggccgagatcgacttgatccaaaacggacggccggaaacggaaaggatcgatcgaattttgaagggaacggcggcggcgcgaaactagggtttcgggcggcggcggccggaggttgacgacgactgacaagcgggacccacctgtcagcgacagcgagggcgcgcgcgggctgcggactgggccggactgggccgaggagagagagaaaggttttgggccgactttcggcccaaagccaaaagagactttttaaaacctttttcaatttaaattatttcttaaatgcaattccatttattaaaaatacttccttagctcaaataaatcccagaaaaatctaggaattatagaattaagcaaagtatttaatgaaattttatctggccccattttatattggaatttattaattaaaattagatcttctcttctaggcttttaaaataaattctaaaaattccatttaaacaacaatttatatattttgaattttcagggtgtgacacggcaatggcggcgaggctgtgccgggcggcgacggcgctagggaatggtttggggaggtcctagggagctcaaggacggtggtggcgcgagggattggcgagggggcccatggcggcgcacaggcgggcgcggcggcggcgaagcagagcaacggcggggcggcacgtttagggggacgagcgagcaaccgaacggctcggggcttatccaagatgatgcaaatggcaagaatttgggcgaggagctcaccggcgtgcggaaacggtatcggcggcgcggatggagtcgcggcgaggcggacgcgacggcggggcggcacagcgccgagagggcgtggccggggaagaagagatggagaggcgcgaggatgggggcggcgcggagctcctcatcgactcctcgtgctcgctagctccccgacacgcacgacggcagaggagggcgagaacgacgacgaacggcgaggcggcagtggtgtgatggaggagaggaagcgagaggtatgggaggggggtgtgggttttataggtggcgatgtcggtttgagagaaccaaccttggggcggtcaaggagatgaggcgggtggtgcgagcggtcaagcggcgcagaggtggtgacgctggcggtggtcggggaaagggaaaaagaaggggggaaagggggttggtcctttgccatattgaggagaggggaagcagctgcttctcccattcttggacgatgcggcgtggagtggcgggggccatggatgacgtcggcgatgacggcggcagttagtttgtcatggagcgggggcaaggcggcagcacgtggcgtcggcggcgcaagggctgatggcggcggcgttcggccggtcggccacctcgcgagcgagcgcgcgcgcgacgcgggggtgcggccggatttcgaacggcggcggcgggaaatcggcgccgaggagagggagatcgaacgagagagagagaaacagcgagagagaggaagagaacgagagagcgagagaactctctctcggctcggctcacgcgcatgcatcgcacgtgcgagaggagggaggaggacggcagagggaggaaatgggctggggaggggcgttcggcccatagaacttgggggaggcaaactagactttcacagagaaaactgatttggatagaattggagagatttagggtttggattcgaattcaaatttgatattcgaactcgagggtttagggatgtatcaagggaaactcaaggagaagtcatggaaaagattcaaaaggaatacttgggtatttgttctcgggaacatagggtggagtcaaggaaatgatttggatgaggatcgattctctcgaaatcgggagaaagatttggcaacgagttcaaggaagggagagattgacttcaagaattgggatttggatgagagggagtcgccaacgggattcaaaaaaggggatttgaatctaaatttgatacttgtacacaagggttcaaggagacgagtaaggaaacaaagtgggagtttgatactttcgggaatgggaacaattatttggagaggattcaagggaagggattgactttcggaatttgatttcggagactcgaatcggaagaggaattttcgaggtggaggattttgatttcaatgagagggaacaacaggattaaattgagatccttggcacaacttagactctcacacaaagaacgaaaattttcgcgaataggattttgccgaattagtttttaacgtcacgcaaaaagcggagcgttacatgcccgcgttccgcgtgggagccgctaggagtcgctcacctaggattcgcgagagcacgcacactgccacctccactggcgagtttaagtttgagagagagagagagagtcgtgggaggggaggagaaggtgaggagaggataaggacgaaaggactcggtcgatcgactcggctcaacagtttagggtgtcgttttatttaaaaaatcggcacctataaggttattatatgtgtcgatttttataaaagaaaaacggtacatgcgactgacaatatttgggtgtcagttttgtttttattaagaaccggcgttttgtagtagtgatatgtcatctcaccaactaaactctagatgaaaaagtagaaattctaaaacccattctatttctccacataagtatcttaggtacgtaattgctatctttttctagtagtatttatatagtcaaaaccaaccacatcagttaggacaaccaatcctattagaaatccctgacgcatttattctaactatttcctaatcttcttaattttgcactctctccaaattttgatttattagctaggtctctcaattctactggcgttccctcacacatttattccaattcattcatcaatcttctcaaatttagactacctctaaatttgacccctttcaatatacacatacaacatacatcatatcatacgtaaatctgaattttatatgcaccggtccttctcttaactatctgaacctcattcctttagggtttagtttcgatcttatcaccaaccatgctcctcagaccctcaagcaacattcaaagcaaatacatgaaactcgcactgtcttgtgcagtttgtttcaaaaagaaaaaaattcaaagaaaaaaaacatattcaaagcgaaaattcatagtcctttccacgccggtcaaaccaaagctgccatagcacctcgaaacaccaaactattgctattaacattttatctaattatctgttgcaatatagtcatcactgtgatttcacacttactaggtaggtggtctggtggaatgatgctgttatactgtcaccactcatcgatgcatgagtcaggcggtcaccatcacacacacttacattcgacgatcacaggatttgaggacatctcaacactcaacagtgtgatcgaacgcattcaacaggccgtccattaagcaatacagtacatatctcgtattctcattatgtggttgtttaaatccacgtagccatcacgcatgaagcttactggttaccctccatcagacaaacatatatattcgatctttctccggtcaagttctagcacaacaaaacacaagccaaaacaccatttaaccacctccaagcttcgcattccaagagaccgagcgactgttcagccagagattaatcagagaatggctggagaaggagatgatcaactgaagcttctcggattgtgggtgagcccatacactcaccgagtgaagcttgcactcagcttcaagggcctgagctacgagtacgtcgaggaggacctcagcaacaagagcgagctgcttctcagcaccaacccggtgcacaagaaggtgcccgtgctcatccacaacggcaagcccatctgcgagtcgcaggtcatcgtgcagtacctcgacgaggagttccccaactccggcgtctcgctcctcccatctgactcctacgatcgcgccattgctcgtttctgggctgcctacatcaacgacaaggtaatcgtcaaattgcctcggttaatcgatctgaatttgcatcgattgatgtgatgttgtgtgcgtgtgctcgcgtgtgtcgtcgttgcagctgatgccgtcgtggctgcagtcgtcgatgggcaagacggaggaggagagggcggaggcgctgaagcagacgttggaggcggtggcgaacctggagacggcgttcaaggagtgttccaaggggaagcccttcttcggcggcgacaccgtcgggtacctggacgtgtcgctcggcgccatgatcggatggatgcgcgccggcgaggctctgcacgggaggaggaccttcgatgccactagaagccctctcctgaacgcgtggatggagcgcttcgccgcgctggacgccgccaaggccgccatgccggacaacaacaagctggtcgagttcgtcagggtgaggcgggctgccgctgcgaacaactgaagccgaaacaatactgtattggtcagttcccagttggtacgagatttgctctgctccaacaaagagtatcttaaggtattgatacctcacggtaccaaatcgtttctaaccgttgaatctaacaatgtccatcgatgggaaacgatttagtactgtaaggtaccggtacctcaattactttttgctgaaccgaaacaaatctcatcgtcactgctttgggcctttggccaattgtcatttttcaagttgcaaaagtgtgatgttcttccgggtcatccgttcgatcggatctccttgttaccgggacatcatttcttccaataaaggaaaatgttgaattttggtatttaaattgtttagtagtatgtgatataaaaactgaattttctatttcaattgcgtgcctagacgtcagattgttcaaccagatgcatatgctccagatgaatacatgttatttaaatagttgcataagaaattgaacaaatatattacaatgatatagatcattatatacggacacataattagctaggttttctctggagtgattttacatttcttgaggaggtaacgggatatacaatattttctaatataaaatttattatctcttagtacctccagtaaggaatggaaatttgcacagtactacctctcaaggaccgtaaaatttctcttttctctaagtgcatatcaaatttagcgtatatgactcgtgtcatcataatttatcctataaaaatctttgatttttctatcaacatttaatctgcatggaaataattaatgtatatatgcattactacctctccttcgtaacttcaggaatggatggtatgtatgtctcaatctttattggcccctgtattttagttggtgatgagagtgtatgatggcaaactcatcgtcaccaacaccaactgcctcttttaaataaaaaaattgatgtagcagagacttttttttctcattatcatatattgtatatgatgtttggacaaatgattttaagcctgcaatggcgaactatatcatttctcacatgccgtttaaatagttataataaaattgaaacaaaataggcaacatacggattgtaaaatgcagatgttattctgaaaaagaaaacataaggggggcaataaagagtgatgctaagtgttcttttgaatggtagtgtgcagttgttattttttcaacatgtatatgtttttgtacaatggagttgcacatgtttcatggaaattaaatgtgcatatttggaaatgtatgttttaatgggaatgtgtttacaatattatttgaatttttttcatggaaatgaccagatgtatttcattgaaaatgcaaaaaaaaaaatcaatacaacattgttgccacaatcaaatgttccatgcaacattgtttttgtgggtgaaaaatgggcaatgtacatatgtttttcgtttgaatgaaaatgtgcacatatgtgtcttctttgtatgaaaatgcttaaaatggtagcatttcaaataattaatcagatcaaacattagtgtcaccacgcctttttttttcagttgtaagtatgcaccatcctcttgctaggtgtggtggaatgattaggtcatgtaggtagggtccagtagggggctctcatgtattccacatcagaaaaaaaaaacccacccctacaatggttagttgactttacattaatacatactagttaaattgtcacaccccaatctgataccgccgtacaacggcacctgacaggagcgtgtcgtagggaaaacggcgcaaaccgcttcctacgaaaccgcgatctcagtaccagtcccaggacatagtgctggtacccacggtgacaaatatgaatcatagcaatccttaaaataaatggaggacttatttaccttaacttaggttgcagctcagacagcccgagaatacaaccgacgacgcggacgaggaaacaccaacagcagcagcggaaccaacggtctaacacccaacaccacaggcgacgg

SEQ ID NO: 21404 - DNA, 8042 bp, Oryza sativa
ggatagaatgggagagattagggtttggattcgaattcaaatttgatattcaaactcgagggtttagggatgtatcaggggaaactcaaggagaagtcatggaaaagattcaaaagaaatacttgggtatttgttctcgggaacatagggtggagtcaaggaaaggattcgaggcgggatttgaaaaattctggattcgtagaagtatttggcgaggattcaaaggaaggatttgaatttcagaatttgatttcggagactcgaattgtaaggggaatttggatgagggggaggattttgatttcgatgagagggaacaacgggattaaattgggatccttggcacaacttagactctcacgcaaagaacgaaaattttcgcaattaggattttgccgagttagtttttaacgactcacgaaaagcggagcgttacagatccacccccccttacaagaatctcgaccccgagattcgaaggtggaccacacacacgaaaccaaaaagggatcttcagacttcttcacaacttcagactctgctagtctttctttatctcgagaatgcatacttgccacaaaacggtctggtactctgactcacttagcattcttcatcttattgtggctctgctcttgcctgtggaacctgttcttctcctgctctttcaacctgctcgagattcacaacttttccatttgtttctacttgcacatggttcagacgaccttgtccaacgggcggtgaggtcaacgaggcagaaccactgtttggtggctttgaactttttggtccagatacgttgggaaggcttgttgtttgttgaacttgttttgacttgactttctgagggcacttcatcttggctttctgagggcaatcccacgaatagtgtcccatctcatggcaggtgaaacattcgactcctgccttatgaccacgtctttttgaaggtgtagggcatggtacggagttgcttccttcatggctattactgttgatcattgtggcttgctgaccaggttctgacatagtcgaaagagacgtagaaccggaaccatttgaatgctgagatgctttctgatagtattgtgttggcgagtttgtttttcgacacaaaccttcttttgcttggatccctagggacattactttgcgtctcttgtattcttgcatctttttcttttcttggatgtcttggcacatgtcacaggatgcttttgctcttttgtcatcagggaaggttggacgtactgcattaacattttgcaaattcgggcttccttggggatagaagggcatccttgaggtgctcatattagcttgtagtagtgcatccatatagggtttttgggggcagtgtctcatgtaatggccaatttcgtggcaaatgaagcatatgagtccgggaacgtgtctgatcttctttgatttgagggtgggggacttgggtaagttttggcaagattgcattgtctgacattgtgggacatcttgcatgtcaacttttgatggcaaggtctttcttttgtgacaacttccttctttaaccatgctattttcttgcgatacggatttattgattgagttctgaaggttggggcaattattagctcgaagtggggttttcatccctataatcatcacatttaagaattctttgttcttctctttatgggtatcagtgccttctactgattgtgttccttgtatttctgcggcctcatccttactcttgtctggattcaccttgggctgtggtagtagcagttgttgttgtatagaagccaaattttgagctatttcttgtagtatctaagtctgattggctagaatctgataaatatccattgagaagtgttgatttctagttgcaacttccttgtttggtccaggaacagtattatcagtcttggcaacttggttggtgacttgttcagctagttgatttggattttctgacaaagctaggtcttccttagaaccaaggtagttgcggacacaagtctgacaggttggttgaggcgccatctgcttcagagggactgagaactgaccaacacagaaaatagataagaaaagaaggaaaacaaaaacactacatcaaaacggttttcgaaatcacagaagacataggtggtgtgttccagccggtaacccaactggtctaacacctgaacacggactaccaaacaaaactcacacacgcactagttcaccacaactcctaccgagcgggtgacggttctaaggttagcctaccaacaagggcttaactaagactcctagaggcttgagcacacctttcttcaactgggcgtgaagacaggtttactctaggataaaagtcaaaacgaacgactagcttctacttttggacacaaaagatttttcgcaaaactagagctaaaggggacaacgacaccttagctttcacaaatatttttgtactcaaataatgtcttcctattaaggggtttcgatcctagggccaacctatgatctgataccatctctgtcacaccccaatctgataccgccgtacaacggcacctgacaggagcgtgtcgtagggaaaacggcgcgaaccacttcctacgaaactgcgatctcagtaccaatcccaggacatagtgctggcacccacggtgacaaatatgaatcatagcaatccttaaaataaatggaggacttatttaccttaacataggttgcagcttagacagcccgagaatacaaccgacgacgcggacgaggaaacaccaacagcagcagcagcagcggaaccaacggtctaacacccaacaccacaggcgacggctgggaaccaggacgaaacccaaatcttcacttcactttatcttcccttcagggtggaggaactatatatatatatttatatagagcaagggtgagtactttcgtactcagcaagtcacgggaacttaggtgtttaatgcaagcttggaagagaggcaaggttgttttgcaaatcttttgtttgaaatcattttgaaatcactaagtgatttatttctttctaagtttgggccgaaaagagacttgcgtctcgatttgactttaagagatgtttttcaacagctcatttggtaatgtaccgacctcccgggtcagatcattacttctcggctcccagagccattccacttgattaatcggctcccagagcctttttcaatttctcggactcccagagtccagctgcccagcagcacaacaatccgcttccactcgggaagcctagtctatgatgcccgcagacatcccgaatcacacagattcgtttctgaccactcaggtcgtccatctgccacataggctgattctggttacgattcccacaccacaacaacttttcacaaagcacaggcaaacaaatctacgcaacgggaaccacctcacatccgcccatgaccgtgggcacggctgttcgaacagttagttaacctctgcagaggggtacactttacccacaagatacgaacttattccgaacacccgtcggtatcggaggttcgcaacaaagcctttcccaagccgacccagggatatctcatgccacatagaaggatcaaaacctcacataaacataggccattttaggcattcacaaatcaaactccaaccaccttgatcggtaagtgagcaagcttctcgtccttgccttaccaggaacccagtttgtccgaccccgccccggcgttcccaactattggcatgcgaggtttccctgaaccgactagttacttagccagggtgtcccattccaccttgtggttgcactttgattatgttcgatgagtttcccacaggaatcggtccttatatgcgaatacgggacagtgccacataggcacaacccccgtatcgcgagttttcacaattcattttattttcaaacacatcgacaccacatgtctagttttgaagacttcacaaacccatttcccaagttttcgacaaacaacggtgtatgtgggatatttggtatacgcgctcagagagcacgaataccgaggtaccacaagggtggagcgacaaggaatcagggtagtacgacctacggaaattagtgcgactactgggtaggtccgtcggtttggcacgcaaaccgaggccaagcaagttaagtgtgtgattctaataatgcaagttgtaaacaaaataataatgacttttcaattataggggcaattgatcaaagggtaacttgccttgctcaaggtcttcacgaagcttcacgaatcttcgagaaaacccgcgatcgacgaaaatccgataaccacaactatacgcaaacaatcgaaaacctaaacaaaagaccaaaagaaagatcctatttagactaattagtagtgccattaaatagatctcaatttacggaattattggaagtggaacggagtcaatcggagttgcgaattgggtgatatgaattttgaaagtttaattggagtttctggaataggagagatgatttatggaatttatagaaataatattctcaagaatattattgacagtcattgaatccgggaccaaggaaaatgattcatggaattttggaataaggaattgatttatggaacaagggtggaaaaggaaatcaaggagggatgtatactagacttgtttcggtggcattggtgcggcccaaaggctaacgcggctcggccgaaccaaatgggccggcgcgggcgcgaggaggcggcccatgagggcgcgcggggagagagggaggcccgtcggggtgggcgcggtccaccgcgcgggacccacatggcggtggttgggttcacggtggggagggtgcacgcggaggcgggcgctagggtttcggatgcgcgcggttcgggcgcggcgcgccgggtggacggatggcggcgggcccacgtgcagccgcacggcttgccgtggaccgcgcgcacgggagggaagacggagggaggaggcttactgggcgcgacttgacccagtcaagcgggcccagggctgaggtggctgccacgtggtcggccacgcgggcaggggcgaaaggggaggaggaggaggaggaggaggcgcccgggatcggacggccgacgacgcgcgaggcgttccggcgagcggcggcgaaccggagcgagcggccaccgccggcagctagaggaggtcagggggaatctgtttaacggcacggatttgagaggggaggtacgacggtggctagcggcggcgaccaagctcgccggcacgccgacgtggccgcgcgcgagaagagctaagggtgcgcgggctcgggcttagccgaaccggtatggtgttgcgacgcgcacgcggtgacgcgggacctgatggtcaccggcggcgcacgcacggcggcgttaggcggcggcggaagcggcgacacggcgcggagacaaaggagaaggccgacggccttggggcagccagggggaggtcatggggatccccgggagcgtggcggcgagaggaatcgacgcgagaggagccgacgacggtggattgcggcggcggcaatcaccggagatcaaaaggggaaaacacgacgagacgacgagggttcgattcaaaggggtgggagcatctccggggttcaaggaatccgtttccggcgtcggattggacggagcggcactgagattggctggcgacgagaggcggcctccgggacagagcaagagcgcgtggcgagctatggcgagcggcggcgggcgcggcgcatcgcgcggcaggaggaggattatggtggggagctcaccaatcgaagaggaggcagcgttggcggcgcggtcggtgtcacggcgaggtgttcgcgacgccgaggcggcacggcaccgagagggcgcagccggggaagaagggagggagaggtggtgcccggagctcctcgtcacgcgtctacgcacgcaccggctcctccggtgcttcggcaacggcgagagcgggacgagcagcaacaaggcggcgacggtggttcggcggcaatggcgcggtgggtgtgaggactgaggcgagtgaaaacgagagaggaaggggtttggggtggtttggttttatagcggaggcgaggtcggtttggggaggggagaactgaccttggcggtcaagtgctcggctggcggtagcggcggtttcgtgggcggtgcgaaagcggcgacggcgtggatgcgttgagtggcgaaggcggtggatcgagcggcggaaatcgaaccgctggagcgcgggctggcgcggtcggtcaagcggcgcagaggtggtgacgccggcagtggtcgggaaagggaaaaagaaggggaaaaaggggcttggtcccttgccataatgaggggagggagagtgaggaggaggaggagagggagagtagctgcttctcccactcttggacgggtgcggcgtggagcggcgggggggccatggatgacgtcgacgatgacggcggcggtcagtttggcatggagcgggggcaaggcggcagcgcatggcgttggcggcgaccggccggtcggccacctcgcgaggcgcgcgcgggaatgggcgaaggcggtgggggttttgggcggcgacggcgggaaatcggcgccgaggagagggagatcgagcgagagagagagagagaaacatagagagagagagaggaggaagacgagagagcgagagaaacagagagagcgagcgacggctctctctcggctcgcatgcgtgcaacgcacgagcgaggggggggagatgatgggctgggaggggagatgggccgggggaggagaatcggtccatccaaaaaaaactcagggaggtaaagtagacttttacagagaaaactgatttggatagaattggagatttagggtttggattcgaattcaaatttgatattcaaactcgagggtttagggatgtatcaggggaaactcaaggagaagtcatggaaaagattcaaaaggaatacttgggtatttgttctcgggaacatagggtggagtcaaggaaaggattcgaggcgggatttgaaaaattctggattcgtagaagtatttggcgaggattcaaaggaaggatttgaatttcagaatttgatttcagagactcgaattgtaaggggaatttggatgagggggaggattttgatttcgatgagagggaacaacgggattaaattgggatccttggcacaacttagactctcacacaaagaacgaaaattttcgcaattaggattttgccgagttagtttttaacgactcacgaaaagcggagcgttacataaatcgtgaatttgcatatttgatctgaagttgcgtttcttcggattgtatagcgcccgtctctcctctcgtctccttgttcttttcgctagatgagccgatgtcgcgccgttgtcacctgaagcatcgatgtttccctgctctcatttatctttcttccatgtaagcaaatttgtctaggtgacaccagagagagacggtaaataatagtaaataatagcctttgtacattcccttatgtagttgtgcagtctatttttggtgtgcgagttcggagttcgaagtgttctgaagaatctcttcttgtaatttctagaaatggcattgaggaaattaccagtcttggcttaaaaacaagtctgtctcgtcattcaccgtgcttatttaggacttgttcaactcctgtagaaattctcgaaaattcctcgactttaaatggagccttaccattttttagcagatgcaacaactattatactcctacctgatgactgatgaggactgtgcagcgatcgatatgtgcatgtggccatgtccgaagctaattaaaggacggaaggaccacaagttggtgtataataatggagagggcattgaatcattgtttcaatatccccatcagataatattcaataactcctatggtgacgtcaagcatcaatacatgaaggttacttgttaccaccatcagacaagcatataattgattgctctgatcaagcgatagcaaaacaaaatacaaaccagaacagtctc

SEQ ID NO: 21405 - DNA, 12732 bp, Oryza sativa
ccctcccccccccccccccgcgcgcatggtccgcggtgagccatgaggctgcgcgtgggcctgccgcatctgcgtccttcacgaaccacgcgcatgcgccacgcctcccctccccaaaccctagcacgccccgcgtgcacctcgctcacggtgaaccgagtcgctgacaagcgggtcccacccgggaccacgcgggatggacccggcccatcggttctctctctctctcctccccgcccgcgcgcgcgctttggaccgccttcttgggccggccgtcccattaagctcagccgagccgcgcctttttctctcgggacgcgccctagccgcccgagggaagtctatttctcctccctctttctttttctttttcaaaagggtttaattaaatccttttcctttagatcaaaaatccaataatcttagaaattcaatatcttctcaaccgtatgaccgtttgactccgttcaacttccaaaattcctcaaatctcgagatatatctaatggcacgcttagaggtcaataatagggctttattttcgccgtttgttgagttgtcccgtttcgcgtgtagtttcggagcccgaagacccgcagtgcgagaatttcgaggatcaagcccaagatctcgagcaaggcaagtcacctttgatcatcttgcacctataatttaaatctaagtatttcttttctgtaaatattgcatgaataggattaacacgagtatttcagccgtggcttgcgagatagccaccggccccaatcctaattgctgcaattaccctccttcaattattgaacacttaaacctcctttgtcaattgttgtgcttcgatgcacgggcctccaggtacgcgcatcggaacaccttccctcaaatttaaaatatccaatgatgggtaaaacttggggctttacaaaagacttgaaaaacccgacacttgggtcggtgcttgcgaactaaatgaatttccaaaaccgcagaccggggaacgtaccgagagtacggtttcccgctcttgcacttaaggaccgttttccttggaatttcatctgaacataagacaagtgtgaccacatgggtgaaatgggacacccctgtctgagtaattagctaatcggggaaaccatgatgccaagagacatgtggagtcaacagggtggtgtcggggagaacccccgggcttcctggcacagtatggtctgggacctaacctgttgttggtctgggacccctcttgttggcatatggtaaacctgtgttggctttcgaaatgccttgtcatgaaagcctcaaggtctccagacgtggccgttctgcacgggctgggttatccgggttagtaatgtcgtgtgggtaaagtgtaccccctctgcagaggttattaaactgttcgaacagccgtacccacggtcatgggcggatgtgaggtgattcctagcgtagttttgtttgactactgctttgtgaaattgctgttgtggaatgggatcgatgtttggaaaatctgcggctgatgggatcagccaggcccgggtggccgtttgaaagctgttggccgggtgccaaccttgaatcaattcaaagactgatatattgcacatactccgaccagacgagacgcactgtctcatccgtgtcgtttgagaagcactcacttagctaattcgaaaaggagtttaaataaaatcaattgcaaaaacaacagcctttcccttgaagcctgcattaaacacctaattcccatggcttgctgagtactcctgtactcacccttgctctatataaataatcccccccagttgctgaagaagatgaagtggatcctgctgatgaggagttcttccaggagcaagtcggctacgatgagttttagggtttcggcctagttcccaagtcacgcctatgatgattggtccaagtcttggcttccgctttccccttttgtaatgcagttgtgagctcgggatctgtccgcagcccaacatgactgtactcctactctgtaataaagagacctctgttgctatgatattctgtcttcctgtgataccagcattgtttcctgggactggtatcgatgaacaggttaatttggagcgtcacgggctagttccgttcggggctagttcgggacgtgacaaaagatggtatcagagcacaggcttggccctagggcgaaacccgacgtttaggacgaccctaaggatactaagttctacttgcgaaaagctaaggcttccttttttgctttctttattttcaatagtttattgctaaaatggttacttatctttcctctccctttcaaaattgtagatggcagtgaacgccagcttcagttcccacggttttggtgagggtcaccacgtcgctcagcttcgtgacctcgcccgcttccttggcttctcgtgtcctgagtacacggggtactctgtggaccgtgttccctctcgttatgagctttcggtgtacctttaccctcgtggaggtatacacggggctggccttcgcccacaccacttcactgtggccaggcccactctccagatcgcgtaccaggacctctcctagactgcacttcgtcgcttggcccacgactacagccaccgcctcgggggctctgcctttcggcagctcctgcgccttccttctggccgcactgacactaggtacccttgcccgtacagcgagtctcagcctgtgctgactcgcatggttgagctctctgaggctcaggccacccagcacgaccttctccttgaggcttaccgctcccttgctcgccgctacgctgctttggaggcccgcctggccgaggagggtgtcacctcagttgacactgcctcttgggacttaggtcgcctctgccacgccagccacctgtcttcccacagctcccgcggctctgttcgcactcccagtggcccgcgcacccccagttcgcgtgtgccgtactccccagtgcactctccctaccctcacccagttagcccttcctacactcctggtcacaccccagttgcttcctcctgccgtggcccacgctttatccgcactgtgcggaagcgtgttgttggttcttccactgtgttccgctttgaccacccagctcgcccaccgccagcagcccgtgctgctgccggccctcgacaagttccgccgatctcttcgcgtcagccgatcgacgtctcttcgactgaggagccgactacaggaggtagccaggcaggagaggagtagaggaggcagtcttcaggagccgtccgtatgataggcccttttgttccgctgccaactcttttggagtcgtggcgaggtagtgcgtgcgtgtgtttgatgcgggtgttgtttggtagtcaggttctcctaggtggtgtgcgtacagtcaagctcggcgtagctctgtgacttgtccacacccgttgtatcaggtgtctttatgatttgagaaacccagtttatgcctagtgtgtgctatctgagttattatttaccttgcttcttgtcttcctaagtgcttatccgattcttaccttgccctcttccgagagtttagatggctagccgtccccgccgtgctgctcgtgcaccagcccatttcggttttgaggaaggtagagttgagccagaagcaaatcatgagtcagctaatgagcagtctcaccacagcaaccgttcgcaccatactgcttcccgcaatgcagaagttgagcaaccccaccgcagcaaccgctcgcaccgcacagtttcccgtaatgcagaagtggaacagtctcaccgctctccccgcgctgccattcacaattctagggaagaacgcattccttccccaccccatgttgagaacaacatgcagcacttgatggcagttcagactcaaatcttgcaaggtttagccacagccatagccggtattcagcacaacgcgcatggaaatggccatccccacacgggcaacaacagatctaagctgacagactttctaaggtctcgtccgccagagttctcccagaccgtcgagcccgttgaggctgacgattggctgaaagatgttgagagaaaactcaacttagtgcagtgtactcctgttgagaagacgctctacgcctctcaccagctaagaggacctgctgcagattggtgggagaattattgcaacgcacaccccgaacccactaacattccatgggatgaattcgctgcagctttccgtgcagctcatgtgcctgaaagcactattgacatgaagaaggaagaatttaacaggctcaagcaaggcaataccagtgtcaatgagtatatgagtcagttcaacaagttggctcgatacgctcctgaggaagtggacacagacaagaagaagatcaggaagttcttgaaaggagtcacagttggaatgagactctagttgcttgctcatgacttccccactttttagcacatgatcaacaagagacttctacttgaggatgccagaaaagaggctaccgaggagtataagaaacgcaagtctacccatcagggaaattcttcccgaggggaacctcgccctcgctttggacaacccatgcaatatcaccagtcagtcactcaggctaaccgccagccaagctatgcccctcgtcctcagatgaatcgtctggcacctcagccgcagcagcgtgccccaagtggcaataccgcgccaaacagtgttacctctttcaagtcaccgccaggactatcagcagttcagtgtttccggtgcaaccagatgggtcactatgccagacagtgccctcagaatcttaccaactccaactcagggcataccaatggcagcaccgccagaactcctactcctgcagcagctcagtcccgtcctagcacgcaggcaagtggacaaggttcccgtgcttccaacaactttggtcgagaccgagtgaaccacattcaagccgagaccgctcaggacgctccagacgttgttatgggtatgttctctgtcaactccgcacccgcaatagttctgtttgattcaggagcatcccattctttcatatcgcaagcttttgtgaaaagaaatggttggaaaacccaaaatttgcgagtaccaatgatagtacattcccctggaagggatataagggcaactaaaatatgctcggaagttaaccttagaattgaggaagttgacttcctagccaaaccgatagtcctagactcgcaaagcttggacatcattcttgggatggattggttggctaagcacaaaggacagatagattgtgccgaaaggtccatcaccttgcaaggacctggaggaaagcaagttcgctttacccccaacactcttactgcaagtcggtctatcctaaccagtttgcaagccacttctttggaatcggtacccatagtctgtgaatatcccgacgtatttccaaaagaattaacggaaatgccaccaaaccgagagattgagttcgccatagaactggcactaggcaccgcaccaattgcaaaaagtccctaccgaatggcagctaatgaattagcagaagtcaaaaagcagatcgaagaattggagagtaaaggttatgtgcgacctagctcatccccttggggagccccagtgcttctggttaagaaaaaggatggctctgagagaatggtaattgactatagagccctgaatgaagtaactaaaaagaacaagtacccgttgccacggattgacgatctgttcgatcaactttaaggagcaaaagttttctctaaaattgacctaagatcagtttaccaccagttgaaaatcagatatgaagatatcccgaagaccgctttctcaacgcgctatgggctgtatgagttcacagtgatgtccttcggactcaccaatgctccagcattcttcatgaacctgatgaacaaaatcttcatggagtacctggaccagtttgttgtggtattcatcgatgacatcctgatatactccaagaatgaggaagaacatgttgaacacctgaggctgataatggagaagctaagagatcatcaattgttcgctaagttctcaaaatgcgaattctggctggaccgagtagcattccttggtcacgtgatctcctctaacggtgtcgaagtagatcccagcaaggttgaagctgtccttgcttggtatcctcccaagaatgagtcagagatccgcagtttccttggcctagctggttactatcgaagattcatcgaagggttctctaagctagccagacctatgaccgagctgttaaagaaggaaaagaagtttgaatggtcagcagcctgtgaagacagctttcaagaaatgaagaaaagattgaccactgccccagttctcaccttgccagatatccgaaaagatttcgaaatcttctgtgatgcatcaagacaaggcttaggatgtgtcctaatgcaagagcgaaaggttgtggcctacgcatccaggcagcttaggcctcacgaagtcaactatcccacccatgatctcgagttggcagccgtggttcatgctcttaagatctggaggcactatttaatcgggaacagatgtgaagtatacaccgatcacaaaagtcttaagtacatcttcactcagaccgagttaaatatgaggcagagaagatggttggaactaatcaaggattacgatcttggaattcattaccatcccggtaaagctaatgtggtcgctgatacgctaagtcgcaagacctattgcaatgcagctcaaatatggccagaccaagatcgcctgtgcagagaattggagaagttaaggctgaccgtggtgcagtcaggtgtccctgccagcttgacagtgcagcctaccctagaatcgcaaatccgggaagctcagaaagatgatgaagggataaaagagctaataaaaagaatacagaagatgaaggacaccgatttctccatagacgatcaaggcacagtttggtgcggtccacgcatctgtgtaccggccaagaaggagttaagagacctcattttaaaagaagctcatgagtccgcctactccatctatccaggaagtacgaagatgtaccaggatatcaaggcatatttctggtgggttggaatgaagcgagatgtcgcagaatacgtagccctttgtgacatttgccagagagtcaaggcagagcatcagaggccagctggtctgctgcaacccctaccgattcccgagtggaaatgggaagagatcggaatggatttcataaccggtttgccaagaacccctagcgggtacgactccatctgggtaatcgtggatcgactcacgaaatcggcacatttcgtgccagcgaaaaccacctttgatggaaagaaactggcagaactctacatgacccatgtcgtgtgtcgatttggttgtcccaagaagattgtgtcggatcgaggcactcagttcacctcaaggttctggaagcagttgcatgaagctctcggaaccgatctaaattttagtacagcttaccatccgtagaccgatggtcagacagaaagagtaaatcagatcctagaagacatgctttgtgcgtgtgccctggatttcgaaggcacttgggatcgttgtttgctgtatgctgagttctcatacaacaacagttatcaggccagcattcagatgtcgccgaatgaggcaatgttcggaagaaagtgccgcactcccttgtgctggaataaggttggcgaagcactggtgttcggtcctgacatactcaaggcagcagaagaacaagttaagctgatccgacaatgtttaaagacaactcagaaccgtcagaagaattacgctgacaatcggaggcgtgaccttgagtttgaaaaaggagatcttgtgtacttgcgggtatcacctctccgtggaatgaggaggtttgggatgtccggcaagttagcaccccgctacatcggcccctacctcataaccgccagacgtggtgtcacgccccgaactagccccgagcggaactagcccgtgacgctccaaattaacctgttaatcgataccagtcccaggaaatagtgctggtatcacaggaagacagaatatcacagcaacagaggtctctttattatagagtaggggtacagtcatgttgggctgcggacagatcccgagctcacaactgcattacaaaagggaagcggaagccaagacttggaccaaatatcacaggcgcgacttgggaactaggccgaaaccctaaaactcatcgtagccggcttgctcctggaagaactcctcgtcagcgggatccgcttcatcttcttcagcaactgggagggggattatttatatagagcaatggtgagtacgggagtactcagcaagccatgggaaataagtgtttaatgcaggcttcaaggaaaggctgttgtttttgcaattgattttatttaaactcttttctgaaacaactaagtgagtgcttctcaaacgacacggatgagacagtgcatctcgtccggtcggagtatgtgcaaggtatcagtcttttgaattggtcaaggttggcacccggccaacggcttttaaacggccacccgggcctggctgatcccatcagccgcaggttttccaaacatcgaacccaaaccacatcagcaaatttcacaaaacagtagtcaaacaaaactacgctaggaatcacctcacatccgcccatgaccgtgggcacggctgttcgaacagtttaataacctctgcagagggggtacactttacccacacgacattactaacccggatcatccagcccgtgcagaatggccacgactagagaccttaaggctttcatgacaaggcatttcgaaagccgacacaggttcaccatatgccaacgagaggggtcccagaccaacaccagattaggtcccagaccatactgtgccaggaaacccgggggttctccccgacaccaccccgttgaatccacatgtctcttggcatcatggctccccccgtttagctagttactcagccaggggtgtcccattccacccatgtggtcgcacttgtcttatgttcggatgaaattccaaggaaacggtccttaagtgcaagagcgggaaaccgtacacccggtacgttccccggtccgtgattttggaaattcatttagttcgtaagcaccgacccaggtgtcgggttttccaagtcttttgtaaaacccaagttttacccaaggtgtttctcagtttttaagtttgaaggcgaccgtcgatactcgtgcagagtgcacgattactgaggcgcaactaggtggttacaagggaacatgatataacgattaacaaaggaaggatcagatgcaataagctaggtaggcccatcggtctgccttgcagacggggcaatcctatcaatgcataatattttgcaagcaatataattaagttcaaatataggctcaatatgttcaaaggtggcttgccttgctcgagatcttgagcttgatcctcgaaatccacgcactgcgggtcttcgggctccgaaactacacgtgaaacgggacaactcaacaaacggcgaaaataaagccctattattaacctctaagcgtaccattagatagatctcgagatttgaggaattttggaagttgaacggagtcaaacggtcatacggttgagaagatattgaatttctaagattattggatttttgatctaaaggaaaaggatttaattaaacccttttggaaaagaaaaagaaagagggaggggaaatagacttccctcgggcggctagggcgcggcccgagagaaaaaggcgcggctcggccgagcttaatgggccagccggcccgagaaggcggcccaaggcacgcgcgagaggggaggagagagggagccgatgggccgggtccttctcgcgtggtcccaagtgggacccgcttgtcggtggctcggctcaccgtgcggagggagcacgcggcgcgcgctagggtttggggagagagacgcggtgcacgcgcgcggttcgtggaggacgcggatgcggcgggcccacgcgcagcctcatggctcgcggtggactgcgcccgcgagcggggccggagggagcggctggccgggtcagctcgacccggtcttagccgagctggcgccgacgtggcgcctacgtggctgccacgtgggccggcgggaggtcgaagaagacgccggccggaacggacgacggacggtggctgcgaacggcggggcgaaccacggcgatacaggcgaaagagagcacaccagaaggttgcacgggttgaggggagacgagccaatggctcggattcgccggaggatgctcgacggcggcggattgcggcggcggcaaccggcggtgagagaagggggaaacggcgacgacgcgacgggagaccgattcgggcgagctagagcatctacgcggcttcgggagtctgttgctagcgtcggattgggcggagctacgccgagtgaggctggcgacgagcgggtgctacggagcacgggcggcgacggcggcgagcacacagcgagcggcggcaacggtcggggcggcaccagctagctacggggaggctagtcatgctactacccgaatctaaggggaggagatggaacgaggaggaagaacggagggaggcactaccgtgcgggggtgatggggtgcactgacgagaggccgacggcacgggagtgatctctctggcctcgggccggggaagaggaggaagacgagcgcccggagtccccttccgcgtcctagcgcgcacaggctcctccggcacacgcgacggcggtggtcggcgagagggacggcaatggcgtgggtgaaaaatgggggagattgggaggagaaaaaggaagggagggcgcctgggtttataaggcggcaatgtcggtttggaaaccgaccttgggcggtcaagggagcgagccagcgctcggcggtcgcggcccaaacggcgacagggggaggggaggatgacgccggcgggagaaaaaagggaaaaagagggagagaaagggggcttgcccccttgccactttggggaaaaggaggagggagagagggcgatgcggcagagggggagggagctctgcctccgtcccttggaagcacgcgcgaggaggggcggggccaagtcaatgacgacggcgatgacggccgggcggtttggagcggagcgacgacacgggtggcaggcgcggcaggcgctgacggtggcggcgactggccggtcggccaccatcaaacacacgcacgcactacgtcgccatgactccaaaagagttggcggcggaacaaaagggcctaacacacggacggctgctgaagactgcctcctctactcctcgtctgcctggctgcctcctgtagtcggctcctcagtcgaagaaacgtcgatcggctgacgcgaagggaccagcggaacttgtcgagagccggcagcagcacgggccgctggcggtgggggagttgggtagtcgaagcggaacacggtggaagaaccaacaacacgcttccgcgcagtgcggataaagcgtgggccacggcgggaggaagcaacgggagtgtgtccgggggtgtaggaggggctaactgggtgtgggtacggggagtacactggtgagtacggcgctcgcgagctgggggagcgcgggccactaggagtgcgggcagagccgcgagagctgtgggaggacaggcggctggcgtggcagaggcggcctaagtcccaagagacagtgtcaactgaggtgacaccctcctcggccagacgggcctccagagcggcgtagcggcgggcaagggagcgggaagcctcgaggagtaggtcgtgctgactggcctgagcctccgaaagctcaaccatgcgagtcagcactggctaagactcgctgtacggacaagggtacctggcgtctgcgtggccggaaggaaggtgtggaagctgccggaaggcagagcccccgagacggtggctgtagtcgtgggccaagcgacgaagcgcagtccaggagaggtcctggtacgcgatgtcacgtcccaaaacgactctagaatacatcctttaaactatgcctagaacaattaaaatccgtgtgaaagcctccaacaattaaaatgtgcaaagttaaaagtcaaataaggcttagaggatttttgtatatttcctaaaagcctaaaatgtgtaaataaattttagtggaattttcagagcacaaatagtaattattaagaaataaacaaagttgaaaatgttttataaaaagaaaaaccctaaaaatcccccttccctctcttgggccgaatccggcccatctccctccccctctctcctctcccccgcggcccatccggcctccccccgcgcgcgcgccgctgacgggcgggcccgcctgccaccctcgctgacgggtggggcccacccgtcatccccttcctccagccgatcccgccgctccgcccgcgccaagcgccgccgccgccgccgaatccgccgcatcccgtcctccccgcgtgcaatcaatagggggaattattccccgtgattccctctccctttccccccaattttccctccctctctcccttggattcgtttggaaaccctcccctaatcccgccggcgccattgatggagcctgagagcgccgcgtcggtttccttcccctccggccgccctctcccccttccaaccctatataaaccct

SEQ ID NO: 21406 - DNA, 574 bp, Oryza sativa
tttaggaaagtttcttttttgtccgacaagaacttgtatcaacccatgggtataaatatgtacacccggggtctatgtaatctatcgctacaatcaatacaattcagcgcatcgccaccttttaccttttctactttattttatcgtccggcgggacttggcacctgacgcggggctgcatcggtgttcgatctccggctaaggggtaagtccgatgttccgccggcctgggcaattgtatcgtttacgtcggcgtcgttcaaggctgcatcagtacattcgacctcttggattgctctggtttggatgatatatttgcctacttatttatcatatgtctctgttaatatagtcttagcatatcaatttagctctatcggctacttctcgttttagggtttctgccggtatcggctaaatcgcgttgctagattatattagcttagacatctaccaccctgaaaactcagtcaatggcttgattgtctagatattatgttttttttcatacttagtgctgcatcagttaaattttatctactaagtcgtgcttagaaccataatctctagccta

SEQ ID NO: 21407 - DNA, 12221 bp, Oryza sativa
gtgattcctagcgtagttttgtttgactactgttttgtgaaatttgctgatgtggtttgggttcgatgtttggaaaacctgcggctgatgggatcagccaggcccgggtggccgtttaaaagccgttggccgggtgccaaccttgaccaattcaaaagactgataccttgcacatactccgaccggacgagatgcactgtctcatccgtgtcgtttgagaagcactcacttagttgtttcagaaaagagtttaaataaaatcaattgcaaaaacaacagcctttccttgaagcctgcattaaacacttatttcccatggcttgctgagtactcccgtactcaccattgctctatataaataatccccctcccagttgctgaagaagatgaagcggatcccgctgacgaggagttcttccaggagcaagtcggctacgatgagttttagggtttcggcctagttcccaagtcgcgcctatgatgtttggtccaagtcttggctttcgcttcccttttgtaatgcagttgtgagctcgggatctgtccgcagcccaacatgattgtacccctactctataataaagagacctctgttgctgtgatattctgtcttcctgtgataccagcactgtttcctgggactgatatcgatgaacaggttaatttggagcatcacgggctagttccgctcggggctagttcggggcgtgacaagagatggtatcagagcacaggcttggccctagggcgaaactctacgtttaggacgacccaaaggatactaagttcaaaactacttgcgaaaagctaaggcccttttttcttttggattctttattttcaatagtttgttgctaaaatggttactgatcttttctccctgtttcaaaattgtagatggcagtgaacgccagcttcagttcccatggttttggtgagggtcaccacgtcgctcagcttcgtgacctcgcccgcttccttggcttctcgtgtcccgagtacacggggtactccgtggaccgcgttcccactcgctgtgagctctctgtgtacctttaccctcgtggaggtatacacggagctggtcttcgcccacaccacttcactgtggccaggcccattctccagatcgcgtgtcacgaccggaaataacccaacgggcgttccttacgtgcgtgtattattccttgtcctaggaggcaaggtacaccaaaagttgatacatttcagagtttatcaagcggaagcgtaaatagttactttattacatgggcggcgaaggcccagcacacacaaagacaaacgggaaacagcggaagactagggcgacgaccacaggcgcatgacggcaggcacgagctagatgccttcatcttccaggaagtcctcttctgggtttgggaaaaattgagcaagactgagtacaaccaccgtactcaacaagacacacccatatgtgcagaataaatgcaagggagtacaagggggttataatataaagggttagggtttgcagtaaacagcactaaaagacacttagttgctcaaagctattttgtaaacacggtcctagagctatacaatattattaaacaaggccgtgaacccacacgaacctgccttaacccaaggcctacgatgattcagaccgaactggcaaccagaccctgggtcccaactcgtcccaagccaacccaggccaaccattccacattttagttattaagcaggttttaagaattaaaaacactaacttgggtacattgctcgacttgcccataaccgagggcgcggctattcgaatagattatactctgatcagaggtgtacatctttacccacaagacacatcttcctcacgtgtaaccacgtgccacataccaccacggtatacggacggaagacatgacatagttttcaacccatcctagccataaacaagagtaccgacccaaccccatctacggccggaacccccgggacaggtaggcaggactgagcccctagcagctggacaccggccctgtgccatgacatctcgactaccgggccgcagctcgtgtagccttcatttgccctagagatgtccatcgacccccgacttcgtccatctccatccgtgtacttttgtttataaccagactgagccacaaactaagccttacccactagacatgtggaagtacggtagtgctttgcaacagaggcccgaagaccggtccttatatggaagtacggtagtgctactgtcaaaaccatgcaccccgaacccagcctaaaaccattttgaggggtttgaatagagggggaggtgtgaatccaattccacaataatccaaccattccatagtgtccaggtgataagagtatttccaaagtctagagttgtaaaaccacctaatgttgcctaattaaccagtgaagcatctacctaaaatcatactagtggtaccatgagtagagtgtccactagttggtgttttgtttattctagggtgaacaaggtaataataacaataacaataataaggtcataacaaaggtacataggcatggctagataaaacagtgataacgcgggaatttaaataaagcgataatgcaataatttaaatcaaaataatttaataaaccaggattcaatatgttcaaggatgatgtgacttgccttggtcactttcccaaatgtcggcttcaacctccacgaagagcggatcttccgaagctgcaacgtctacacgaccaacggaaaataaaagggcttttactctaataaactccatataacagcaggaacaaagcacaaaaatgggttcttgacttcttaaggaaaaattagagacttgaacagtccaattccgagttcaaatggccaagttatggccatttgaagtttatatgctctttaaatgaatatttgcgaatttcttcaattaaattttaatttaaaaaaaaggtttattgcgtcagccgaggggagggggcgcacggaccgggtccatgggagtggggcccacgtggcagcctcacggtccacggtggaccgggcgtaccagggctcgcaccagccagcgccgtttgccccacgcgtcagccgcacccgagggcgcgggcggctgacggccgagccccacgcggcgtccacttggcgcgcccgaaggcagccactcggcgcggccggcgggaggcggcgcccgcggccctatggtcgccggcggcggccataggcacggcggagcggctgccgagagaggggaagggaagggggaaaagacgcggtggtccacggctcaccctaggtcgacggcgacgacgaaaaaggcggccggagcgaaggaaggcggcggcgcggctcgggtcgacggggtcgacggagttccggcggtccgcgggctcggcgagggggtggacggagtcgacggtggtgcggcgaagccggaggaggcgacgccggggcgggagacggtcccggcgagcggagaaggccggccggaaacgggcgagggaggcgcggggagggtttatatagggttggaagggggagagggcggccggaggggaaggaaaccggcgcggcgctctcgggctccatcaatggcgccggcgggattaggggagggtttccaaacgaaaccaagggagagagggagggaaaattggggggaaagatagagggaatcacggggaataattcccccctattgattgcacgcggggaggacgggatgcggcggattcggcggcggcggcggcgcttggcgcgggcggagcggcgggagcggcgggaggaagggaatgacgggtaggccccacccgttagcgagggtggtgggcgggcccacccgtcagcggcgcgcgcgcgggggaaggccggatgggccgcgggggagaggagagagggggagggagatgggccggattcggcccaagagagggaagggggatttttagggtttttctttttataaaaccttttcaactttgtttatttcttaataattactatttgtgctctgaaaattccactaaaatttatttacacattttaggcttttaggaaatatacaaaaatcctctaagccttatttgacttttaactttgcacattttaatttttgcaggctttcacacggattttaattattctaggcataatttagaggatgtattttagagtcgttatgggacgtgacaaacctaccccccttaaacggaatctcgaccccgagattcggaagaactggcgaagagatcgggatgggctgccttcagctcgtcttcacgctcccaagtagcttcttcctcggcgtggttgctccattggaccttgcaaaaacggattacccgtttcctggtcctgcgctccatggcgtccaggattttcactggcctctccacgtaggtcaagtattcgcgaacttcaatctgctctgagtcggcctgctcggacagcactcgaaggcatttcttgagttgcgacacatggaacacatcatgcacgttgcccaaggaggcaggcagctccagctggttagcgacttctccgtgtcgagcaatgatacggaaaggacccacaaaccgaggtgcgagcttccctttcgtctgaaaccggtgtacgcctcgcaacggcgtgacccggagatacacaaagtcatccactgcgaattccaggtcacggcgtcggttgtctgcataactcttctgccgagactgggccacctttaaattctccctaatggtcctgaccttcgcttcagcttctctcaagatatcggtcccgaacacttggctttccccaacttggtcccacaatagtggtgtccggcatttgcggccatacaacgcttcgtacagtgccatctgtatgctggcttggtagctgttattgtaggagaactcggcgtaggggagactcttatcccatgtcttcctaaaatcttggacacatgcgcggagcatatcttctaggatctgatttagacgctcggtctgtccatctgtctgcgggtgatacgcggtgctgaaatttaagcgggtacccaactcttcttggagcttcttccagaaatgagaggtgaactggcttccccgatcagatacaattttcttaggaacgccatggagactcacgatcctagcgaagtagagttcagctagtttgttccctccataggtggtcttcacaggaataaaccgagctaccttggttagtcgatccacgactacccatatagaatcataaccgccttgggtttttggaagtccggtgatgaaatccatcccaatttcatcccatttccattctggtacttgtagaggttggagaagtccggccggccgttttctgccttgacacgctggcacacatcacaaagggccacgaactctgcaatttcccacttcatactaacccaccagtatgtccctttcaagtctaagtacatcttcgtactgccagggtggatggaataaggactttcgtgagcttcctgaactatcagctgtttaagttccttgtcgtccggaacgcatacacgacttccgttccatagggttccatgttcatcttctgtgaaaccagcggctttaccttgtttcatattcttgaggatcccatgcatatctggatcattcttctgagcctcgcggatttgatcgagcaaggtaggcttggcttccagtgtagccaagaatccacgaccaactatgcttaggttcagggcttccatctgttgatgaagttccggtggaatgccacggacgccaagagtgttgcaacggctttttcgacttagagcgtcggcgaccacgttggccttaccagggtgataaaggattcccacatcataatccttgatgagttctaaccatcttctctgccgaagattcagatccgactgggtgaagatgtatttcaaactcttatgatcggtatatatttcgcagcgattcccaatgagataatgccgccagatttttagagcatgaaccacagcggccaactccaaatcatgggtagggtagttgccttcatgatgtcgtagctggcgtgaggcataggctaccacatgaccttcctgcatgagcacgcaccccaatccttggcgcgaagcatcacagcacaccatgaagtccttgcgagtatccggtaagattaaaactggcgaggaaaccagcttttccttgagagtttggaacgccttctcgcattgcgggctccacacaaattttttttctttcttcaacaactgtgtcatgggtcgagcgattttggagaagttctcgatgaacctccggtagtatcctgccaaacccaaaaagctgcgaacctgagtgactgtcttgggttgcttccaatcagtgacggcggtcactgtttcggggtccacagcaactcctttagcagatatcacgtgccctaagaatttgacttcggacaaccagaactcacacttgctaagcttggcatacaattgatgttcccgcaactttcccaacaccagacggagatgctgctgatggtcttcctctgattgtgagtacaccaaaatgtcatcaatgaaaaccacaacaaacttatccaagtattccatgaacactttgttcattaagttcatgaagaaggcaggagcattggtcagaccgaacgacattaccgtgaattcatacagtccgtatcgcgtggtgaatgcggtcttcgggatatcctcttcacgaatacgcaattggtgatatccggaacgaagatcgattttagaaaagacagtggcacctttaagctgatcgaacagatcatcaatccggggaagagggtacttgtttttgatagtaacttcattgagagctctgtagtcaacacacatcctctttgtcttgtccttcttttccacaaaaatcacgggagcaccccagggggaagtgctcggccgtatataccccttttctttcaactcttccaactgtttcttgacttcggccagttcatttgctgccatacggtagagtcgcttgtacagaggagtggttcctggagcaagatctatccggaactcaatctctcgcttgggcggcataccgggtagttcttccggaaacacatctccgaactcactgacgatggggatttctgacagtcctatctgatgaagttctgaactgccgatagaagttgggggtgcaaagaaaacaaccggttgttccggccctcggtacagagtgacagtgcgtcttgcgcaatccactactccttggaattcagccaaccaattcatcccaaggatcacatccaagttcttagtgtctagaagaatcagatccgagggaaaaggaattccctggatttctattgggacggcagggctataatactttgctgtcataacccctctaggggtggtgatgagcagagggttcctaagcctttcgacccccaactgatttctccccacgaatggcacagatataaacgagtgggaagctccagagtcgaacaaaatggtagcagggatggaatgaatgaggaatgtaccaacgatgacgtctggagttgtcagcacatcctcggcagtcacgtggttcacacgaccccgaatgacatccttaccaccattgttggggcggggaggcgcttggccttgctggcgcctcggctttgggcatttatccgcaaagtgcccgggctcgaagcagttgaagcacagacgctgctgaccttgaacttctctgcggccttgaccaggctgcacaacgggcgcaggaggacggggcacacgggtcccttgctgactctgctgttgctgcggctgtgaggaggatccccctggatatggattggtgtagcggaccctttggttagccccctgttgattgcggagattcgccaagcgacgcttctgcgactccagttccttgtgcttggcttccaagcggatgctcttgtccaccagacgttggaaatccggatagtccccggagaccagacgcacggacagctcagggtccattcttgccaagaacttctcttgcttctcctcatcttcacgaacatcctccggggcgtaccgggccaggttgttaaacccatgcaaatactccatcacagagcggttgccttgcttcaactctcggaattcccttttcttaagggccatgactccggcgggcacatgggtcctccggaaagcggcggtgaagcgggcccaagtaataggctgcccctctggctgcgtagcctggaagtggtcccaccatagagatgcgggcccttgcagttggtgagcggcaaagatgactttctcctcatcgttgcactgcacggtgtctaactttttccccacggcatgcaaccaatccaaagcatccacggggttattggagctagagaaggtaggcggacggatgcggaggagctcggcgagtttagagtgttgtgggggtggtggtggaggtggagcattatgctgtggcggattttggatgtgatggaggaaagcagccatcatgttggcctgctgggcgaggatttgggtgaggatggagttggtgtctggtggtggtggtggaggcgggggaggaggtggaggtgggccgccttggatgttggggttgctaccttcgggttggttgccatcaccggtagcagcacttctcctggttgtcaccatctgaaatatcccatacagaaccagccaagagagagaacagactattaaagctaatcacccacgactaccaaaattcttgaatttaatactgctattaaattggttcattaaggttcaagttgcttaagccaataaaataaagacaggctccgacacagttataccacacaccggtataaccatgccccacacgactctagcagaaaaacaaacgagaagaacacacgcgcaagcctactaactgctcgtctacttttgcgacgggccagggcggaaggtgagcagcagcgcaccctccgtgctaccaacgccagaggctccctcctcctgaggaaccacgggcgcgggctcggcacgaggggtctcgacgaaacaggtccatgccaaggactgacgaacaagcttgggcctggaggtactcttgcgggcggtgatcttctggctgcggcagacgcgacggcgcttggggcgacagacctctccctgggcgatcttgagctgacacagctgcgcctccaccgcgtctaggtccttcttcagctgcagattctcctgacgcagctccaggatcttcatgttgttcttgaccaacccacggcgcaccatctggtggaagtcgatacgggccgcgtcgtacgcctccaccatgcgcgccaggtgcatgatggtagcgtcatcctccgagctagcatcttggaaggtggcgtagtcgcgggctcctccgcgacgagggtggtagcggtagggcgagtgctgcaactcgtccgggtagcgctggtgaagagtgccgatggcgaggagtgcggcgttctggcaagcggcggagaaggaatctccacccgcggtgactgccaacgaagtcctctcgggtgagccagtgaggatcactgcagtgacctcctaggcagcgtggggctctgcatcgtcaccttcctgctccaggagctgcttgccctggtagtccactccatgcggataccccaagacaacgcacatgccccgcagctccaaaacgaaaccagtcaggtccagaccacgacggttgatgctgccggccatctacaaacaaaaacaaaagagaaaagcaacattttaaaggtcagattttgacgataaatgaagcagcaggacagagagagactagaggattttcacaaataagaaaggatttttattttgaaaatattgctaaggcttgggatctaaggctcgtcctagggtcaagctggctctgataccaacttgtcacgaccggaaataacccaacgggcattccttacgtgcgtgtattattccttgtcccaggaggcaaggtacaccaaaagatgatacatttcagagtttatcaagcggaagcataaatagttactttattacatgggcggcgaaggcccagcacacaaaaagacaaacgggaaacagcggaagactagggcgacgaccacagacgcttgacggcaggcacgaactagacgccaaagccttcatcttccaggaactcctcttctgggtttgggaaaaattgagcaagactgagtacaaccaccgtactcaacaagacacacccataagtgcagaataaatgcaagggagtacaagggggttataatacaaagggttagggtttgcagtaaacagcactaaaagacacttagttgctcaaagctattttgtaaacacggtcctagagctatacaatattattaaacaaggccgtgaacccacacgaacctgccttaacccaaggcctacgatgattcagaccgaactggcaaccagaccctgggtcccaactcgtcccaagccaacccaggccaaccattccacattttagttattaagcaggttttaagaattaaaaacactaacttgggtacattgctcggcttgcccataaccgagggcgcggctattcgaatagattatactctgatcagaggtgtacatctttacccacaagacacatcttcctcatgtgtaaccacgtgccacataccaccacggtatacggacggaagacatgacatagtttccaacccatcctagccataaacaagagtaccgacccaaccccacctatggccggaaccccgggacaggtaggcaggactgagcccctagcagcaggacaccggccctgtgccatgacatctcgactaccgggccgcagctcgtgtagccttcatttgccctagagatgtccatcgactcccgacttcgtccatctccatccgtgtacttttgtttataacctgactgagccaaaaactaagccttacccactagacgtgtggaagtacggtagtgctttgcaacagaggcccgaagaccggtccttatatggccgaggtgctactgtcaaaaccatgcaccccgagcccagcctaaaaccattttgagggttttgaatagagggggaggtgtgaatccaattccacaataatccaactattccatagtgtccaggtgataagagtatttccaaagtctagagttgtaaaaccacctaatgttgcctaattaacaagcgaagcatctacctaaaatcatactagtggtaccatgagtagagtgtccactagttggtgttttgtttattctagggtgaacaaggtaataataacaataacaataataaggtcataacaaaggtacataggcatggctagataaaacagtgataacgcgggaatttaaataaagcgataatgaaataatttaaatcaaaataattttataaactaggattcaatatgttcaaggacgatgtgacttgccttgctcactttcccaaacgtcggcttcaacctccacgaagagcggatcttccaaagctgcaacgtctacacgaccaacggaaaataaaagggcttttactataataaactccatataacagcatgaacaaagcataaaaatgggttcttgacttcttaaggaaaaattagagacttgaacggtccaattccgagttcaaatggccaagttatggccatttgaagtttatatgctctttaaatgaatatttgcgaatttcttcatttaaattttaatttaaaaaaaaggtttattgcgtcagccgaggggagggggcgcgcggaccgggtccacgggagtggggcccacgcggaagcctcacggtccacggtggaccgggcgcacccgggttcgcaccggccagcgccgtgggccccacgcgtcagccgcacccgagggcgcgggcggctgacggtcgggccccacgcggcggccactcggcacgcccgaaggcggcgactcggcgcggccggcgggaggcggcgcccgcgcccctatggtcgccggcggcggccataggcacggcggagcggctgccgagagaggggaagggaagggggaaaagaggcggtggtccacggctcaccctaggtcgacgacgacgacgaaaaaggcggccggagcggaggaaggcggcggcccggctcgggtcgacggggtcgacggagttccggcggtccgcgggctcggcgagggggtggacggagtcgacggtggtgcggcgaacccggaggaggcgac

SEQ ID NO: 21408 - DNA, 11818 bp, Oryza sativa
cgcaactccgggaatccattccttgcgccggattaggaggaaacgcaccgagggaggccggcgacgagaggcgcttaccgagctcgggcggcgacggcggcgagcacacagtgggcggcggcaaggcttggggcggcaccagctagctacggggaggctacacaagcttctaccgaaagctaaggggaagagggggaacgaggagggagaacggggagatgcactaccgtgcgggacggggcgcagtgacgatgggccgacggcacgggagtgatctctccggcctcgggccggggaagcggaggaagacgatgcgcccgaagcccccttcacgcgtccttcgcacgcaccggctctcccggtgcttggcgatgaacggcggaggcgagatagaggggcagcaatggcgcggtggtggcgagcgaaacgggaggaggaattgatgggagggcgccttggttaaataggaggcgatgtcggtttgggaaccgacctaggacggttaagggagcgagctagtgctcggcggtcgtggccaaaacggcgacagggggggtgacgccaatggaagagaaagggaaaaaagaggagagaaaggggggcttgccccttgccactttgggaaaaggaggagggagagagggcgatgcggcagagggaggaggagctctgcctccatcccttggaagctagcgtgcggagtggcggggccgggtcgtgacgacggcgatgacggcgggggcggtttggaacggagcggcgacacgggcggcaggcgcgggctcaggcgcggtagagggctgacggcggcggcgactggccggtcggccaccacggcgcccgcgcgcgcgcgggaagcaacgggcggcgcggcgatttgggcggcgtcggcgggaacggcggcgagaacggagagggagggagaggcgctcggcgcggctcacgcgcacgcgcgtgcggcgcacgggcaaagcgagggaggggagagagagaaagagagaaagatgggccaagagggaatcggcccaccgaacctaagggaggcaaaatagacttttcgagaaggattgagattagggatttgaatttgacgatggattggggatttgagatctggaattggcacggaaacggacaacaagcaaagaaacaatcttcgcaaatagggtttttagaatttaaattttcccgctaggcgccacgacggaacgggcactacagctccaccggcgaggtgcgctccacttcctccgcctcttccctcgtgtgttcgacctccgcgacccgctaccactctccctctcggttaccgcacccgctgccgagctcctcgccgtcgccacctccctcgccgcggcggccgccggctccgatgagcggtggggttatgacaatggggagggctgcacctcgggtgccatctgatttgcgggaggagagtgaggtaggaggaggggatccggattagtacaggatactggtgtattttagccattatttttttatagaaataaaaaagagtcaacactatcatatatttagatgtaattttaatacattttagccattattttttttatggaaataaaatagagtcaacgctatcagatatttattggtaaattttttgatagaaatataagaacaaaagggcatacatgtgcttcttaagttgtgaaagatctcccatactcacacacactgacccaccccttcattcaacatttattttcatcgaagaaaataacaccttaaacagaactagaactagaagagaactggtgtatcttcagttggtggcagcagcagcggcgccagccatcctcgccatggcgagctcgatcagcttgtccacctccggcatggcggccttggcgacgtccagctcgacgaagcgctcggcccacgccgccagcagcggggtggtggccgggtcgaacctcttgacgcccttcatcgcgtcgccggcgcgaacccacgccaggaagctgccgagcacgatgtcgacgtagccgacggtgtcgccaccgaagaagggcttccccttggagcactcgctcagcccgacctccatcttctccagcgcctccaccaccttcttctccccttccgccttctcctcctccgtctttcccgacgacgcctgctgcgacgccttcgcgatctgccaaaaataataatccaccgcgcataaacaacacggaaatcggaatcgacgcggatgatcagatggatggatcgatgcgaggtggtggtggtcgagttggtaccgtgtcgtcgcagaatgcggcccagaagcgagcgacggcgcgttcgtgggggtcggcggggagcagggtggcgccggcatcggggaacgcctcgtcgaggtactgcaggatgatctgcgactcgcagactggcttgccattgtggatgaggacgggcaccttcttgttcaccgggttggagctgaggaggagctcgctcttgttcttgagatcctcctcgacgtactcgtagtcgaggcccttgagactgagcgcgagcttcactcgcagaacgtacgggctcgcccacatgcccagcagcttcagctcgtctcctcctccggccatggctttctcgtgtctgaactctgaactccgatggtctctgctctgtatcagcttgtgagttgcgagctctgttctgtttggtggttggtgttgaggtggaaggagatgacgcgtatttatagaattaggcccaaattatattagcctgagctctgaaatctgcagtttccacgaagaggccggacgactgtttttttgttatattctggtataaaattctggtttgaataaacaatcgaaagtttatatgcttgggcaagaatcaaagaaaagtatgagcatggtcaagctggtcattcatttttctttcttcatcaatgactagtatattgggtgatgctctcaaaaactcagccacgattgcacttatcttgacttcagtacaaagaagcgtaggctgagtggctgacaaatctgttccaatccttttgatatcatcatttgtattattcacgtaaacacataatactcgtcgctactccattatttgtcatctgatacgtcaatctgcaaggctgatagataagattgggtcaagactgccaggctggaaaggacatttttttacctctgcgggacgtcaacactagttacctctattttaagtgctacgccgacacatcatcttacggtctttcaagcacccaaataggtacttaaaagaattgaccgtttcagaagatcgtttatgtggaaaggcaaatatcccgatcactaaaatcctagcgacagtttgatcaactggcaaacagtttgtaaacccaagaaattgggtggggctggcctcccaaacctggatagattctcaagagctcttcaactccgctggctctaattcaagtggaaggaggagaacaaaccttgggtaggcattaatctactctgtgacgatttgaacaaaagactttttcaagcagcaacaacaatatcagtgggcaacggtgctaaaactagtttctggcatgataattggatccaaaatcgatgtttaaaagatattgtgcccaactgtttcagtctggtaaatagaaagcaaagaaccatgcaagttgagatgagagacaacaaatggcttacctcttttagacaattcacctatgtggaggaattgcatgacttggtgcagcttggaggtttgctccaactggtctcgctttcttaagatccggatgacatttcctgggattggactgaacctggttcctacacaaccaagagcgtatctctttcaattttaaggttccttcgctaggaatgattttgtatctctatggagggccctggttgaaccaaaaatgaaattctttggattgttaattctttataaaaaaaaacccttattgcccagaatttgctccggagacactaatcatgcaattggatatgttgtctctgtaccgcttttgaagatacatcatctgttcagtgaatgtgtctttgtcagacaagtttggagcctagtttgccaattccaaaatctgacccctgcaggttccaaagagcaagcgcatgcgattagaggctcgttgttaactacctggttgaatatttggttagaaagaaatagaagaatcttcccaaactcttcttgttcagaaaccgaagtagcttactttatcaaacaggacataccttctctattgttaaattccggcagatgtcctgccgtccttccccttaaaaaaaaacgtcaatctgaacttgtacctgtttcaatctgcacttgtacctgttttcttgtgcatatacattattagggagattagactgactgcttcctctctgaattctgattgccatgtgtgcgtatgctgtgacgctcaaacgatgatcagtaaaaatcaaagaagtcagctcttgttatcaccaatctggttgactggttccagaacactaagtctccattcggtggcaccagttggaggaatattttcttttttcatttttgggagttcgaggaataattttaacacacgtaaaatgagaaaactcattactacataattaattaaatattaactattataaaattaaaaaaaattatttaatttttataagtacttctacataaaaactttttactaaaaacgtaaaaacgtaagtaccgtttaacggtttgaaaaacgtacgaacgaaaagtgaggaagttgaagtttggagctgagaaaaaaagtgggcctaagttctgtaaactaacactaagtcttgttaatttatttcccattctcttgtattatccatatacattttgtgtcacgcttgcatttcttggtcgggtgcatccatacatgatgcgacgtattttcaactacaacataggcggccatgtttagttgccacataaaaattttacaccatatcacatcgaacgtttaaacagctgcatgaaatattaaatataggctaaaaaataactaattacacagattgcgactaatttgcgagacaaatcttttaagtctaattgctccatgatttgataatttggtgctatagtaaacatttattaatgacggattaattagacttaataaatttgtctcgcggtttattgacgtattctgtaattagttttttattaatgctcaaacaccctatgcgacaccctatataatacccgatgtgacacgccaaaactttacaccccggatcttaacacccccatagtcaaatttctataactacaatattagcaagaatacaattcaaattagtaatattactttacaaactaggtgggtctgcgtcactttggaaatatgcaatattaatacatttaaaattataacatcccggcctagggcttaatagaattaatagaatactcatatcaacaggttgcaacttcttttccggaagccgatctccaaagaactccagggttaagcgtgcttggcctagagcagggttaagcgtgcttggcctagagcaatttgggatgggtgaccgaccgggaatcagggggtgagggtgtaacatctcggcctagggcttaatagggtgagggtgtccggaagccgatctccaaagaactccagggttaagcgtgcttggcctagagcaatttgggatgggtgaccgaccgggaatcagggggtgagggtgtaacatcccggcctagggcttaataggattaacagaatactcatattaacaagttacaacttcttttctactcatattaacaagttacaacttcttttccggaagccgatctccaaagaactccagggcggggttgatcgacgggggcgtcgatctctcttaagggggtgagggtgtaacatcccggcctagggcttaataggattaatagaatactcatattaacaagttacaacttcttttccggaagccgatctccaaaaaaactctagggttaagcgtgcttggcctggagggttaagcttcttttccggaagccgatctccaaaaaaactccagggttaagcgtgcttggcctggagggttaagcttcttttccggaagccgatctccaaaaaaactccagggttaagcgtgcttggcctggagggttaagcgtgcttggcctagagcaatttgggatgggtgatcgaccgggaaattcttcccgagcaatttgggatgggtgaccgaccgggaaattcttcccggctgcatgtgttggtctgtgagggcagtctatgacctataagctatcagatgtaagcgggcccggcctaaaaaataacaaatgtgaatgtgaataatggatgcattagatagagtttacactaatttgttatttatattatattattattagacaataatcactatgaatacgtagccgcccttttgcgcgccaaccaatcgatgtaatagtgttcaaccaccctcttggatcagtgcacaccttcatctggcctcaggcctctgcggcggcttcttgtgcctgcttcttcttgaactctatcatcatgccggcgtccggcatgaccgccttgtaggcctcgagctcgccgacgcgctccagccacgccgccaggagcggtgtcttggcggcgtcgaactgcttcaacccgaacagctcctccatcgcatgcacccacgggacgaagccaccgagcgcgacgtcgacgtacccgacggcgtcgccgccaaagaagggcttccccttggagcactccctcagggctccctccagcgtctccgccaccgcgaacgtctgcttcctcccctccaccttctcctcctccgtctttcccttgaacaccatcttccacgcactgaacagctgcatcattcgatcagcaccaaaatcgtcagaaaagcttgcgtgagagaactgatgtacggtgatcatacgaattaccttgtcgtcgacgtaggaggcccagaagcgagcgacggcgcggtcgagggggtcggaggggaggagggcggcgccggcgccggggaacgcctcgtcgaggtactgcacgatgaccatggactcggagatgggcttgccgttgtggatgaccacgggggtcctcttgtgcaccgggttggagctgacgaggagatcgctcttgttgtggaggtcctcctcgacgtactcgaagctcaggcccttgaagctgagcgcgagcttcactcgcagtgggaatgggctcacgtagacgccgagcatcttcaggtcatctcctcctccggccatggctatccaacgctctgaggcctaagcagtagtacgtcccaaggattggagcttttggcttttgttttgttgggctccttgtcttttggaggtacgaagctatgataggtggtgtatatatatatagagagagagagatttgcctctgcctgcagggttaactgatgtagaaactattcagccagtgaccaatttgttttgaatatacttcattgatttttcttggaagtggatttttgtccctcaagaggatatccactcgttttatgcatagcattcagaaagttataaaaaaatttgaaaattttatcaatatagataaatatatgatatatcttttcgcaaacatgcgagctaaaattcgaattatataattcgaaacaaaaataacaaatttgactgtgaattacacgttctattcgtagtcaaatttattatttttgtttctacttgtataagttgaattttaatatgcatgtttgtaaagtgacatatcacatattgatctatcctactaaattttttcaattttttatgacattttaagtaacatgtaaaaatgaggggatatccccttaaagcatgaattgagttttccatttttcttgcccaccactactatgcaatactattctccatcaccctgtaagttttgagatgctgacaatccatccagattgcaactttctactgcccttgctttgcataaacgcagtcgttagactatctccaacagcctaggcatagcgacaaccaaacccaaaatgcgtgctccaggctactgtagcggaaaaaaacagggtccaacagagtacccatactaaggacctactttgggtgccaaccgaggcggaactcaaatatgagcgccctctctcctcaaccaaaacacctagcgtaactgtttcgcgggaggcggagagaagaggaaagcgcacctggccccggtgataggaaaagctccgccgccggcgagatctgctctgagctaggattcgcaagtatggatctctctccaaccccaccctccttcatccctggtcccatctctcctctctctcgacgtggatttggccgcggccgctcgcaccctggccaagggcgcatcgcgccgcatgctgtgcctagccccagcgacgccgctcaaatttttgttgaccgcaccctccctggcatgtttgtgccatgtttaattgaatctctgttgtaataggatgatggataaaaatattggtggctcaagtgctcgcgctggcgaatctgaagaaatctttcggacagatcagtgggcttttggtttttctgccgctttgcattcttttgaaagggaatgtgacatcgaacaagcaaacatgcagccggccttgtccgaacaagcaaatgttcgaacggaattagccacaaattaaaagggaatgtgacatcgaacaagcaaatgctagaaatcatattacctgtgttctgattgactctgctgcgccaacgttcggccttgtccgaacggtcgctcgccggcggctacctcgctgccactgagactcccttctcacatgcagccggggcggcaaaacaatcccgccatcgagccaacaccgcagtcccgcgccccgcgcccggtatatctcgcacgacaccctccgtttcccgcgtaaaaatttcatcgcgggcccacgaaggaaactgtccgtgttgcagggtttccttttgcgttcgctgttggagaaggcaagaaataggtgcgtgacccttttgccacaggtgacacataccgtccaatgggtctcctgttaagggtattattgttagagatagtcttatatggtgctggtctgtctcttgttcctcgttacttgcctggtctgtgctacacacgtggcacaactactgtaatatctgatcagtgacgcttgcttgttcggctgttccgttgttcgtcatcgatgacggctgcgtttgatatggctgttgtgcttggctagttagcaaggaaaataagacgagcaattaacgtgtatttaattaagtattaatcattataaatttgaaatataaagtcattgcttaaagaaaaaatatataaaaagtttctttaaaaaattatatcgtttagcagtttagaaagcatgttcgtagctcaagtaataagcagaaattttgatccagtattatcatctattaccttatgcctcgtgctactgcaaggtttgaatgatgagcttttttgccgtccagcatgctgttgtgataccgaatctatcatggttacggataaaacatacctcttatcctatgactgacgaaacatacgagtatggtataccatcatccatacgatatacttccgtatgtgataaggaaatctacaagatattatggaaaatatcctcacggacttgtgattaatagagtcctactcggagatgattgggtttatcctatatatatcgtgtagggttcattgtctccgagttctacttagagactaaggcaactcacggtataaaaggcacaccccctgaggggttcagatcatcgaatcatagtgccaacacacttaccataatttacgaagccggaggacgcgaagccagactcgtcgggagatctcgtcaaaccatctcgacaagggtctcgccggtaacgccggattcgtctgttctctttatactctgtggttttccatataaatcttatataaactagactaaggctattacctcacgaggggcctgaaccaatataatctttatctttgtctttcgtgatgtcgtatcgtatagatcctcgtaccaacgtacctcaataccctatttatcctgtctacgggtatccctcgtcgacagaatcctatccattagtttgattgatccaatggctagcgtaggtcggtaccacgaggtaccattttagtccttggggtggtagtgctcataaaatagaagtggaagggtaagattgtcctttcacattgcaaaattttttttctcggtttgaatttgtatggacggatgagtggagaaggcaaagaccaaccaatgccgtggcattcatatatctttgcatcgccgcatcttcatccctcatctacttccatgcgagctacgtttccacctctctgcctacttatgtgactctgccgtcgctgcccgccactaacacagtcgatttagtcgcccatgccgccgtgcggaggtggagagacggcggcatgggggatggagagtacacagggatattagccggcgtcgccctgcacggaggaatggcacttcggcaaggaaacgatgcatacttgcatttcgggaaggaagaatgtggcggtggcggtgacgtcgcaagcttgttccgggtgctggctttatttcgttctcgattgtacccctcgtgattaaacggttggatttgttttggtacctggcaataccagtacctaggggtatcaatgctagaccagagcaaacctcttgaatgataatgtcttgggtgacggcctttcgaaaaagaaatgaaaatgggagtaggaaaaaatacatttgtatgaagaagtttatttgaacaaatattattgaaacaaatcaacgtatgaattaatatagacgtagcacatcatacatcatcttggtagaatagccacttcccacttggcaactgcgacggtacatggcgaagatacacggtgcggcaatacgaactgatgaacatagttgcagaaacaagacgaggtacagccataggaactgcgaaaatgtggaagcacacgacaatctatatggttgtgtttcaaacttcaaactcccctccaggattcagcaaacttcaactggcctcacccgcggcggctgcggccgcccccgctgcctgtgcctgcctcatcttggcgagctcgaccagcctgccaatgtccggcatgacctccttgacggcgtcgagctcgtcgaagcgctccaaccacgccgccaggagcggcgtcttggcggcgtcgaactggttcaggccgaacacctcttcgatcgcgtgcacccacgcgacgaagcctccgagcacgacgtcgacgtagccgacggtgtcgccgccgaagaagggcttccccttggagcactcgctcagtgctccctccagtttctccaccaccgcaaacgtctgcttcaccgcctccgccttctcctcctccgtcttgcttctgaacaccagaatccacgcactgaacagctgcaacgcacagaacacacgcagatcgatcaatcagcttaattcacaaacataagagagaaatcaagtaatcaataaaagtgcatggtgatctgacgaaccttttcgtcaatgtaggcagcccagaagcgagcgacggcgcgatcgtggggatcggcggggaggagggtgacgccggcgtcggggaacacctcgtcgatgtactgcacgatgacctgcgactcgcagatgggcttgcctcttgtggatgagcacggggaccttcttgtgtaccgggttggagctgaggaggacatcgctcttgttcttgaagtcctcctcgacgtagtcgtagctcaggcccttgaag

SEQ ID NO: 21409 - DNA, 5097 bp, Oryza sativa
  unsure (1)..(5097): unsure at all n locations
gctacttcaccaaccacgacgactacaagagtttcgacatcttggcatgcgtcaccaaatatgatgccttattattttactacaacaagtggtgttccaatcttcaatatttctactcggacatcctcaacacatatcttcactcaagcaatgactactcgacgacaagaagctacagttctcgactctatgttcagttgtttaccaactaaccaaagagtcaggggctacacaaatacaagactctcaaaatttgacagatgttatctcaacatgaaacaatcaattaaccagccaatgagtcattttcttcgtctttgcttcggagcagacgttctacttcagcaacttcaattatttcaccaaaattttggcttcttcatgccgccacaatttacttcaaatttctcaagtatcaagtttgagatttaatctacatattcgggaggttggagttatcaaccaattaactcagattcaacgagttggacaacagtttctactttccttcaagtgaagcatctgcaacatctacaactctaagttctactgccatctttataaatcaaagggtgttgcatcagtcttcattatgcacacgctcgcatcaaggaaactactcgagtttcaatatcttctcaacaatttgatggattattgtcactgacataatcaccagcacctctgcttcatcggccctgacttattatttcgccttcacggctgacctactacacaaacgctgatgagcatcatttttattatcattggctgctacactgctattgactggatcaatgacattgtcatcttcatcaacatcttgccaagcctcttcaacatagcctactcttctgctattgattggcaacttcatcttcacagcttatcatctctgttgctgctaatcgtcattatctcggcttgcctccaccgccgcccatggagtcttcactttcacggctggcttattatgcctctactgataggcgtcttcgtcttcttcaccaggtgcctcgtctgttatcgactgattattttgctgtcatggctgcgcaactctgtcgccattgctgggtgcttcgtcttcactgctggttgaattgtttgctgccgactggtttcttcgccttcatggctatgcgacttcatcacctttgaattgtgtcattgtctttaccactaccaacatcttcgtcagctttgatgggtgatatcatcttcatgttggtcatttcgtctccatgccgaccacgtcagccactatcaatggacaattgtgactacaacagaaggataagctacatgcttaggggctcatcaatacaagcgcgaggattatatcttcaatttggacttgttccgaatacattcaacatgaatttatggtcgtgagtcgatttcttatgctcaacgtctggactattcgttattccccgtaagggctatcaaccgaatacttgcaccagtcgggattcaacttttatatctattttgaagtatcccataagggataatcactcagatcagaagctattcatatgagctatacttggtctatatcactcggaagatttattactcgggagcatattacatgcgtcatcctttaaagggtgtcgaaggcatattttttggctaggcctaatatgtctacagcccatattttcaggtgtggcctgtcacgttcttttagggacttaggcactttttgcttaggccaaagtgcgcgtgatcaagtgcccaataccttaaaatccttttataccacagttactcaactttttaggagttggtacaatgtattttaaaaggtgcccaatagtgaagttttttatagctgccctgctgacttttttatatatagtcaaggcgctgtttgggtttatacagcaattgattggatacaatatcattgctttttgccacgtaagtgtgctttttattgaccaatattatggcttaggctgattatatatttggtcattttccaggcggttggtaaatcctttatgagtttatttacttggattttacaccacgtatgccatatatttccgggtgtggtgaaacggtgtgtcttttagagacttaagcacatttgttaaaccagtgtgcgcatggtgtatgcccaatactttagaaatttctttattcaccgcatataagcttcttctatagctgttttgctatgtgaatttttcatgatgtacacaactttaggttgctcgcatcgtattttacaaagcagttggtatatcactcggatcatgttattcggagactcacaccgcatatgctgtatattgatatcaagtcactcggttgactataattatcaaaaccactcagttggttggattatttactccttgactatatgcttagtttgttcaactaaccacatagtcgggggctacacctattaggtgcatctagtcgatgcacctaagtttacatttaattatttttcagccctccacagtcttcagatttggtaaaagtactcaggagaccatggcaaagatgattgaagcactcggctttggagtaatctggtttgagagaagattatctttcgactgtgaaggtcttaggggctactgtagagattatgggtaccccatacccacacggcatggttatccgactggttataggggatagcttatacctatcaaatatgtaacggatcatgacttgggtattatgtttccttgtatattatgaaacagcctaaagtcctggtttgataatattgtaaattagatttaggaaaccgatgccatattggttaaggtttctatcttgtaatcctgcccccatcgtatataaggtgggcaggaggccctctagggggcctgacacaacctgatcgtcagatctatactacacccggcggattcaaatccctaaacaggagtagggtattacctctcattgagaggggctgaacctgtctaaatccttgtctccgcatccatccacttttagatctcgtgtggttccccttttattattggtgaattcatgtttcgatatttttgtttttctttttcctgtaacaaggctctgtgtgtttcttttttggctttcttctaaaagccgggtaatataatgtttgcctaatgtcaaaaataattatgttacataacatatgtacaaggtcccaagtttaaaacatgaaacgttttcgtatattaatatagtaaatgtgtgcactttatcatcttatcgcttgatgtattttcatcggtacgactaagtgagcaatacgcttgattgtcaagaccgcgctaagaatactaacatcccaacataactacatgcaagaatattttaaaagcatcaagaggccccacatgttatggaggccaataccaatcatgattcttatgttcttttatcaaacctatgctttaaaccatatgttagttttaagaaccatttgaattaccatagtccattttaaatatataaaaatgagtttaatattgaatatattcatacctttaaaactacccctcatcctcttgcatctacgcgtttgcaccgcatgtcacgccacctgcacgagcccagcctagatagggagagaactcaacttgagccttttttagggcctagctatagaggccatttctcacatgaggttctaggccccaatggttgtgcaggcaaccaaacancctcttaggtatccgcacatgcgagcaatcttccaactaaccaaacacgccctatgccctatgcctcccaagccaatttatattatattgaaagatgattcaatataattatgctattgtttccttatatctctcttgcaatattttcgtaccggaatagatccagttgatcggtattcggtcctactagttcttcctgctatgtacttatgttttttttaataatttgtctcttcccagttacaactaacaccaattattgttatacattgcatttttgcactaaaggcaaatactttactgcagtacgtacaaacctccgacttcttttacggtacaatatatatgctggtagtataatgtcaatttagaaatttatcacaaaattttaaaaatggtactttagtactttcgtgcgcttagtccttccattgtaatggttggtggcggcgtacgtgaactcatgatggctagcagcgccttgccgtggtgaaggataacaagaataaggaatgggattgagaggagaaaatatacagaattgccatcaccaaatactagcatggaaagataattttacctgtacatttacatcaggagacaaattaattaatcctaataccgattacactactacgagaaagatttttgcgtgcggtcaaaatcagttttcgcgtgcgagtgggtggcccgcacgcacccaggggtatgaaaaatcacgatttttggcacctgcacacgaaagtcggattttcgcgtgcgggtgcttatatcgcccacacggaaaaacaaaaatctgaaaaaattcaaaaaagttgaaagtcctagaatcggcagcgccaacgccgctcccagccgctgcctcctcctcgtcggccgacgacgtcgctcccgccctcgttgtcatcgtcagccgaggatgctgctcccaccctcgtcgtcatcagcggctgcctccgcgacacccaccacccgatccgtgctcccgccggcctccatgccggccaccgcccgatccgcgctcccctccggccgcaccgccgccaacgcccctcccctccgccggatctaggagggaaggaaggggaggggaggggagctagatcccgcgtggggggagggcggctgcccgccggatccgtgcgggggttggccgccgcccgctggatcccgcgcctcggccgccgccgcgtggaggaggccgccgcgcgccatcgcctacacccaccgccgccgcgttgccactgtcgtcgtgcgcaaccatcgcctatgcccgccgccgctgtcgggaggagaggagaggagggaggagtgaggagatgagagacaccgtgcgggggaaggggagtgaggagaaaaagagatagagaggagaggaaagaaataggagaagatttaaagtgggaaa

SEQ ID NO: 21410 - DNA, 47289 bp, Oryza sativa
cttatgcaagaaagtgaaacagaccgcctacacacatacaacaggtcgtcggataaaatacatgtcagagtaaacgacaagcataagacagtatttgtaaatattctgcaacacactcctactagaattacgcaatgaccttattgaaaatatacacgtattctaaagttctgtcacgcatggagcgtattaaaagaaaaacatgctttgttattccaaatttctaagcctttttgggtgaagaacatgaggacggcgatatgcatggaaatcacgacagctttctttattttcctgtcttgacaacgaattctcaatcatttggccagactacttataggttcatactaattactccctccgtcaaaaaaaactcaacctacgagaggatttgatctctcctagtataatgaatctggactacctttatctagaggggtcacatctcctgctaggttgagttattttgagatggagggagtaagtactaacattacatttttttcttgcaacataaaatgaaataagtaattaataacaaaaatacagaatctaattttagctattcattgttcaatacgtacgtacttgccaccaagttaagtagcgccatcaagttaattttctcttgttgcaaatattagtacacaaatcaaataaacatggctgcatcactaaacgaagaaatagcacgaactggtacaagatttgttagctacgagtcacccgatcgaacaccgtgtgcgcacactgcatacgtcgggcacggcaacagacgagaaaactgaagaacgcagaaaaggaattcagaacagagaaagcaaagttttactgagtttcagaacttcgcgagagagagagaatttgtggggcaattttctggtttctttcattcaaactgaattgtaaaacttacaaatggaaacttagctactgctacttatactccaataacagaaaaaaaggaatccaagcttacaatcgcgtcaacccacgattcggaactcctggatccaatgccgtgcaaaactcacgccaacttcgcacttctgatgcagtcaccatctctgcagctcaccgcatctcccatgcatgcataacaaactttgatttatttgttccagccgttgcaaccgccatcgcctagatcaccttggggccatagctgaaataacagtcaacaaactcccccttaattctgctatggcccaaaatcacgaacacctagcaggtgccgagctgtctctaatcttgctgctggcaaacctttcgttaacgcatccgcccgctgctccttagtccggacgaactcaatttgaatcttcccactttcaacacactcccgaatgaaatggtagcgggtatctatgtacttacttctcccataaaacacagggttcttcatgagtgcaatcgctaattggttacagtatacaacttcaccggcctaggttctgcgccaataatctcaatcaacaatcccctgagccacagagcgtgacaagctgccgcagtggctgccatgaacttagcctcacaggacgagagagccaccgttttatgcttttgtgaactccaggaaatcaaactattgttgagataaaatgccatcccgctagtactctgacaatcatcagtgttaccagcctgatcactatctgtgaatctggtgatctccactgcaccgttgccatcagcaaacgtgaacccacagttgatagtacccttgagatacttgaggatttgctttactaccttgaaatgcatcacagtcggtcgctccatgagtctgctcactacacccacagcataggacagatccggccgtgtatgcaacaagtaacgcagacaacctatcactcgcctgaattgtgtggcatcaactggactccctttagcatctttatgcagctgtgaacggtgctcaataggaattgaggtggaattgcaatgtaacatcccaaactgggtcagaatcttccttgcataagcagcctgcttgatggcgatcccatttgcaccttgcattgtatcacttcaatccccaaataataagtgagaagtccaagatcactcatatcaaactcccccaccatctgttgtttaaatgttgtgatctcgcttgagttttctcctgtcacgatcaaatcatcaacataaaccccgacaattagtccggcattccctgtacctctggtgtagacagcttgcttttgtgcacaccggctgaacccaagctccttcatactccagtcaagacaagtgttccagccccgaagtgcctgtctcaggccgtagagagccttgctcagtttgtaaacaagatgctccttcccctgcttcacaaatccttccgactgatcaacaaatacctcttcctctagatcgccattaaggaatgccgacttgacatcgagatgatgcacctcccatctccgattggcagcaactgcgagaatggcttgcaccgtgtccagccacgcaaccggcgcgaacacttcatcaaagtccacaccttgcctctgaacatagcccttcgccaccaaacgcgccttgtgtttgatcacctcgccggtagtgtttttcttcagcttgaacacccgcttgtggcggtgagtacggtgctgtcaggtggcactcgatgccggcctcggtgcagacgctcgtgaactcgctggacaagaactcgccgccgcggtctgttcggagtgtcttgatggttcggcctgccatgttctctggcaacggtttgaatttctcgaatgccgtgagcgcttggtccttagacttgatcacaaacacccacatccaacgagaaaaatcatcaacgatcaacataaagtatcgattaccggccagtgttgatggggtgatcggcccacataagtccatgtggagcagctcgagcggtgtctctgctcgataattggcaatcgctgggaacggctgccggatcggcttagccacaaaacatgcttggcacaattgatttggatggtggactgcgggcacccctgtcgccatctccttgtccaccaaatgcttcaacgcctagaagttcacgtgcccgagccgggcatgccagagccacaccaggtcgtcgagagtcgagactggccagcaaacacacaggggacgccaacttcagctcgatgcgatacaacctgttcacggttcttctcaccctgatcaccaatcgacagtgattttgtcgaacacctcgaggtcatccccatccatcatgactcggtggctagtttcggtgagttgccccagactcaccatgttgcagcagaggctggcaatgtagtagacatcgtcgagtagccactggtcgccatttttgaatgagaaaaggattgaacccttctctattatctgcaccgatgaggcatcgccgaacctgacttgccccgtcacggttttgtccagctcccggaattttcgacgatctccattcatgtgattactagcaccattgtataggtaccagacatcaccggcggcggcgccattgcctgccagcatcaggcgcggccatacatggtcctcgtgcacgaccagcccacagtgcacgccttgacgcggcgtgttctgcaccgcctctgtcatggcgagcaacaaagctgggccggcatccttcgtctacgcaagatgagtttcggtattcttcttcttagggtgtgggcactacgtggagtagtggccaaattcgtcacaattgaagcactttatgtggctcttgtcatggccaccgccaccagagccgccgctaccaccatcagagccaccactgttggaaaagagtccaaacaacgtattcaatgtgtattctttattcaatctgcctccaacttgggcaatgcttacatatttatatacaggatacaagagggaattacatctttgccctacctaaatcagatgtaacttggctggctgatgggccagcccttgggcaatcggtaaaatcccaggtgacaaaagcagtgacgcttcccgagggtgatggctattatccgggtaaaggcgtgcccccggataatagcggatgctgcctgcccttgttaggatgtcagaggtggttggcagacgcatagtgcgtatttatggtgccccactacgctcgtgatccatttctccatgcttgagtattttgggcccctggtcgctccggagcccttgatctgcttcggagccattggtcagctctggagccagtgacctgctccggagtcgttgatctgctccggagcttatgacaggctccggggtgactggtcagctccggagatggtgatgtgctccagagctctcggttggctccgaagcctttggtcagctttgacttccggggtatcgactgcctttggtcattctcccttggtggactgctcctagctgagtttccctactgacggaggccagctccatcatccggagccattcccccaacaaccacctcctgagttgttgttttgtgccccgccgcgtctgccagctctgcgacccctgccacgtccgcacccgtcctggccgcggttcgccccctcgccatagggcttattcttctgtggcgcgaagtttctctgccatttttcttgaagcacgcttccactcgacctgagtgtgcaacacctagccgtaggcgatcactccgccaacagcagctttcttcttgcacacgcgctcgtcatacgcctttagatagcccacagcctcttcgaacggtatttcgtcgatgtcgtagaattgctcgatgacggcaacaagactgatgaatttctccgggacgatgtcgaacaactttttcaccatatcgacgttgttgcacccagagcagaattccggacccccatcgtggtgatcctgccggcgtactggttcagcgtctcctcggcttccaccaccatactagtgatctcccttgagagtttgaaggcgcgcattgcgcacccagtccgccccgacgaaccttgtcttcaggcagtcccacacctccttcgccgtccacttctttgccacctgcatcaagagatcctccggcagcgactgaagaagatgcgtcttggccttcttgtccttcttcgggtcgactgccgccccagccgccggctcgatcgtctcctatacgccttgatcctccatcattgcttgaacccgtatcatccaactagtgtagtttgttgatgtgagttatcggtaaaggaaagcacttcatcgggtccgccgttgccggaaccaacgccatagtgccaaatccgccctcaacctgagaagctctcataccacttgttagttacgagtcaaccgatcgaacatcttgtgcacacactgcacatgtctggcatagcaacagacgagaaaactgaagaacacagaaaaggtattcagaacagagaaagcagagttttgctgagtttcagaacttcgcgcgagagaaagaatttgtggggaaattttctggtttctttcattcaaactgaattgtaaaacttacaaatggaaacttagctactgctacttatactccaataacaaaaaaaggaatccaatgccacgatccggaactcatggttccaacgccatgcaaaactcacgcccacttcgcacttctgacacagtcaccatgtctgcagctcgccgcatctcccgtgcatgcataacaaactttgatttattcgttccagccgttgcaaccggcatcgccgggatcaccttggggccatagctgaaataacagtcaacaaaattgcagcctggtgatgatagtcaagccaaatccataaatgagggattcaattgagccatagctcagactacaatgatcccaatgccttttatgcccaaagaacattcgcactagtaaacagaatatcatccatgactgcatattgtgggagtgggaccatatatggcttgacatagggttgatggattttctattttctcccaacaagattcggttgagttgtatttgaattcatatgcatatataaagccagatgcctagctaacattgtacgttagttaatttccaactaataattgattgtataccattaaagcatgtggccaataaaaaggcacaaaataagagcttggcacagcttgtctggatgcatgagctctgtcccaattttattatttttacaaataaatcgactgaatttctagttattttgaagaaaggttgcatagtgaaagaaagaaatgggactaaaccaaggccatgaagtttattgcactgtacgtattattgctttagctactaggggtttctctagacatgaagctcctaccgtcactccagaacgatacttcgggccacttaggacatcaaattccttaaactggtatttaagcttattccagtgagcaaccaacagatgtatgtgctgggtgcaagctgaacagcaatgtcatggggggacaaggacaacagtacacagatgtcatcaatcctatcccggcagccgacttgctgtggcgacacagaagtgtcgcaagcaaatacttgaattcaaattatcaggttcctttgtgcaaaacatcaaaaaagttcagttttaacaagattctaatccaaaggagtgaaattttaaacgggaaatggatgtttgaagctgggagtactggaaacgaaccggtttgcagggaaaaccgaccgaaataaatgagaaaccaatgatagttaagagtttattattcttccatgcaaatggggaaatgcatggagggaaaacggcaggggcgaagccaggatttatggttagaggtgtgtgggcagggcgaacaagttataagtcagagtaagcaataccgacgataaaacaaaacatcaagtgttctgccataaaaaagcttgaatttagctctttagttgtatcattggatatttgacagtttgagatttgagacatcatgctcaacagcgagatgcaatgggaggacggagagacatgtgaagccgaagcaatgaatacgagttgatttgcattgtctctttcttattgattaattttctatattatgtttattgataatggactaattaacatgctaatacactaattagtacaacagggaggggtcagatatggggggtgttggccccctccagcaccccctgtagctgcacctctgaaaacggtcgaatgttgtgaaattaaacttatggagtggtgaggaaaagccttaaaaaattacgcctattattatattcatgtatggaggataatcttatcctatgttactacaaagttacagtactctagtaaatcctaaaactgaacatgcaaatatactaccggcctgttcactttgatgtcattttcaaccttaccaagttttaataaagttgccaaaaaaagtggctacatttagtttgctgctaaattttagtaactatataagaaatcctgccaaaattttagcaagttaccaaaatttggtagtttttttttcatcaaagtgaacaggccctacattatcgggcctgttcactttgatgccattttcaaccttaccaaattttgataaagttaccaaaaaaatggctatattgccaaattttggtaaggtttttttttggcatcaaagtaaacaggcccatcatctataatgaattttctcttatataattgtacagttgatgtgccatgatttttggcagctctcgtatgatgttttataattaattgaaagatttctttaaaggagtatctactaacttggaagacaaacattccatgggataaataacttttcaaaatctttttgctaagttcagtaaaatttagaaagtttgccctacatactgtcctaccgagacccaacaataaaggctgagtttggcactccatgttcccaactcacctctttcttttttcgcatgcacgctttttaaactactaaacggtctattagttcttcacacacaatgtcccttggatcagagatgttgaactatccaggcagtgtatgggccccacaggcacccacggtctattaggtattcacacactatgtcactcaggtcaaagatattgaactatccagattctgataccaattataagatcgtaaaggacatttcccaccccaaaaggtagctaatgaggtgagaggctccctcacttatatattagatcccttaaccttctacaaccaacatgagagtattctacaaccatcatagcgggtgttgtaatgactcattagaaaactctggcattcaggtcttttcatattttctagctcaccagtcaccagcacgatcatcgagcagaggtggttcttcagtagccctagtactgaactactgattggcacgttgccaacttgtttttccttttgaaaggaacgttgtctccttgtcgccgtgagcctgatatgaaatcttccgaaggcagtgctaccgacaatccatatatacttcaattgagaaatgtcaattgtcagttgccatgccacgaagcgcatagtagagaaatgtagttggtgtggttgagcacaaaacttgacttactgatcatccaatatgtactaaatcaatatatatatgcgttagttcctgagatttcaactattacaaatcagaaagggttcaatataaactcttggcaccaagctgttaagcagccgaggaaccactttgtttgtggcataatttggcttatagttatttcatctgtgcaagccaaattattttaggatagatggtgcaattgtcagatgatttgcttgaaaatgaactcactttacatgtgcacgaattgctgtgcagagtttcaaggttgattaattatatcatgcaacatgctaggaggtgattatggaaatcaatgctttgtctcgagctgcatgcttggggagtcgccaaaatatattgacgccttttcgtgaccaacacaagatcacctaacgatttgcggtataatcaacagagtcgccaaaatcgatagatcaaaatcggctagcggaaccgatttcgagattaattcactttcgcggaatcacacgactaatttacaagcaaattagcaaagaggataaatatcgtacttacgtgacgacgaacgactagtttccgagcaaactagtaaatgataacctcctcgctttcgtggagaagcacggccgtttttcaacgcaaaacggcaaagatcaaccaaatcctagggttgctagaactcagccataaaaatgaaatagaaaagaactaaaaagaaaagaagatgaatagtagattgataaaattgttcgggctcctgtcaattggttgtcaccggcgcttatatataccggcaatcacaccaatttttggcatcctaactgatcccatgtagaaaacagaaagtcctatcgaaaaggaaacaaactaaataaaatccatctccgatacggcgccgctgcatgcgcgaaccatatccagctcttgcttgcaaccagtaaactactccattgtctagttacatcccgccctggttcagagagaatcttcaccaagcagcagctcgagacaaagcattgatttccataatcaccacctagcatgttgcatgatataattaatcaaccttgaaactctgcacagcaattcgtacacatgtaaagtgagttcattttcaagcaaatcatctgacaattgcaccatctatcctaaaataatttggtttgcacagatgaaataactataagccaaattatgccacaaacacacttctctctcttgttgtgaacattggtgtgtggcactgtgagatcatcgacagtcagactgtcagaggcatcagcagcatcaccaaggtgtgtttagttcacggtaaaattagaagtttggttgaaattgaaatgatgtgacgaaaaagttagaagtttgtctgtatgaaagttttgatatgatggaaaatttgaaagtttgaagattggaactaaactcggcccaaactacataatttctctactgtcacagggagatcgtcgacagtcagactgtcagacggtcattgagtacaaatttgtttatgaaactgatactgcaaactagcttgtacgtactattgcactaggtacagcatcgtgtgcaatccctgaaaacagcactcagctcgctggttaggtttgtctgcaatctagaccacactatcacgggacatgatgaacctcgtggaaaccgagcgatgctgtcgagatagagaccggacagtagttacagactgcaagaatcctgatgccttccatgcctcaagcacaatccgggaggaactgtcaaatgcatgcctgaactcattgtgttgacatgttgtttcataaaggaccggtcgatagtgtatttcatttttcaccaccaattcccttgtagtttatatagctagctagatggccaactaacatgatacatatttagttatttttgttattttacagtccttaattagaaattatcagaaggtggcatattttttaatatttacactaaattctttcttgcctatcactatctttgaaggatcgtaaaatttctcagttcatgccaactaatttttattgcgtaaagtccagttactttcctgttacagctaagttaccatattccacttcttgcactactggagaatgcctcttctctcctggttcacacccccctgtagtcccgggttacaaaccgggagaaggaatccaggactaaagatagcgatctttagtcccggtttaaatacctgggagtagagatgttatcaaccgggactaaaaatcatctacaaattaagagggaaaaaggaaaaaaaaagaaaaacatcggccggccggccctaatcgtgcgcctggccactggccgcaccctctgcgccgctgcctgtcgtcgagcgctgccgcccgccatgcccctccgcgccagccgccgcgcggccctccgtgctaccgccagccgcgcctccccacatccaccgctcgctccactgctgctcgagaggataggatagagagaggaatgggagagatagagagaggaaagggagatgataagaaaagagaggaggaggataacggaaaaggtggttgctagaggataagtccgagggaatatatattatgcgccgatttttagtcccggttggtggttccaatcgggaataaaaagagtagggggacggacaatttttcaaccggggctaaaaatgatttttagtaacagttggtgttcccaaccgagactaaagatcatagaatggctgtggggttttcaaccggggctaaagatgatttttagtcctggttctttctgaaaccgtaattattgtggttttcagccgatccagcaaagatcagttctccagtagtgttagtaataatggaaacaaaatgttaccgtaacattatattgtagtgagttacaagcacattgtcagcattttatttttgatgttatagttagcatatcatgtataaatgtttcgtgatattgggagcatttgtttaactcaagtatatactctaaagaaagtgtcataagaaagctttatgtgtgctgtctgttatgtgttcaaaatgcaaggcacttagtgctgccaacgatagtaaacctgaatattataagaatggttctgttagcatatctaattaaatgtgcaatgaacctttcgaattcatattttcaattgttttgaaaacatcaggtagcattctctttcagaaacaaaatattcagactgtattttgtgaatattattgatttaatgagcatgaacagttttttgatggtgtcaaaattaaattcagaaaaagggtgaaattgacatttttctagataatggaatgaaacatcccggcctttgctcatgagagatacagccaattattacaagaagtagcacactaaaaaggcacagtccaaaattaaacaagcacaccaaccaaaaataaaagaaatcctaacatgacaagaaaaacattattccagtctattggtgaatctccgtatccatggttggtaaaagttgcataaccgttgactcaaggttacgatatgcagcagacatgaattcttcatcttcctcacacttttggagttgggcccaccgtcgaagccaatatgttgccctgaaaattacatatgatgttatcataaactgtttctggtacatatgatgtcctccaagtccaattatgattaacagatgggttaagatgcagttagactaaaaataaaatctattaacataattgaacagaacatttttttccaacctcttgttgcaaaagactacagtgctaaagtgagatagcagagttgtactttttgcgcgtaggtttgtaaaatttaaaaatttatcaaattgcagaaaattaaagaaaatgttgaaatttgaatagctattgtttgctgaatctgaacaaaattttccaatctaaataaaaaactcaattttataacgcgcacacatccaacctagacctaccgttggacatgaaatttgagcctaaaattgcaaattaaccctgtactccgggcctccctgcaatggtacatagagcttggaccaagcagctttaaatataggcaaaatttatcacaggacactcaaaaaatatgtaattagctgtgaaacaccgtaaatacgtgaatttgttcaaggatactacaaaagggtgataatttgctgtaggaccacaggacacgttaaaatatattatcacacaattgaggagagataagccatacaaaatagcaattttgcctccccctctgcgtcacggctctgctctcttcaccgaagcttgccatctcctcccccaagcttgtttgtctcttcgtcagcaaggtaaaccgtaaacccctctgtaccccaacaacggaaacagagaaggacagcaaaaaaaaaaaaaaaaaaactaaaagaacacacgggaggaagctcaaagacccaattgtttatctgtgtcgacgaccacgaccgaacaagacgagcaagacatagccagaggagatgaggtaagtggtgggagcgagcagggcctgtttagtttgagaaaagaaaatttttggatgtcacatcggatgtttgaccggatatcgaaagggttttttggacacgaataaaaaaactaatttcataactcgtctggaaaccgcgagacgaatcttttgagactaattaagccgtcattagcacatgtgggttaccgtagcacttatggctaattatggactaattatgcttaaaagattcgtctcgcgattttctccctaactgtacaattagttttttcatttatctatatttaatacttaatgcatgtgtctaaagatttgatgtgatgtttttgggaaaaaattttgaggaagtaaatggggccaaaaactgagaagcgcatgcagatgaaaagagataagggaggagagacgcgacgtgaacggttagcgaaggaaagggggcaaggcaaagaaagacggcgagatatggccccaagcctgactccttccatgcctagaggcaacattgtcacaacttccataccgcccggcagccgtagctaaaggtcacagatgcatgctaagtttggggttgctaattaaataatctgtggttctgaataaatagggagaaattaaagtatctagctagctacttatagtgaacatgatggggtatatctgcactcgtatgaatgtacaattaatcatcgttcgacctgggaaaattttgcacaaaatggcaatatttttcgctgctttgatccagcatttcagaattgcaagatttaatataagggtttttttttactgtgattatctgtagacgaacacgtgagaagagaatgtgttgcatccttacatatgacaatttcgttttccacacaagcctttccttttgtgtttcgatgaagaaattaaggcaaagtaatctacattcataaggcaatatatgtataggtgtatgaggctgtatgttcagattaatgtcattacaaaccataccaatttttcggtaaagttagcaaaattgtgcacacatttaattttttgcaaaacattaaatatacatttagctttttgcaaaactttaaatacatagaaatcctgctaaaattttgataatattgctaacttatcaaaattttgacattgccaaaatttactaaggtttattttggctacaatctgaacagctcctatatttacaatctaattggcaccttgtctagtattatattcctagctatatatctcaatctgatttgaagagctgcatacaaacgccttgcctatatttgtaaaattatgcaaactctgcatagtttgtgatgacgacaataggtttggaaagtttaatttaacggatggttgtgtgctgcggctaaagtacatgctctccgatgcatgcagcgctactgtaatttttttacttgaattgagaaatgtaacgtacgtagctagcacattaattttcattccttcaaataatgtcaagaaaaaaaataagaaaggtttgtagccgtccagaaaactgatttactaatacatagagttgactattataaatctcgagtactccctacatttcataattttcatattataagtcgttttgacgttttccttattttaagtttaactaagtttataaaaagatacatcaacatttctaacctaaacaaaatatattatcaaaccatattaaatttctaattcggtgttgtagatatgcattaaatttttctataaacttgactaaacttaaaaaaaaattcactagaaaacagtcaaaaacaacttataatatactacctccatatgacgccgttgattttttatctaacatttgaccattcgtcttattaaaaaaattatgtaattattatttattttattgtgacttgattcgtcattaaatattctttaagcatgacataaatatttttatatttgtacaaaaaattttgaataaaacgaatggtcaaacgttgatcgaaaaatcaacggcgtcatacattaaaatacgggggagtaaaatgtaatagagggagaagatgtctcgtaatgagaatcaaaatggccctcaacacgtaaaaaacaagaaccgcatgttcgctgggcggcgtcactaaactagtgaattaacactggacattgccagatggcaccgggtagtggatgtcggccccagcctgtagataacatcgtgactactcgatggaaaatgttgatatgcgtgtgattttctagggctgccacacctaacagaaaacaagcgatgccaccgagctacatctgtcacggacagcagtgatcccgatctgccttccatggctgaagcacatggctaattctttgcgtggctagctagctgcattgtgtaattgtgtccaagtatggctcaacattgcgttgatggtttttcggttctcttttcaaaaagatatcgaacaaggctagatggcagaggagagtggtatatatatatatagcaggatcgctagctaattagcatgacacgcagttaatttcttatcggatgattaatgtttgtgtgctccctccgtttcatattataaaacgttctagcattgtccacatatatgtgtctagattcattaatatatatatatatatatatatatatatgaatgtggacaatgctagaacgaaatagagggagtataagttacagctactactctccgttcaaaaacaaacaacttatagagttttgcatttgtaaaagaaaaaaaatcaacttttgccacatccaaactactactgcatggtaaacaataaacacaaatattatagtagtacttccgaaaaaaaaatcaacaattaattacaatagtattgtacaagggcattttggtctgttgttattatattaccactaaatttgtattgagcttttttgagaaaaagagagtacaaaatatataattcttagttactatctctatcccatcttgtaactacttctgcacttttaagagacattaagtaataaggtgaaattaaacaagagacggttgtgatggttgaaatgagaatgtatatatgtaaataaaataaataagacatggttataattggttgagaaaagagaatcagtggagaaatagtatattatgggataaattttaaatactagaagtagctataatagaacagaggtaataccacacttttcttcttagtactagttgtaatgaagaaaacattattacactactatattatatatatactgagctgtatgaaccaatcaaccgttcttttcttaattagttcgatattcattgttatggaagcaatgccagaaatttgctctcctagtaatagctagcatatcatgtataaatatttcgtgataccagtagaatttgattgaaccaactattggccggaaagatatcttaagtaagctgtacgcgtgtgctgcatgtcttagtaattaaaatttgcagaatgcaagatcggcatagtaagttctgccaacgatcacacaactgaatatatcatatataaggctggttgtgatataagttatctaatgaaatatttaatgaagatttcaaatgcagcgctactgtcaacaagaatatttttactcgattttgagaatcaccaggtagcagttttgttctagaaacatgatattcagatattgtacattttttttgtatgcataatgagattttctgatcattcattgttatactaattcagcaaactgcattcttcccatgcttagtatctaataagttgtccctgaagtatgagcaacaactcttttcgattttgtagactgcatctgaataactaactacatgcttaacaaaattaagcataatttggatttgtacgatctcaagttataacaaaatcatcatcaactacttgcaccaagtagcagccaaatgaacttaccaaaagaaagtgagccgggcgaaattgtcatgtttatgaagttatgtttcgtggtacatgatgtttcccaaatacaattcaggtcaatcaaggattctgttttctccaggcgttgctaaagaaaaacaaattgccgcgtgccttgcacgatcactccaatggtagtagaaacgaaacaaattatgtttctgctggttgcaatgtagctcgaggagccaatttgaaatgctggaattgcaagtccagtggtagaagctaaacatatagatcccaatgtttcccatgtccatgaaagcagtgcctatattatgttgaatggtgatgctatttttctcttgcaatctttttccctacaagaatcggactactagaccgtgtttgcattttgtagtttgtacaaatatatttataaacaagttcttgctatatatatatagccatacatcaattgacacccttaaagtaaaattgttttctttctagtctcaactaacatggatatattgttgctatatataatatatggtatctctgcacggaggcaaataatttgctgcagcaaaagcctcataacttctctctgcttgtaattttaaagcatacatctacccaaaggagaaaatagtggatactcaattttaaaggttaacacaacaaaagggtaaatctttcggtactattgttcacagtacagatgattaccttgtcctagaaaatgaaatgcatcatcaattccgtacaatatatacaacaggttggtagataaattacaagtcgcgtaagctgtatgcaacacatccgcttattgcaaatatacacatatccacaaagttctatcacgcaaaacattaaaacaaagttatttttgttcatatagcagctctagacttcttcctcgtgaagaacatggtgatgcgggggaagaacgacagcttctttcttttcttcttattcgagagcaacgctgaatcattaggggtactcctcgcagacatatccagcagtggatgaaccgaggcgtaactatcatccttgcttgtgctcttggtgtcgctgctgcgttcaacgatgatcacaggggtgcttgatggattaagttgcgatttcaaagcttcgccagccttacgacgctgctcattctcttctctccattttctcaattcttgctccatggcaagcttgccttcagtggctctatcagctctctctgtggcagcaaccaatgcctgctttcgttgttccaaaaccttgtgtgtttcactcagtgttgataaggtacgagactcggactccttggctatcttggcctgtgcaattgcagaagccgtcctttcatggacaagttcttctgccttgctggatttcgcaatgagagattggtattcatccaggtcaactgtgactatctgagagccttgttcctcgatatccactggaagctcactgtcaaacggtctgagggcatcaattgccagcctcatggactctttcgtggcctccatctcctttagaactgcctggatcctgaattccatagtatcaagacaagattttgcatggtccatatcctccttggcctttcttagcttctcctgtgcctctcttgcgatggacttagactcatcagcttctttggctgtatcttccataatcttctgcaaaccaagcattccatttcgggattctttctccttggcctgaactgcttccagttcccggagtgctagctgaatctccacccttagagatgcagcagcgatggatgacgtcgcttccatctgcttcatggtagcaagtgccgttttctctttgatcaactctgtttttagcgatgccgcagcaacattcagagcacaaacttcatctctcaccttatctacgctcatcagacactcctccaactctcgtgtagatagaataacttcattgtgtaaagatctttgagtaatatttccttgtgcttctttatcaattggcttagcttccacatatccagctagctcatttttcagcttgagcaacaagccggttgatgtgtcaagtgttgatttcaattcttcaatagaagaaattttcttggcgagctgattgagctcctcttctgcttgcctcagatcactcttccatttaagggaatcctcatcacatgccaaggacgtgtctttactatgtttttcagcatcatggcatgtggaatgagccaattccaactccaccttcagtctgttaagttctacggtgagctcctcaaccttccttacagcaccttcagacattgaaacggctaactgagctttcccgatagaaatatcccgttcaatcaacaaggtctcgtaattctcctgcacttttccggactcatccttcactaacattaagttggccagcactgcgttgtactgttctttgattatattcaatttctccctgccaatgacaccaccatcactggtatctccttcccgcatctcatgtactattaactgaaataactccaaacccaaccttgcaattatctcctcctcttgtgccttttccaggtcatgttccaatccttcaattagcctctttgttttctcatactcattggacagaggcacctttgctgcctctacagcctccgcttgtcgtttactttctgaaatttccttcttcagcctatcaagttcaagtacgatttcattctcctgcatgtactaagattgttaatcttacatggagatcacatatgaaaagaagtaaattaagtggtaaagcaaggttttacaaaattaaagaaaaaaatacaaatgacagcataatttatagagctgtagctgagatgtttcatatgcaaataagggaagggaacaactctgagttacctgctctggctctgttatacgagttttccagttgacgctgccaccaaatcttgaggccgccaccttaactgattcaatgtgggttgttgtatcgacaaaggtgttatctgttctgaagttcttcccgctgtttgatctgttcaaaggtgcaggggccttctgccgcatgtctcttaagctcatttggcgctcattaaaatgatgcatcagatgtggcttcttttctttcacctttgctggtgtcgcagctgaagtctcatatgaagccttcacagaataggaacaaaaggcatcatccccagtgttatgcaggggtgtatcttgtagttggaccactgctttcagcctgtcggaggtctgtgaagttgagtgggtgttcttctctgaaggtggaattgtggtagaatcactgctgggttctgttgattcatcatcattctgagaggtcactgaaaaagcatgaggatcactggcagatacaagtccactgttgtctacttcagatggagttgcgcagacgctaataggagccttttgttctgttgatatttcttgcatattgcttttgttgccaactaagatttctggaagttcttcctgcattgctgcctcaaagttggctgtttctctgttctgaagattactgttctcacaatcagtacctgcagttagctcaggctctgcagaattttgcatgaatttcggtgccgacaaagatgcaattagaggggagtcgggctcttcaagattcttctctgccattcttcaaactcagttaaatattatctatggaagagaacattgaagaggaaagtagactgataagttgatcacagagcattataaaccaatattggagaaagagctgctttctcaaatggaataaaatcaaataatacatgatcgtacaaacacatgctaataacaaacttgtataaccatgaagggagatttttttttggttatttcatcaaaggatttatcttctgtgattttactatttgaagaacatttatggatggcatcaaataattcatggtaattacagcaaactaaacataaactatcagtgcataaacaacttgataattcaaaaaccaatggccatactgtttatttggccagagatacttccgggctcttattattactattttccgtgaacaattagaattcatttagagaaagttacaaatatattagtacactatggacttttaccagacaattttttttactgaattttaccagacaaaattaaaaacaccaatctttttaagaacataaaaacaccaatctgaaacatataaagaataaaagatcaggagagtgaggagagttttcaattttgacttttgagtaaattctgttgtaaaacaaagaaccatattcatgctgaaacagcagaaaacatcagaatgatcagtcgaggactcatgaaacgaaatatcaatatcagtctaaaactgaaatatgaccaatacaacagaatagtacagatatcatggcaatggataagaatgtaatcccaaatgtaaagacaaaaagcataagctgaagcttacccgagacacttgcacttctgattttggaggaagaagtggatttggcagtttttgcaggtattggatggacaagactggaggggttcaatgaattgaagcaggagagagccaggtgggagaggagaaaggaccaattgaataatcatagcagtagacttggacctgttctcccaattataaaattacttctttattttgagactataggcacaaaagctggatgcttaaggaaattgtgtgccaccatgagttacgaacaggctgggctgaataacattttagaaaaaaaaacactcaaataaatcaacatgatagttcaaaataatatatacatgtctctttctacctatatatataaaagaatggtgcttcatgtttctctggcgacaatttgttatggtctggcatttcattagtttaatttgcacagaacatcttttaaaatactacctgaatcagtttatcctttttcttcaagtctacaagaaggcaaatacaaaaacaattattacagatacatctatattctatactatcctgtacattttgaaatggagcagaagaatccaatggtgtgtcttgatttccatggtaacaatttacagtgtaagaaagtaaataggtaagttaccatatgtaaagttattgttgagcgctggatatatacgtgcttctatcctgcttcagttttataattaccagaaaatagaaaaacaatgtacagttggcctgtagagcatcatttaacaacaaatttatatcttgcctccaagttaaacaaaattccacaattgcagggatctttgtttcagctcaatggaagacctgactgacagctgaattctccacaggacttgttgcattttttttaattgataatcaaatttgacaggatttcattagctgtctgttgacctaggctgtcatttatcttcatccaaatcagaccgaaaaaatgtttaattttgtactgccagaaacagcaatcatcacagcaatgaaacaactgtagacatctcaccatttacataatcagaatctgaataaatttgaagcggttgcaccaagatggaaatggttccttcagttttaatgtttgcctgctagttcaaaagatttcgctgcagaaacatgaatgcattttgttttttgctttgacaacctaattcatctgttgatcctctgtagcaaagcatcgaccagacctgaaattgtactgcctaatgtatgagtatcggaccactaacaataacttctttcatcagggtcagtatgttcccccaattaagctaactcccacatcttttatcaatccttttgcttccatatctgaccgcagtcgctcgtaatcactccatttgcccgctgaagcatagatgttagagagcatgacataagatcttggatttccatggtcagattcagtgagtattttcccaacagattcaccaagtttagaatttccatgaaacctacaggctccaagcaatgactcaagcaaacttttggatggtctgaatggcatcgttgtaacaatatcatatgcttcatccaagtgtccagttcggcccaatagatctaccatgcatgcataatgctccattcttggtgtgatgccatgatctgcaagcattgatctgaataatgttcttccttgctcgagaaatccacttcgactgcaggctgataaaacactaacaaaagttatgtcatcaggcttgattcctgaagataccatcatcaagaaaaggtcaagggcagacccaccatccccatgcatactgtaggcattaatcattgtactccaagagacagaatctttttccatcgagatatcaaagatcttccttgcaaaagatatgcttccgcaccttgaatgcatatctataagagcattgagaacaataatggttccatcaaagcccttctgcagtgcaattgctgtgacacattctgccaaatctgcctttccaagctgtgaacatgctgagataagtgccaacatggttactgcatcagttttaacatttaggaactgtatttgcctgaagtaatcaaatgcaactccagcctgcttacattgcacacaagcagataggatggcattccacactatgttgtttctttcacctaccaaacaaaaaaggttgtggcaatattctaaattgttgaacctactatacatacaaatggctgatgtaaagagagatgtttctagcttggagaaatttcgaattgcatagctgtgaacagtcttcccttgcaactggctatgacagataggcaataaattcagcagcgtaataatatttggcttctgatcattcttgatcatatgatagaataaaggtaggatctcctcaaataagttgtttttgcggtatcctgtcatcagagcattgtaagagattgtgttcactgaagacaagctatcaaagagtttctcaccagcctgaataataccacagttggtgtacatagtaatgagggcatttgcaacagaaacatccaagttgcatccacttctaattgctaaagaatgaacagattctccaactgtaatatcctcaatggcagaaaggctgctgataagcgcaatcagcgttactagatcaaactgcatgtctgccaggcgcatttggcagaaaaatcttaaacaagccactgaatctccattttcagcaaaaccagatattatagtgttccaagatattaatgtccgcacttccattgtatgaaataacttacaacaaattgagagctgcccgcagtcggcatacatagcaaggagtgcattcatcacactctcattcaattcaagtctgcttctgacagcatatgcatgtatagacttcccgacatgtaaatcttctgtgtgtctgcatttcgagatcacactaatgacagttaatgcatctggatcaactccttcaatttgcatccttcgtactgaacccataaccatgttccatttgttattcacaaggtacccagaaattaaggagttccacaagagttgactcttctcggtaacactagagaaaagaaacacagctgaatccaagtccccaagcttcgaatacatggaaaccagagcactgacaacagaaacctgttctgcaagaccaaacttgataaccataccatgcacagactcaccatggtttataccaaagaaattactgcaacatggaaggatagataccactgtaaccagattaggcactagccctttgcaacgcatcaatctgaataccccaaatgctttctcccaagctccatgctgcatgcacactgagatcatggaattgcaagataccaaattatccaccaaactctgatgaaagagtgacaaggatgatgaaagatgaccgaacgcggcatacattgagatgaaagcaggtgtaagggactcgtcaccaaggacaccagatttcagtgcgaatgcgtgcaacggatcaccggcatcccttactcctaaaccactgaccatactgacaatgccaacaagagagctagcattgggcctgaaaccatcctgctgcatctgcttcaaagcctcagcagcttccagtaaacagccattcagagaatagccagaaatcatcgcgttccaggagatcaggtctctactcttcatgccatcaaagactctcctcgacagatcaacctgaccagacttagcatacatgtcaagcagcgcagtctgcactccgacatttccaccatgccctgtccgcacaacccggcagtgcacctccttccccagccggaggcaagaaacggcggcgcaagccctgatgaccggcgggaacgtgaagttgtcggacccaaaggcgcacacctcccggtagaggccaagaagctcccggtggaacccatggtccgagaagcaccggacggcaatgttcaggtcatacacctcggcgcggccgcggtagaacccggcgaacaccgccgccgccgaagcgggcttaccgaagaagaggtacctctcgacggcgcccgcgacgacggaggcgtcctcccggagcgcgcccgtgacggcgagccgcgcgtggagcttgctgaggcatttcgccgaacgggtggcgcgcaagagcctggagacagcgtcgactcgtggtggaatcgcgcttgatggagtcgaggaggcgtccggggattctgcgtgggttcgcttggatttggatggggaacttgagtttttgatgaatcttgagaatctgtggtggcgcgtggtcatgctacgaaaccatggaggaggagcaacttctcctcggttttgttggctttggtagcgactagcaactgccgagtgccgatctggctctagcgtaagggggaatttaattatttatctcttttagtttgacaattatctaaattaggacaatggtagactaatgcgcgggcatgtatatcataggctatatttgagaaacttaccaggaatatcaaccatacatgccaaacttcagaaatatgttttcttcataaatttatttgccgactttgcctaaataacttttgttaggtatctgttacctttatactagtatgtaatatttaatgcatccgtattcgtaattattattttcttcttcaccatttaaaatagaggtgaaaacatgtgtaacaaattaagaattaagttcaaattaaaagtaatgtgtttttttagttgaatgttttggggctcttttaataaatcttgaaaaactattattgttaataatgtaccatcaagctagccctccttttaattggttcatattaaggcaatttgttatatatttttacatatggataataaagatagaatagatacctgatttttcttgcgggagcatgtatgtacaacataaggaggggaggagttttgtttcctttgagatagatccaatagttggggtctttaattataaattttgtagtaaataatctagtgatgtacgtaaaatattagctatatgatttagcttatcacaaaatatattttctatacagaggaggggagcttgcataaggggggaagatgtagcgtacgtacgtgcacaatatgtaaacgatatggacagcccctatgggccttagggacttttacttttttgttagcaaatctaatggtacaaagtgggtccactgagtttaaagtaaaattaatggtcagatatgtttctttttctaagaattattagaaattcctctaatttattaaagcgccacgtggccacttaggatcgtttgtaggagtcacacgtgatagtttgattgtgtttgtagaaagtttaatgagcttttaataatatataatagataatagatagatgtccgatccattgtctctattttcttaagaaacctcgcgaaacttttactactgacaaatatatattatttgtaccatcgtcattgctttaattggttcatatgcatataatttgttatatgcttgcatgtgaattagtaaatatggaaaaaaatatatttaccctacacattgtttctctatgatacgtgagacccgtacagtagttaaaagaaaaagtatagtcaatctaaataatattaatactcatacatagtaaattatatcagaaaatctaaatggatttttaagttggttatgcatgcataggaacaatgaacatgctcgaggcctattaatattcatatataggagtattcacatttttaatggtctacgcatataaaatagacaaatttatctttatatctaaaagatatagaagccatagtaatattcatttgtttcttttacctttaagtccattaaatgataatgtatactatattttagaattcttatatacaaatcagccgatttaatttatctcgtcagttgagcatatttcaaaagacataattaattagatattgttgcatccaactaaaggtacaatattttttttataatttatgttattgatagttaaatctgttcttttcacttacatattatatatctaatttttctatgcatgcttgcaaagtaatgtatgatgatgcagtatatgttgtatgacaatttggatgacatttaaagtgtaggagtatggacctagataaattaaatttatgcataaatttattttcatagtttcatttataatttttattttaacaccatcgatctaatatagctatgcagttttatggaataacttaagatcacataatacatgtttattttatttttaatgtttcattgtgaccactagataaattattcttttatatgaaaattattcacggtgtatgtttcttaaatggtttaagatgataaaatatatgtacatttttttatatatcttattgttgtttgattggtatgtaaaagatacattggcctttctacattcaccttcctgggtagattattcgattctagctatattcatgtcatattaatcaatatatatcaatcaacaattacataatttatatgtgtagtaccctgataattttttgctaggatcgcaattaaaagaaagggtatatatccaagtgatgccctgataattcttttcttgggtttgctatatccaggtgacgtattataatttttgtacagaaacatatgataacatctaaataaataatagtttaaacaaattaaaaattggatattggatatatactcgagagttatgaatatctatctaattattattatttttatatatttggttgatagctaaaaaatagaagagtcatttatacaattatggtaatttattatgtccattgtagcttaggagtatttgtagaggtgtactgcaggtaaaagttctactcatattgacgtgaacaaacttcaaatatctgtttttttacttacggtagtttttaatcttacattgtacttatatataatttacgatgcacatttttccttctaattaaaccttcgcggcaagcagggggtagaaacggagggagtaccgacggtttctcggaggaaggcggcggtttgtgcgcacaggaggcgggggaccggggataatgcagggtgcgcgggctcacgttcataggcgcgcggggcgaggttggctggtgattggtgaagtgcgatcagaagcgaggatcgatggagtgtagcgtcgcctgaacagaacacccacgatcgcgagcgctgcagggtagaacagtcactcacatcatcatctacaattctgctttctttattagtgtttcgattagtatatgtgattacattgcatcacttgttcacctgagcttctattgtatcgcgggcagacgagcagtgcattgtcacatctaatttcctttccttctttcttttccgtgtgtaggtgtgatgtgcacacatgatgacacacatattatttgatttgtactatggttactaaaaacatgttctaattaaatatcattgtccagcatcgtttttatgttttctcgatgataatgacatttcgatatcgagctgataaaatagaagatagcaccaataattccatacataagaaatatcgctaagtacagttcaatagttcagcacgatgattagtgtaagtaatacttatttggatggggcactagctgggatttgattttcagattaaaccggtctgttttgttgtggagtttttgagattaatccaaataccggactggaatcacctgccaattctaatcacattgtctgctcattcctctcacgtacctgacactatgtttttcttctgggttaacctgatctgtcatctgtttttgtccccttcttgcacatgcagagaactgcagcaataagagtaagagctgatgatgcaggcaagctagctagctagaaaagacaagggagcttgcggaaaaataagaaaaaaaaaatgtcagatgagagaacaagcaacatatttgagcagagttttcattcagcatggcctgcaacttcagccatttggtgtagcagtgcgacacataatgagatgatagacgtgcagcacacataaggaaactaaattgacaagccaaatgtcacaattacgtttacatagatggacccatctgtccatataccagattatccggacgaaagccacacaccacacacagtgatacaaatccaaatcgatacacttgaatgcacacaaagcaatcagcatgcataatgcaggtgcgtgcggcgcacacacgcacatggtttattcgaagaagcaaacacacacacacacacactcaggcgacgatgagtaatatatcatcaaaggatataatggagacattaatttcctcgatcagctactgctgatcctccttcttcgagaaatagctggcacagccacgccgaagccatgattcatcgccatgttcctcttttagtgcttgatcctgacgctgcggcttcttaggtgtaagaacaggtttatttttatgtgctctgatgtctttcttcacctgcttagggacattgtcacagtccagatcaagctccttcaatttctcaacattgccaatgccagggagaggctccaactcagcgaaggacggccgtgaccagatgatcttctcaaggttaggagcagatcccttgttgaagatgattttttctagagaggcgctccggtgcactatacttgcaatattctactccaaatagaattaatctcggccgtttatcttaaaggatagattagtaatctgttaatataaattaagggtaattttggaatgggatgatttatctgtcttatcaggtacggcggaatcggtggctcgacgcaaagcatctcgcccccccccctcccccccacgcatcaccacgatttctgcttctcctcccggcaggcggcggcgctgcccccgaccccccgacgcaggcaccgcatcaccgcatctctcccgagcccccgacggatcactgcatcaccgcggtttccgctagtcctcccggcaggcggcggcgctggtcgcgccacccccgagcccccggcgcggtatttgttttcccatatattttctgtaattagtttttgccaaactgattgaaaggttctttagcggttgacaaggtattccgaggccttcttgcaggtatatgaacctcaactctattgttttgtaacaaaaacaaatcattcaattgcgactgtagtttatgatagagtatctgcagagttttccactgatactgaacaatggcactgcataaattgtttctttatgttatttcgaaagtttgcaagttatttcctcgttaatttcagtattttgaaatttgaatggctgggttatcagatcagtatctgatccgatgtgttcaatttgcattgttgtatttaagccgaaagagaccccctcgctgctggagcaaacaactgccggcaggaaggtgtggcaatatctggcttgctagatggaactggagattatgaaggtgacagggtgcttgttggagatgtgccgtgggggtgtgttttccgttctaccttgcattttcagagagtagtaaacaaagttactacatttattggatactgattacgcaaacagcaatgcttaaaaatgatatgcagtctattgccttaatttttttttcagttttattgattatcaaatgattatcaaactgagaaaaaataattctaccatcaaactagaccatgcctcctatttgataggagcaattttacggttcttaaggagataccatgaggtatcattttttttattgtaaatttggtacctcttggtatcactaaattttttttatctcatagtaccttctcaaaaggattgtagaattgcttatctgatagtctgaaactccaaatcatgtaggatgtttgtttcttcagttaagagactgagagtactgaagacatctgacctatcttcatctgttagtacctctttccaccttccttctattacatcaaactcacggtaatctccgcattattctgaaatttcttcatgccatataatccatgcagcttataacttctggacggaaaagaacagcagctgagtgttgaccttcttttttcgatctgctttaacactttcagtgacctgctgttcagaagaatatgatcctctgagcttgtatcatcgtctctttctctcaatgtcttgctgtgctgagcttgtaaccagccattagagaagacagtccgagattagggcaaaaggatagctccatccaagagacgaaggccattcagtgagacattgcacacaaataaccaataaggttattgtggctcacaaactttgtatcttttgtattaatggcattgtttttttattggattaatggcagcaatagctattatatatagtgtgcaaacaggaggatttttaaccttccccaatacttttttttttcggatcagctctgaaaatacatataggccacttgagcactgtattctcttatcaagccatgctataatttacagaagtttgtgagaagaactcaggagattttgcattttatgatcttgcaggactagttgtcatggacacccttttttaccttatccatcaataatattctcagtcgtgcaaatgccttcttttactttcctaaccttctgtatacatgcatagcagggtcaggttcttagtgagagatggtgaaacagaagggagctccagtagcatgttttggttcttgaagccttgcacatttctagtggagtaacagcaaaataaccagaagctttgaagaactgcactttatgtagtcaggatacattatttcattctattcgattccaatttggccaattcatatgatcgacatttttgtcaggaaataaacagcaagcaatgtatagttacttaccaaagtgatacatgtttgagagattctttccatatgttgggttcaagatatagaaaaatattgttcttatgtggcttaattattttgtatgagatactgccattttctttgaaaaaaccatggttttccggtcgatcgctcctaaaatatagcggaacggtttattttgtacaaataaaaaattaaatccgtgactaggtcaattttaaaaaaaccattgtttttttgtcgatcgcttctagaatatagcggaacggtttattttggacaaataaaaaattaagtccgcgactaggtcgattttaaaaaaccatagttttccggtcgatcgctcctacataatagcggaacggtttattttggacaaataaaaaactaagtcctcgaccgagacgattctaaaaaaccattgtttctggtcaattactcctagaatatagaggaacggtttattttggataaataaaaaattaagtccatgactgggttggtttttaaaaaacaattgtttccggtcgatcgctcttagaatatagcggaatggtttattttggacaaataaaaaattaagtctgtgaccgtctgaaccgggtcgatcttaaaaatccatggatttccggtcgatcgctcctagaatatggcggaatggtttattttggataaataaataattaagtccgcgacctggtcgattttaaaaaaccattgttttacagtcgatcgctcatagaatatagcggaacggtttattttgtacaaataaaaaattaagtccgcgaccatccggaccaggtcgattttaaaaaaccaaggttttccgatcgatcgctcctagaatatagcggaacaatttattttggacaaataaaatattaagtcagcgaccgggtcgattttaaaaaaccatggttttccggttgattactcctagaatatatcataacggtttcttttggacaaataaaaatttaagtacgcgaccgggttgattttagaaaaccatagttttctggtaaatcgctcatagaatatagcggaacactttattttggaaaaataaaaaattaagtccgaaaagggtagattttaaaaaaccatggttttgcggtcgatatctcctagaatatagctgaacggtttcttttggacaaataaaaaattaagtacgcgacccggtcgattttaaaaaccatggttttccggtcgatcgctcatagaatatagcggaacggtttattttagacaaataaaaaattaagtccgcgaccgggtcaatttttaaaaaccatggttttccggttgatcgctcatagaatatagcggaatggtttattttgaacaaataaaaaattaagtccgtgaccggaacaattttaaaaaaccatggttttctggtcgattgctcataaattatagcggaacggtttatttctcacaaataaaaaaataagtccgcgaccgtccggactgggtcgattttaaaaaaccattgttttccgatcgatcgctcctagaatatggcaaaacggtttattttgtacaaatacaaatcaagtccacgaccgtccggacgggtcgatttttaaaaagacacgcatggttgtccgacgtcggttgtaaattcttgtcggaatctatccccattttttatcccgtacttggagataatatatcccatattattctgctctattattctgttttgatcccctgttacttggagacaaggtttcttttttttttattactaccgatctcggcagattttttaatctattttctatttttcccgtatcgatccccaattttgccgctgttaatccgttctgatcccctgttatctctgttatcacgtacttggacggttagagagtgaacagttagataattacaaattacaataatacccctacgtgaattattatctttggacaaatatacccctctacatttctactcccataaaatttggtgggagtagaattagatctcaaacctacgattaaatacgatcaatggctcggattaatttctactacaagtagaaagcatcggagcgagactcttttttctatcttggagcaccggacagtaagaaggttgagctttggaaactcatctttcttgaaggtaagctcgctttcttcataagaattttcctagagcaccaggcagcaaatgttttgtttcttggctaggcgtccagcttcatctctgttcagtgaggtaacacagagaatcaccttttcaattttattagcattcttaagtagcgaaaggaggattgacttgtcacccttcacctcgatctccttcaattttgctcggctgccagacacagtaagctgggactcctttctagtcaacaacaagatgatcctctcaagctcaggaaccgctccattttcaatgatgatgtcgacaattttggagtcctcgaaaagaaaatacttgagttgctggaattctcccttcttgaatgtaatctttacctcagtatttatctgtggagctggtccttctgcagaaggtggaacttgtccatcagtacttgtgtgaggagctgctccatcttcagaaggtgaaacatgtacgtcattgtttttctgaggagcagccccatctttagaatgtgaaactggctcgttgctttcctgatgagctcctccatctccagacaacggaacacctccatggaaagaaaataatgatttgttgcctttcaactcgagctccttcaacattggaaggcgaccgaccccacgaagggacctaacattggtagaggacaagacgatcttctcaagctcaacagccgctccctcttcaaagatgatgtccgtcatgcacttcaggttatctccgtcgacaagtaagcatttgagatgttcaaacatttccttcttgaacgttaggctagggtcattgtatgcatcattgtcggagcctgacactgcgtaacttgggatggtcggcaagcatgtccagatttttctgtctcaacttggtgccactcaaagctaccttggtaagctcattgctaccttttgccaataatgagagaatccgtagatttgtggatccgttgatgcttacactctccagaagcttcggtggatgtatcaagcggttgtaaagttcatctgatagtatttttgaatcttttgaggtggtctcacttctggtgtcagttatagtgatcgaaatagattgaaggcactcattcaagtcaccaaccgcttgaaacaaattctggaggtgtctgtctttatctttgataaccacaccaagcttccttagctgccatagctttcttatgtctttcaattcatagccataccatgaagccgtgacattagacaacacctccatattttccattttctcaatcttggaaggaatccggacacaggaaaatgtcctattgtttgtgcccttgtcattaaagcttggacttggatcagtgtaaccagcgagcaagcgccttagctttaggagcaggacaagctttgtttccttctcaggaaccttagtttgccggatatccaatatctctaggtcatggaggttgttgatttcactgggtagatgggtgatatttgtcctcctcaggctcaaatacttgagaagtgctatgttgttgcagatggccttaaggtagctgcttttgtcaaaacattgacaaccttgcagatctagcaacttgagtagtgatagttgagatgaataattatgaagcttcttcacaaacatgtctatgctgtcagaggcacggagtcggagaccgctgaagacagagaagtggtgtgcccagtatgtgataagcgtgcatccaaaatgtgttgtttcttagcaatcttggtgataaacccatggataagatcaccaaccatgcagctcttgaactctcctttagcactaatatcacctggagaaacaagacaccggtcgatgagagcatcaaaacatcgctcggcatggcgaactgcggtaggccagtcttcctttgttattagtccttctgtaagccatcgtgctattaaggttgatcgcctaatgttggtgccttgagggaagattgctaagtatagcaagcaggtcttgtgttctctatgcagatctctgtaggagaacttgaatatcttcttggctttagtatccaacgagttttctgaaatctgtagtgtgtcacgtagcctgcctagttctttattgctcctgttgggattagcatacaaagcacgagcgaacatcttcatgcaaaattcatgtggatggcacttgtccaagatgtcgcggagaatctgggaattgttgttgtcatcttcattattcaccagttgttgtgtgagcttgagcacaatatcatggtagagtccaacaagagaatatgttataggctcacttggtgggtagcaaaactcactggccttctgggtgttctttgtggtcactatcacggcactgcccttggcgcacttcaacagttccaaagcattcatgatatcctcccacttaagttcatgtcttctgttttcatcctccacgataatgaataatgtgtctccatcttttaagtataaatttattctatctatcattcctttaattatcatctgctccttaattttgaggccaatttgtgtaatcttgttcttggcatcttggatggcactgacgacttgatcatggcctagtttttgttctctagggccatgggatttaatagcctgtatctcctcaaggatgtcttgtttgaccaggtggatgattcctttgatctgttccatgatttctttggtttgatcgtcgcccaatgtagcaggtgcagcacgtctgttagtactactactagtagcactagcagcagtagtagcttcctcgggattgctggtcaggaacacctcccacagaatagcttggtattgggtatcaagcagcttaattgttggggtcttcatatctccttccatgtgctgcttaaactctttggcagtgttgttgataagagtttgctcctccaatgctaacacatccttggcttgcttccatttttcctcacttagcaacgcaagatagagtacacataagggtttgtcagtttgaagaaccagggagcactcggtatctactgcttcttcagtcgtctttccaccgcctgttttttcttgggtctcggtgctcccacctctttgttcaactgtcttgcttccccctcccttttcctcactctttgtgaccccccctttttctccagctgtgtttcttcctcctcctgcgtttccttcaattgtcttgcttccaccatctgttccttcattcatgctgtcctcttcatatgtttgtcttgttttttcgctacctactgtttttacattgatcttactctccatatcttcaatcttgctaatgagatcttgaatccttctcggaacatgctcttcaaacttgttactgactattcttatcatctgttctctttgcctccaagctttgaaccgaacaatcccattatccacatagtttggatctttgttatccttctggattgtgcatacacgcaagatgtagcagaggacctcgttgggtcctagataatctgatgggtagtgtactgatgggaggttgatccgaaccgtgtgcttgaattgtacacccgctttggtcaaaccttcacttacaatgtcactagcggtgttgtccgatgccacaacagcgatggatcgtattgattccctcgactttctcacctccactcagctggctatcttgtccaggaagtagttatccagagtaggaggctccagatcttgttgctggtagtaagaagaagaagattccgccgccgctgccgccttttgctcaccagctctgtcctcatcatcgtcttgtgtggccggaagtgcggcaacagcttgagacgaggaggaagacgatgggcaccaccttccacgggatctccacgccatacctcatccgccgcttgtcgacgtcgctcgcccgctccttgagctcacacagtcgagcggccgctttgtgctgggcgaccttctccagcacgaaccagtaagcccaccagaagtagccacggaggccacccctggcgcggtggatcgccgggtcaccacgctggaggtagtggtcgatgcagttgctgtagtcgtgggcgaggtaccggacctgcttcatccacgtctgcacctgctcgtcgtgcgacccgtcgggaggcgccgtcctcgccaggtgctccagaaagctgttcatgctctccatctcctccttgatgaattccacgtcatgaccgacgcactgtagcagctaggcctcgttccggaggatgcccagcagcgagctcacggcgccagccgcgagctcagccattgcaacagcacagggcttgctgctgtgctgccgacgacgcgacctcgccgaacggtgtccacctagctaagcctcttagctttagttttagattagcaccttagcaagttgtactgggaccgagaatgaacgagctaggtgtctctccaatagtgcattggattattggtgtgtggttgattggataggtctcttctcttcaacaggcaaagcagctctagttcttcaagaaatacatgggaagagataatgcccggttttacgaactttctattcttctcttttcttctaggcaaggcaagcatatggttctattcattggaggattcttgaagtcattcataaggtcaggtgtcaggacgtactacatccaatgactttatcctttgctttgctttgcttgtctgttcttgcatcttttcaagcattggacaaaccacaaaatgaaggaaggtagtatgagatattagtccgactacagtgctctttaccggtagtattctacaactagtagaaacaatcttaaccgtctgtttataaggacgtattagtacttgggtaattcttccttaggggtaattttggttattgcttttttcctgtgtttcagtcttgtattcacgcatccttctagcgtcctctcgcattgccgttgccagctgatttcagtggcaacaccctgtcccgcgaccgccttgatcagtgggtgtttatccacacaagtcgctttcttttgttccctgccccatccgtggctcccttcattgccgtcatcactgtcgatgttcgattttcccatcggcaacctgattgttgtaccactcgccgccatcactttagttttacacaacctcctcatgtgcgaggtcgtgggagagtgctacgctcgggcacaggagcacagccgcgctggtgccggctccctagctctcttgcctgggcctggagtggaggtagaccacgagcacgccgccttcggatctcacccttcgtcatccagccgatccgctgtcgctgagaacgccacaccaaccacgtgactgatggcacgagcgcgccgcgttccactccttgattattgtgcatctgaggcgcaaatctaaaattttatccctccaagttttgtttttttctttactattatttcattagatgagggtattttttaccaggtctctacatccaactagatatatacaacatttttaaattgaaaggttagccactcaaataatccaatcatctatatattatatgtgatattcatattgtatagtatataaatgataattaattaaggtgttattatacggaaatatcacgcattgggaactcaggacccaatctgtgacaagtatatcctttcatgtttctattttcattaattaaggtggtagtataaataaatcttacccctggataaaaagtcataaatgatttagattaactagcattggtggcccgtgtagattgcgtggctagtatcgttaattttttttcttattaatagcttaaatattttcacatttgattattaaaatattttaaaatggcaacataattctaaagtatgtactaacttgaccaaaccaactaatgcaagatattcatattttatagtatatagatgatagttattaattatttttcagtttcaaattttagttatttctaaattatattggctcagtgaactggtgggtgttccgaggttgaagcgggtctgcattctctctgcaattctagagacttcgtgttttggtggagtcggagttgctgcatcggattcaaccgatgagctgggcaatgataacacccaacatcgggttcaacgcctgtgggtgccgtttccccttggaggtgttgctttcttgtctctctccttgggtgaaatcccagcccagttatgggcaggcattggcatcggccttgtcgttacttcccttcctggaggcctcgccttgatgttcttgctccttccttggtcgccatcgggttttcatagttgttttgccacaggtttttgttttttcttctgtgtagggtttcgccggcttccccttagtaaaccgtacagttgtatggtttttgggtctggttttatttataaatagggcaaactctcttcttcttaatatattggtagatctcctaccgttgttcagttaaaaaaaaattatgtatgcaatactctagactcctcttttaatattccttttttaaaaaaaaattgtattcccattatttatgaactttattcctatacgaactatagacttcgcttccaatatttctttttcttaatttcaagttttagttattcgtaaattgtatttctgcaaatctgtgaccacctggactcatgtacgtggtcatagtataacccaagtcccaacatgtctcgaattaattcacgttgttgatgtacggtaggatggttgtccgcatacgcatagctacattggcatactttttacatatgtaggttatgatttatctttatttcattagtagcagcagcagtagtagtagtttgagtgtttgaccgatgcatgcaatgtggtggtcagtcagcatatatattgatgtgggcgatggtatcacgatccttcgataagaggataagtcgattggatggagagacgttggtgatctgactacaactatccatggatgttgcgccttagcaatcgttacaccaactccagaggcggtcgttcgacggatgcatgatcagcctaaccacgaggatatttgttcctgcaagcaatcgagaactagcaagaacaagataaacaagcaactcattttgcgaatcaagatgatgtattgaatcaatagaagtatcacaagtggggttccataacaagcaaaccggcgatctaaccaatcacgggattatttggcaaagtagcgatgctagactttgatctaagctaaacccaattgtttttgcggcggctaaaggtataagaagagggggagaacgaccacatgggtgttggggtcatactctaaccctagagcgcgcccctaatgggcccaacttgatacacaatccattggacccaaatgaggtgacgcaacaccgtggatagaaaagtactcggtagtaaaacgataattgcgggcgctccaaaacatatatggacatgatgctggatccatttaaaagtagacttgataagcttttcatgaaatacttgtacgtccaaatcggagtttgcatgaagtcatggcggccatcaaaatttggtgcagtcttgtagtccaccccgcacgaatcctctccccattggattctctccagcattcctgagtaaaacaagagtgcacgcgtctccaggatataaacaagcggaatatgaactcaagaattcactcacctgatagttgagttaacgtgcacgagcgcaggaaataggatcatgaaattgtacttgtggagacgtggatgtatcgatggtgttgatgtcctcatcatatatatcgctggctgtcagttgaacaatcgaagcagcaacggcatgtcgaaaatgctcatactcggatgcccgatccacgcccaaaatattagacgcattttcccaaccacccgtgactccctctctccctctctctttctcgcaccttcccctctcccttcctccgcctcctcggcttcccacctgtccagcgcccacctccctttctcctcctacacctccgccaccaccaccaccaccgtcctcgccttctccgaggagtgggagaggaggtgcgggcactggcccgcgggttctcgccgtacgtggaggcgacggcgagattctcgcctcgtccgtccatcccgtcgttctggtgttctctaccgctgcggtgtgcgtgttgagggagatttgaggaggtggcgtgttggtttggcacgaatcggccgagtggagcgcctgccacgatgctgctattggtggctgcttcattgagtgtttcctgcttagcctgaaaccgttccagttcaagcctgaaccctgctcgcgcggcagctgcacaggtcgatcggcggccacgcgcacagcgtctcgaggaacattgacgccatttctctgggctgctgccatctactcctgcactgccgccatcggaggagagggaagaaggcagatctgactggtattttcgtgattttttttatgtttcagccaatgtaactcgatgtttctttgtgttgcatcaaattgttgtagtgggatttcttatggtctttaaattttttttttgatccttgtggatttgttgatgtttcaatatttgaaatttgatgtttcctgtttcagaacaaagtgttttagttcatgattcaaccgtgtttcatcatttaaatagtctgaaacatgtgttaagctagtggtgaaacaatttacttacaagtactgaaacaacgcccgatttgtaggtgcttctgcaccctgtacatggacatcaaaacccttcattttatgtattcgtatcggactcataatgcccccttctgtgcggatgtgtatgaatgaagaaacaaaaataacaaattttatctacactgtatggttactattcactatctgattttgttatttttctttctctagttatagatcaaatttagttctgtatgtttgtgtatagatcataacaaccaatgttacttaattttttcaataactatttgagtcgcatgtaaatgatgggtgccatggtacctaggtgtagaaaatccttatgcatatgggcacgcacgataagattgcgcacgcacgtgcaatggtagtgattttaaattcagaagaacggcacctaagcttacgttaatttactagctatatccaatggctgggaggacttggaggcagaactcaatcttcttcacagccgcgtctagaatctgcgcagctggctgcaacggaggacgacagccgccggcgccggaggacgtcgacgaggcttgcggcgacgacggggatggcatcctgctcaggtgataccactggctgtaccagacgacccagcgggcgtcccggagagcgtccctgaggtcatccctcagcagcggccacgacgtctccgcgtcccgcatcagccgcgacgccgcgtgcgggcgctccatgaggtcggccacctgctgcgcgagctgcgccacgcggagcacctcctccacgttgtgcgtcgcgtgccacgccccctgcacggtcacccgcgcgtcttccacaatccccctcacgacatggccccagtcgccaccactgtcagtgcttgcaccttgctgccatggcgccaccatggttggaggaggagcatgagcatctcggtaatctcggtggatgttgttgctggcgacgtggttgtagtggtggtattgctgtaggatcgaggagatccgatggtcgagggcgtggagctcgccgggcttcttgtccggcgatctcgatatgtcgtcgagggcacctcttaggcctgacagcaccccggccatcgccgggtccggcggtgtcgacggcgtcttcttatcctccaatagcttgagtatttttttggtattttcggcctgttccctcagcaggcgaaccttctccctctcgcgcttacctgtccccgccatccccttgatttgagctccaagcgcgacaacggccacccacagagccatcgtctccaccgctggcatcttgatcaatcttgcgggttcttggtgcacccgaactcgtatgcagcgtatagtccagtgttgatgtgggtcttcctgtaaatcagtggattaattaggtcatttgcaacaacaaattaattaacacatgcccggtgccccccactccatgtacgcacagtagccccctcacatgttctttcaacagcgaaatggattctactcccccaagagagaagatctccccacgtacacctttgttttctctctatttcaagataatttattgtgaaaaaaatcaatgtattgcatagcatgatatatatcactataccaaaaacataatcgacaaatataaatcaacagaaaaaagttcggctgtactgtttatatattagatttgtattattttcttatgtcctaatgtgtaagttgcgtttaaattttgattttgtggaaacgtatatttatattgttcaaagatattttaataaccatttaggtgacattttcttataaatatttgaatggtgtttaaataaatgaagaatattaccatatagtacgtcaggagactcgtccaactgtggggatgtggggcagctgccctagcagcgatagttcagccaggggagcaaatggaggtgaggagtggggcccacgaggttggttggtaggacacacgtgggcttctgtatattttatttgagatagtagtatggatatttatatatatgtatttttatccttcgagaatatccgcttgttgcttacataccattaaatagttattaaaaatttgacaactaaattcatatgaaatatatcactccacaaaaatacaaaaaccaaattcgacttctataagttacaacaaaaagaataaattaaactgaaaattgttatcctgaattcgtagttatatttgttacaacttgtaaaagttagaattttaacttgcatgtttattgagtaatatatttcatattaatctagctcgctaatttctttaggtttttattattatttaggtcacagatacgaaacgaggggatgccccatcgaaggatataaacactttcccatagtagtaggatatggaatttattttatccctcaaggtgatatatatcttctcgctgcttgcaactgcatgccatcgatctaaatagctagttatcaacaaattttaaaaaaattgacagctagataagaggctgaacgatggggccacttaaggtgtgcgaaatctgcactatatatatttgactcagggtggttattcatctggttcatcaaattcaaaagattttgataccatggcagtgtatataccggaccaaaggaaaaatttagggaggagtcggaagaggttaaagtggaaaatgcgagaataaaagctttttctggtagtgggacttacgaaaataaaagccctacagcgccgaaaatattttttctagtagtgggaccttttcctctagagtgcagattgagaaatgaaaacaagcctgcgatttgagatcattatatttttttccgatcctcaggatgtatatataaagaagtatatgtatcttataattaatatttgtcagaatatatataagctctaccctataagtgtatatacctcctaagacaatacctacaactctaaaaaccattacaaagggtcaagaacatatttaaaaagataaattttcagttctattccaacctgtaaaattaattttgatatttccctccatgaaaaagtatatatcaagtacgggacctcttcatgctccattcatgcatcttgcttgatttctccctatagctataagctagtttgtgtttaccggctctccaagaataatgacttaacgtttattactccattaccatccggctgatcaccactaccaaattatagtttgcacaggcggacaaattcttaatgatatataaaaagaataattcgcgagataaattagtgcatactagctagtaacagtaaataattaagacatttaccgatggatccaatgttcgctgaactcgtagctaagctagctgctccttcccaagctagggtatcagtatcttcagtagtgagtagctagtgagagctctattgccttttgccttcttgcaagcatatacaggcactgaaggcgcttagctatttataatcaggcaaatttagtctcctaacgcgctagctcctacgcttaattaagtggccagctcgtaatataatcacagtgacgacgcgtctgcaagagacgacccaaaactgagtaaagaccaatgattaggacaaaggaacgagtctccaactcttctctcccctcttctccaatgaatccaaaataaccagacgtggtcacagtactggtcccggggctcggggccggtctggtttggttgaccggctgggtcttagcttcgagtcaacctaaaaaaacaagagtaaagttcatcaccgatctctaaacttgtaccgctgtgttatcccggttcctaaactcgcaaatcgaccgttctgattctcaaacttattcaactgtgtcatcccgatccctaaacttgcagatcactcatttaggtcctccaacttattctgttatgccaccccggcccctaaacagaacggtctaaaaactttatatattaaaaaataattcataactttttcatgtaaactctaataagacaaactttatatcaaaattgtagccctcggcgtgacctacaactttattatgtttttaatgcctatgaaaaaatgcatatagtgtgctattggtaaaacaggagcaaaggcaaaacaaaaaaaaaagatacgatgaatcatgatatggtattgcgagctaattatgtttttaatgcctatgaaaaaaaacaatatttacatatgatgttttcttgcaggtgttcctaccaattatggcaaatcacactggtacgttatcgttattaatgcaagatattagaaaatttaaatcctggactccatgcaatgggggcaaattggtacaatgcaaaggaggatactccctccgttttaaaat

SEQ ID NO: 21411 - DNA, 1666 bp, Oryza sativa
ttcttctgatgatccaaatgcagaacaaccgttgactcgaatactgctcttatcgataatgctatcatctttggactgaccgtggcgtcgtccatgccgctgaatggatttcgcactagcatcttgttgatttcaaatgaaccctcatcctcaatgatttcgttcacctcgttctccaaaggtgcgtagagtggtatgtagaaggaatcgagcttttctttgtcaatgataccctacaaaagcgaattgattattcataaatatcctatcatgaggtaatatatatgtcaaaaacgaaaattcctttgtggttaaatagcaatatattgctactatagtaacccagcgcaaacaaatataagacaaagggcatgggaatctcagacgacttgatgtaacaaagtgaatgcaataaattaagcttccgttatcctaaaaaaaaaagagggcacggagaactaaacatgtgctcaccctggatgccatgtcattcaaagctactgctaccacctgccatgcctgattggatcttgagatagggttttccgagcaccggccatacaaggagataaccatccggcctcccgtcaccaattcttgagccctcaagctcaagaactgcgtgaaatccttcctgaactggcgagcataagcatccctaacagctgcacgcctcgacaccctaagatgttcaaccatgtcatacataggtattttaccctccttaagatcatctggagcctgttttttttttaattacaaaatgcacatcttaaggtccattatactcatcggtagaatgactttcatagaacaatttaatcaagaattatagttacctttgatagccagtgcaagctgttcgacgagcaaacaaaatgcagagagccacaggggaatagcctctcgtagaatgacccaggtatcattccgattccggtgatcacaaccggatcgtctagatcgccatggctgtgcttcagagtcgccaagcttttcgcgacggagttaaaatcgttgctgggcaaatcgttcaagaagacgcacacctctggcggtggctgttgctgctgtgcacagtgatggtggatagcatcgagagcagccgagacaagcgttagcgcgttcgggcctgaggagcagcccaagtctgcaatcgccatgctctttgggagaatggtgctcgtcggttcgcataagcctgtgatggcctcatttatcagcatcttcattctatcttgctctgttttctgcataaaatcaattgtttagataggtttgttgtgaagtttattactccctccgtcctaaaatataaacaattttatcatagtgacaagtcaaatatttataattttggctattgaaaaatataaaaaagatcaatcatgtaaaattgatgttactagtagatttataattaaacaaactatcacaatatgcaactctttttatttaaaacatcttatttttatagatatcgttggtcaaagtagaatctcgaataccgtgtcaaaatctaaaagtgcttatattttaggacgaatggaatatttaattatttgggaaaagtctgaattttatccttagagcaggtacaatagtaggctataagccagctataaccacatatcgagaaaaaaagataagagagagaagaaagcgg

SEQ ID NO: 21412 - DNA, 27333 bp, Oryza sativa
  unsure (1)..(27333): unsure at all n locations
cccttagacctgaaagcctgatatctttcacccttaactattaatatcggacgaattaccccccgtaactcaatccggggtggttttggtactacgtggcagtccgatcagtatttttttttgctaaaaaagggtgggaccatatgtcatattctctccctcaccccttacccctctctctttttgggaagtttattatttaattttgtacaatattaccaggttcatatactacttctgtcatgagatctattccaaactataattatattgtcttccaatttttgcagaaataaataataaagctagattaaaatttagtactatttccgtcataaaataagtgtagttatgggtttctgtgtccaatgtttgaccgcccgtcttatttaaaaaaaaatgattagtattttttgttgttattagatgataaaatatgaatagtactttatgtatgactatttttttaaaaaatattttataaaattttcaaataagacagttggtcaaatgttgcacagagaccgaccactaaagcactctccatggatacatatgatctatgaaaaagtccaaatacactctaaaatttggatgaagttatatttatcagacatatgagtcccaaaacatcctctaaaatttatgaactttataatacaagtgtgtcccaatataagtgcagttgtgggtttctacgtccaacgtttgaccgctcgtcttatttgaaaaaaaataaaaaaaaaggagtgttttgggactcttatgtgcctgataaattgtgtcaagatacacctctctctttcctctattttaatgtgggtgggtcctattatgattataaggggtgttttatattttgcgataattttctttagttgatatgattaatgtgtgccccacactttgtacccccatattaatgtgtgctcttacatataacgtacttatattgtcatgcttattattatgttgttattcctttgtaaatgagaacgagcaagtggataaaaataatgatttaaaaggatattttaaaacacacacacatatatgtacaatctatatgacacgtgatgatcagacttgttaacgtatatgtagctagattagataaaaaaacactttacaaaacaacctaggagattatatggatgaactattttaatattcaaggtgctagatgaacttccaatcaaaatttagagtgtatttggactgtttcatatgatttacatgaatccaagcttcaaactattgaaaatttgattagatgtgcttctacaaagagatgtttttgtgaccagaggaactgttgtacaatgggagtttacgacttgattcgtaatgttaagtaccaaagttaaggtatgttttttttagaaaaacatataatatcattgtggtatgaagttagttgaatataaacattataataaaattgtagagcccaactagcattttatagttcaccacttctttttatttaggatcgtaaatattatgatatattttagtggtaccaattttaaattttcttcgtaccttccaatagagatgagctttatgtgaatgttacagatctgaacgatgtttttgtttgaagttatctaacactactctagaaacaacgagtacccctatataagtttgtaggcagacataagtgatcgcggctaaaaaaaagtcgacctgcattttcgtatatgacttcttaacaggtcgaagtttcatattagaagagtcaaagtaaaagcatgtgtgttatgaagtaatcagtggggtaagctggctacacgtggacgaaaaagtcttcgggcctaattaatcatactggcatttcaactatgaaaataaatgtgcgatttgtgtctttcatatatatacactaatacataccctgcaggatcaagatacagatttttcttatttttctggagcgaaaaaaaaaatcaaacttcgggatagcaatagctgccagttttcgtgacttgaacggatggtccctgacagcgtcggctatacagccgcaataatacaattacagtatccctgcttgttatattaattagcgcaggttaaaaaccggccgttatagcaaagttttgaactggcacgttcggaacatatattctcggttgggctactccactagcacgatttccgaacagcacaaacggttgtgtttaatttttaaaaaataggaaaaactttttttaaaattcaaataaaatactttttttaacttttgttaagtttataaaagtgaaatataatactcaactaattatgtggtaatgatttttcacacgcagaaaagggtcaccaaccccacccatttcgaattgagacttagaggtagtatgaatttaaaaaaacgcatagaacttttgtgagatattacatgattacatcatgatagttcactagtgtaaatccatacaacatttgttgtgctttctcttcgaacatatatatatatacatatatatatatatatatgtatatatatatatgtgtatatatatatatatatatgtgtatatatatatatatatgtgtatatatatatatatgtatatatatatatgtatatatatatgtatatatatatatatgtatatatatatatgtatatatgtgtatatatatatgtagcaaacatgcacatcaatagttgagttaaatttaggtggacatattattttctataatttttattcatatatctatggctacaataagttatacaacagatagacattcatacacatatacactaaggcatgttcagattatagccaaaataaaccttaccaaattttggcaataccaaaattttagcaagttgataatattgctaaaattttgacaggatttcttctgtatttgtcaaaggttggcaacaaactaaacgtagacatatttttgataactataccaataaatgatatggttgaaaatggcatcaatctgaataacacctaatttggtacaagcagcatagattcctaattatattaaaataagaaaatgacaaactattcttgctactgttgttattataactattggtttccaaggacaatacaataaaataaacaaaccaaataagatcaatatttaagaaaaaaataacaggagaaatatgtgagaaaaagaacagaaatttagaatcacacgtagaaaaacgccagcagtttataaaaccactgtagctatcggttatacaatagcggagctaacgaggatatatcattagcaccaaaccagcacatataggggatcaggggtgcacctatttttcacacttcaattcctgcaacttatatgatttttcacacaatatacgcacatatatacagttgacaagaatcaaaactaggacctctctctcagaacaaagcctctttaatatcttactacctagcaaacacttgttttcttaattagtggcaaatactattatttagaaaatccggttgtatttcttggtgcacaggaaatttacaactgataaaaatacagaaacatccaagaagaccccaagtgtactcaccacatttggccagacttttgaagcaatttctgtcatatttcagttcttttagcataagaatcaactgtcgtcaacttaactatgtattaaataccggatttttcaaaactaaaaaagataagaacaggaaagcaggggcttcgattacttttcaattatccaattaataatcaaaacacgatcatttcatgcagatcagaaagaacttatacaattcaactaacatctcctcatcacagaaatatgtacaactgtacgtactgtgactcagaaatcagccaaagcctatcgccaacgaacatatatatatatatatatatatatatatatataacacacacacacatacctgaactgtggagttgcgagcatagctagtttcgccatgccctgcattcatatggagaatttctttggtggtcatggcgcagttgcactaatatctgaatgtgtttgctacgatatatgatgtctgagttacctatttatagccttacaagtcgcccattgtgtggtctttattgtcagctgacctttgatgtcagaaatataaaacaatgattttcttttactaccgacagatatatttgttgcttaaaattaatttgtacaataaactgtccaatcattcattaatatttctgacaaccatgcccatgtgcggctaagtttgtacaataatccgcttactaataatttgtacaaaataagcgtggacttgtgagcatattatgtaatcgctccgttttacaatataaattattccagtattttctacatttatattaatattaatgaatctggataggaaatgttagaatgacttgcattgtgaaatggatcctgttgtccgataaacttatttgtttttagccgtgtacatctacatgtgaataaatgtagaataaaagaggcgggattttgattctactaaaattctagctgagatggatatggatgctatcatatatatactcatattttatctagagagtctcttcatgcatggactggttggagtagcatgcatgctatttaactgaattgactctagctaagatggatcactgagagtgctcaactcagtaaatctatcgtatacaatttaactatgataggttagtgagtatatatgctgacatatgtcagttaatgttacttttgtggtgcagaaaaaatgccgaatatttgccctactgccgcgcgccccttaattgggtacgttctcaagtcgttgcccaccgtgtccgtacatgacagtagcacataaaactgtgctacagagaaataaatcagtaattaacacatgtttcgtcttcttatttaagtaaggtgaataaattaacgagtgcagacacaatcacatgcacatgttgtgttacaaaagcaactcataacacataatatatatatatatatatatatatatatatatatatatatatatatatatatatatatatatatatatatatatatatatatgagagttgaacaaatatgttacaggcaaattgcttaaccatgtgacaatcagactatatgtggtcttccgcattagtctttgatgtgaatttcgtgttcaattagctaaataccagtgtttttgctacggataaatgtaaattatatgcatgcacttgtctatataaataaacttgattttagagatgattagataatcacaaattaaaatgtagaatcactagctatcttctaataatatggaagtatacataaggagatgtcggtaagaaaaatataaaaatagagttcgtaggtggtagagtcagtttccaccaccactgccttattttagagggtaaattaggacccacatgagtcaatgacatatgggttaggatggcatatttcaaattttgcaaaattataatggcatggttccaattttccctattttgggtagaagagtatatatagatatagatattgatagattaatattatggctattttcgcaaagtgaaaatcatggggatagtgcgaaattatcaaaacatattattgatattgactaatgttttcctgtatattggagaatcgttgctgaaagtaaacaaaaatatatatttaaaaaaatagaaaagctgaaacagagaaaatatatgtggagcaccttttctatatttttatgtcaagatttatttcagatgatagaagttgcatgaaaaggttatgacctagagttatagcagattctttatataagcaattcagattggttcccattacacattcaaatcatccaacttttgcagtcattatattgatatatatcatcgaagttaggatgctcttgtaaccactcacattttacaacaagaaaaggtaacttcatgttggtttattaatattttgtttattatttagatatattggaacgtattaattataggtaaaacagctcttcgatccattgccacctagcaaccaacatatttattattttttaacctttttaatttttattttaaaaatctcatccagaactaattttcagattgcaatctttccgccatgccagtcagattggcatgacaaaacaatgttcacacatcgatttgattggcacaaaattatttgtcacgtcggcctagttagcatgatagcattggctgtgtttagattggcctaaagtttagaatttggttgaaattggagacgatgtgactgaaaagttatgtgtgtatgaaatgtttgatgtgatggaaagttgtaagtttggaaaaaaaactttagaactaaacacacctattgttttgttcactacgagtggtatgatagtgttgttttgtcacgtcatatgcgatggcagggctaaaattttcgaattttcgattaagtgtgggaggttaatttttaaaattaaaaaatagaaatgtttaaaaaatattaaagattccacactcttatatactacatcaattctctgtaaaaaaaaatgaattgattttttatgagatggagggagtagcgagtcagtagtcacaatatggacggtctatgtacaggccgagctggcgtgataagatcactcgtaattaattctacaaacccaactgtgcctacacacaacttaattctgaactacctcccgttccagaaagaaccgatttgtagaggggatcgtttgtagcagaaagaatcgatttctgcacgcaaaccttcactgagttgcaggtgagaaaatccacttgttcacgcaaaagcttctctcctctctcttttctctcgcctagtgtagtactctctatctcgttcaaaagatgctctctgccctgtcagaagagagtacttgtgcaaaaaagaaggtatttttattggagagatagaatgaatcgtgtacttgtatgagggtattatggtagtatttggtaatagctgctaaaaatgcatcgggcatcttgtcacttttggatagagggagtaatcatcacgacaattgtactagtccaaccaaaacggttgactcactcacagtaacgcagccatggtctaactgccgccgtccacaaatataaatactttttttcttttccaaataacggatgaagaaaaataaaatcattatatttttatagataatgataagaaaaataagataattatatctcttactaaagggaggattgagaagggagaaggttgttgggggtaagattgagtgaaaaaaatattatcaatacatattataaactaaaaattaattaaacatttttacgtaccactcctaagccatgtggcattgtaataaattttaaaaatataaaaatagtaaaaaactaaaacatctatctactgattttaattaaatggtgggttaaataaaaaaatcacctctccaaccaatatattagaactataataatcaagataaaatttactatagaacacctaaaaaagtgtaattagttgtgagacattgtaaaaaagtgaatttactcgagcacactttaaaagtatgttaatttgctataggatactggacgtattagaatataatatccaatcaattagtaagagagaatccgtataaaatgaccgttttgtccatacctttgtcttccttctagtcttcgcccgacactgcacgctgctattccaagatgagaacctcgtgtgcatgtatcacaacatggggcagggtgccttcagccgcccaacgtggttgacgatggacgcacggaagctcatcgatatgcccgtcgctggggtgagcctcggcgcgcgtgggtggcatgcggttcgtggcgtgcaagccggagagcggcgtggtcacgcgaatggaggcgctcgcgacggtcaacacaccatgcctatgtgcgtgacgacgagcggcgcgcggggtgtgcctcgattgcgcggagccgtgcgggtgcacggggcagctcgccgacgcatttgatttggtttggtgtttattcttcttttgagaagcatcggaagaacactataaaaagagagaagaagataatggcaaaattgtcatttgatgtggtttctctcttattaattgggtgaatattatactttaatgcgtccggtgtcttacagctaattacctcacttttagagtgttcttaggcaaattaacgtttctatgatgtcccacaataaattatatttttttctgtcatgtagtaaattttgctaataattagtgccgactaatcgctctcatctgaccttattacatacgtacctacctaaaaaaggcattaccgacctccctccttgttaggatctatttattttaaaccttttctagttttatctaaaaaaaataaactcccacaaaactatttccaaatatcaacctttcagccacactcagtacaatattgccacaacagtcttactagattatcatggtgtccgggctccaagctataaaacacacaaattctctcaaatttttaaaaattttcaaattatgagtatatatctaggtatatgaatttgattcatacaaatacctaacaacaaaacaactcaaactcaactttatttcacaattcattattacatatctaacgaattatatgtttggatgttatatacctagaatcaaaatctaacaaaaaaaaaagttcaaactcagttcaaacttgtttgaacttgttagtaaagaagttaatgttcatatctaaacatttaaaaaaatttcatactcattcaaattgggtatatactcaatttgaatcttggagcccatactccatgtagcactagttaatttacttttatatatatatatatatatatatatatatatatatatgtgtgtgtgtgtgtgtgtgtgtgtgtgtgaatgaatctagatgtatatgtgtgcttagattcatatatatatatataaatgtgagcaatgcaacaaactcttataacctgaaacggagggagtatatatatttggtcacgttctgactggcgtgacattgtggtttcgccatgccatcctgattggttagcgtggcagtattgttttatcacgtcggaagagatatcatggtcaaaaggttcggattttattattgaaaagattaaaaacaaataaaaacttctctcgacctgtgcttgtatataaatgtgcttacttaaaaaaacaaagccccataaaatatatcatgccaagtgctatcttatataataaaagtattcactaaatgtcaagaaaagaaaattaacaacatagattatataaaaatgcaaagttaattcattcatttttcaaggtaattccgctccaactctattgccatcttcctttagtgagaaaaataatcttaaatattaaaatctatcactattgaattttcacttaaaccgatatacccactatttatttacgtacatgcaacaacactaccaaccaccccaccccaccccaccccaccccccaaaaaaaagaaaagcctacttcctctcctctgtgttttatatggaagttgactagatgaaaataatagtatatatgtaaataaataatattatgaaaccatatatataatttctaatttgtttgaatagcaatatttgtcactgctaaaaagacaatttaagacgcatattaactttaactttatttagaaaatgtggcacacgggcatgatatattagaaaattacaatctagattactcttatcatatactcccgccgtgtgagaatgtaagaacctactcgatagaacatattctattactacgaatctagacagttcctatatctagattcgcaatgtactatgatgctttccatacaggttcttatatttatattctcagatggaaggagtattaatctacaaacacgcatagctaaattagattcataatacacgaaaaaaatatcaaatcaacgtaacatttaaattatatatccaatatatgcccactaattcatcaaatgaatcaagtaatagatacggatttttctttaccaattatttttggcgagacaatcaaaaaatctggtgacactttaacaataattctcaatgaggtgcaagctaccactaatggagaaaccatctttggtcggtcgacccaaatccacactagttccggttttccattaaaaaccgggacaaaaaacgatttttagtcccggtttataagaacaacaggactagatgatctttattcccggttggtgttgggactaaagatgaagatcatctttagtcccggttggttccatgtcagaccgtgtcaggcgcctaggatctttagtcccggtttgtaacaccaaccgggactaaagatctaactttagtcccgattggtgttactaaccggaaataaaaatcaacacgtagtatataatccctattacttatcctcttttctcttccacacaacaaactctctctctatctctttttttcctctctaactccctatctctttctcctgccttatctctttccttttcggattgagcgagagcgagagcgggccggccgggcggcagctggcacggcggcgcggagggccgcgcggcggcctacgcgagcggtgcggcggcgcgaagggccgcgcggcggagggccgtgcggcggtggccggccggcgcggagaggaggcggcagcgaccggccggcgcctctgtgggttttcttttttagaatttgtgatttattgcatgatcctgtgatgtatttgatttgtgtgtgatgtgaacttgtgatgtatttgcgatgaattttgtagaacttgtgatgtaatttgatttgtgtgtaattgcttttaggatttgtgatgtatttgatttgtgtgtataagtaactttaagatttgtgatgtggatttgggatgttactttgatttgggatttgggatttaattcggggacatacatacgacttgattcgggagaaaataaaaaagaaaaaaaagaagaaaaaagaaaaaaagaagaaaggggaccatctggactgttgttatcccctctttagtcccggttggtaacaccaacctggatagttggtgttaccaatcgggactaaatatcgatctttagtcccggttatatcacccaggactaaagataacgatcttttcccggattcgtagtcccggttggataaccgggactaaagggggttacgaaccggaaggaaagaaggtttctccaccagtgtaatgtaggtggcctttgggtgtgtctatatggatcctgagagcaaggataatggtagagctcagttactactattaccctatcttaaagccaacacatatatacatacgtacatacgtacgtacatacatacacacacataattaaatatatatataatagataagctataaggttagcttcaatttttttacataaaaaaagggtgggtttcaatttttcttctcctcacactttttctcacttatacatttgattaatgtatttgtcttgagctagctcttacatgagagagctaacactcttaattttttcttacctctcagctccacataaccttacagtaaactttatagctcattactatctttgcttgagtgagtgtggaaatgctgatctcgaggagcatggtgatggtgaagccggcaggcatgcgcttaatttgctggtcggtaggggcacatcaacgtccatatatgctggagcccgggcttcatggcatcggaaaaagtgaggcaagccaatgctgagaccttgtttggtgtatctatgaggagcttgagcaggtatacgagggcagggagtgtgtcttgcacaaaccaaggcttcatgacattgtagaaaagaaaaggcctgggcaattgctgtcggattttactgggtgcaggatcatacttaatctcaatatggtgttatcctattaggtgaaaatagtggtatttccataatatttttttatagatttacacagaagtgagagaacgaagctttccatgtatggagtggatatgattttttttatcgtatacttaattggtacctagttcacttttggtgatatagatgcaatttcaccacaacaataataagtaccacttccatcccatgatataaggtgccctgattctttaaaaaagtaaatattgtatatattttttactaactgttaaactgatgatgtatacattgatgacttattattagattcgttttcgaaactaattttagaacatgttacattcatatttgttgctaatatattataaaagaaatgcatggtcaaaaaagtaaagcgttggaaaaactttatattttaagacgagtggagtagtggtggtcagtggtggtttatgattgtatctcatagaattaaatttgtaaatatatattttttttcaatattttgcgtttatatacatatatgcaaaacatttgcacagatatatctccttcgtacgatgtgaacgcgggacggaggtggtgccgcgcttccattatgcgggaccggtggtcgcgcagcacggccgtgcggcaccgctcgctcccctagccggggagagcggcagcgtggtagaggcagctgcccacggtcgaggcgaccgcctccgcggcgggcgggactggatcggtcgcgtgggaccgtgccggtcgagcaacacgtcccgtcccgtcccgcgtgtgcgtgtgtcgcggttgacgtgccatgcaagcatcacctatcgagcacgcatgtaggcagttgatccagtcaaatcccacaatacataggcactagattaggggtgtgttcggcacctccattttccaacccaatctctctcattttccactcagcacacttttcaaacggctaaacggtgtgttttttaaaaaaagtttctgtgaaagttgcttaaaaaattcaaattaatctatttttttaaaaaattagctcatgcttaattaatcacgcgctaatggactgctccgtttccgcgcattcctagttgggaacctataccagcgaacacaccctaggcccccctnnntcccaccctaaaatttttcaccatgttacatcaaacgtttgaacaccttcataaagtattaaatataagctaaaaaaacaactaattgcacagattgtgactaatttgcgagacaaatcttttaaatctaattactccatgatttaataatgtggtactatagtaaatatttgctaatgacggattaattaggcttaataaatcccctaagctagtgcctatgtattgtggggtttgactggatcaactgcctgcatgcgaccatgcgtgcttgacaggtgatgcttgcatggcgcgcgtcgaccgcgacacgcgcacgcgggggacgggacgggacgggacagtgctgcgcgccatggtgccgcgcgaccggatcggtccagcgcatcggcgccgtgcgaccgcctcagcaccgcgtgcagccgtcctccaccacgctgccgctctcccgggctgcgggagcgagcagtgccgcgacagccggtcccgcagaatggaagcgcgacaacgcctcggtcccgcgttcccattatacggaggaggtatatttgtgcaaatgttttacatacatgtatataaacgcaaaatattgaaaaacaatgtatattttcaaatttaattcgtatctcatatgcattcttgttatttgatagataaatatatgtcgggagtagacactactacaaaacattaaatagataccaacactatatagatgtcggtcactataggtgttggatgtgataaaaccagcacctatagtgcctttcctacccatgcgcccgccagcccgccaaaatgcttaggaactagcatctttatctcttaataggtgccttcttttttttcaaaaaaggcagccttttgcccctgtcagagatagatgccggttttaatttaaatccgacatcttttagttggcgtgggacccacccaataaccagcatctctatgctaaaaggaatagctgccggtttttttaaaaacaacacctacaatatattatatattatagctaccggtttttttaaaaaactgacacctcgtaaaaccgagctgagccgcatgctctatctcgcacggttttttttaagccgttcttatcctcccataccaccgacgcgctctctctctcgcgcaccgatgctctctcttccttctctttcttctcctcttctcgtcctcctcatctcttgcatgcgtcggcggtggcccagcagtggaggcggcagcggcgcctcccctctgccagatccgctgtaatgccccgattttcgttcgggattaaaaatcaattaataatgcatttctagaaattaaattaaaagttaaatcaatttaatcaagtgaaattatagaggaagttaaaatttcctttaaaaaaatcattggccgggaatattttgcaatattctttgtgccctaaaatactctccggatttttccgcaaattttcggagctcaagaaataattttgaagtcacagagatcatttaaccaattaaataaaaaggaaacaaatttaattctccttccttccccttcctccctttcgggctcggcccaaattcctccccctccttcctctcccgcggcccgcgcgcctcctccctctcttgggccggctcccttctcccttggcccgctcgcaaaagtctgttttgcgtccctccttctctcccttcgccgacaggtgggaccggcggtcccacccgtcagctcctcctcctatctcttgccggccaaccccaaccgccattgctgcccatgtcgccgcaaaatccggcgccctcccacacccgagctcgcatccaacgacgtgggcacaaaaaccggcgccggccaagccgccaccaccccacatcggcccccacttccccggcggttgccgccccgactccgcctctcctgggctcggtccggcctcccctcccctataaaaacattccccgcacctccctctcccttttcccctctctcctgagccctcccgtgcacgaaaaccaccccgccaccgtcgcacctcccgccgccgctcgccgacgaccctccagccggtcgccacagccgctcccaccaccgccgttccgcgcgaccgccaccagcggcttcgccgcgtcgtgccgcaccccggcatccgctccatttcccctccccgcctccgaagcaccgtcgccacgcgcactacctccttccaccgccgccgccgactccagccaccgcttggcgccgctcctagccaccccaagtcgcgctgtcgccgccgctcgcttcgcagcgccgaggagcacctcggccgccgcttttcatggccgggattccaccggaacacggttcccctcgcgccggtgcgcatccgccgcctgttctcacctccgaccagcgattcatgccgctgggagccctctctccccctcctaacctctcccccatcctccccaggtccttctagccgccgtccgccggttcccgttcgcggaacgccgtcgggccgccgttccgccttcgtcccagggagcgccgacgccgagctcccccgcctttccccgcccctcgtcgccgccctcggtgagcactcctcctcccttccctctttctccccttggccggccgcctcccgtgctttcgcacgccgtgccgccgccaccggtggccgcccagcccgtgtgccgccgtcgctttggtcccggccgccgccgccgccagccttgtgtgcgcgctggctaggccgcgccgcccggccatccccaaccgtccgatcggccatggccgatctgggccgtccaacccgtggaccggcggtggaccgtccttgtggtcccggtccatgttggaccgccacctcgtctcgctgacgtgtggggcccgcctgtcggcgccggcgccccttgctgacgtcagcgaatgccttttcctttgagataataattgataattgcgcaataaatcattcataattatagaaatccatttaaatggctcaatacttctaaaattcatatctaattcattcgaactccgaattgggccattcaaattgcaaaattcatctaaaattgagttatacatgtttgtttactttttatgtactgtttctttggttttgttagggtttttcctcattttgcgtgccagcgtgtagaatccgtcgtttcggaagatcgcggtcgcgaggaaaagagtttagaaaatccaagtgaagaagcaaggcaagtcacacattccccttgagcatgttgttcccaatttacaaatgttttaccgtttgcaaataaatatgcatgttttggtaattacatgggatcagggtttacctatctgctcgcttgtgccatgtttacttgatatctgtcctttgtcaaccatgggtaataaatcgcctagcttgtgttactttgatgacctagctagaactatatgcttagccatgcttaattaccactagctcagtcgatgggataattgcagtattagacattctagtatcttgttgagctgcgtgcttgagacatctggccatatttcatggtcgtaattatctaactaaaatgcgactgaatggtgggctgtgggtgcatggttttgctggtcgcacccatggcaattaaggaccggttcacgggaaaccctggaagacttacagtgcttaccacaaacgggagtgggtaactgcttgatctgaagtatagctcgaccctttcctaggcaccggtggcgagggtgggcgtgatggagttgggtcggccggggtgtccggttgtccagctgccggattcaccgcggcgcaagaggggaccgcccactgccatttgaggggtggggatgaaaccttagcgtggtgtagatggttaggggagggttatgcgaagggtctcgtcacaatcactcgacatggtgacgtgtgcatcatgggcacatgatgacgcggtgacatgtcggtgggttgtgtcttgtgggtacagttgtgcacctctggccagagtaaaactattcgaatagccgtgcccgcggttatgggcgatcgaccagattcaccgtgattagtcttacccctaataaatcgactcaatgtactgtagttcaggtgggttggttgggcctgttcaacgtggtgtagcgttgatcagtggagatttaatattaccttaattactcaactgttttactgttttgctcaataaaatgatttacaaccgcatttatgcaaatagccacaaaccgtccttgtatccccttacacgtctgcatcgttggtgtggcttgctgagtacggtggttgtacttagccttgctattattcctccttttcagaagtgtagtgcttctgagctgaagacgaagttggaagaccaaggctcagaccccagttgagttttgcctgtggagtggagctgaagccccgctaggatcgcctttttcgctgctgctgcttttgtttcggtgtgaggactaagtgcctcttctgtaagtattttacgctttatttacgtttggaactgtatattacttgtcgttttgtgtaccgtggctggtcctggacatggatttaatacacaaaatagtctgaaaatttgggctaaatttctgggcgtgacatccgctaggcaggggaggtggcagaggtggcggcgcgaggtacggcggtgccctccgctagatctggccggaggcagaggtgggcagtggcgggaggtgtggcggcgtctcccctctgccagatccgatcgggaggggaggtgccggcttggcgcatggtgcagcggcagcaggaggcaggtcgtggtgggagggaaggccgcggtggtggcttcggacggaggaggcggcgacaaaagaatcgggtaacatgttcttcttttttctcatgtgttcttgttcttgttcatgcaaaagaatcgagttgaaggaattgagattttgttcttgttcttgttcttgttcttgtttaggtgaattgggtgtgttcttgttcatgtgaattggtcggggtgaaagggagctgctcggctcgatgcattagctcggatgcattgagcctgctttttttttattcgtgaaaccttaaagatgctggttctaaaacataaaaaaccgacatctttacccatatagatgcttgttctaaaatcggcaccgatgaccaaagttatccgtatcgcctccatggtgctgtttggacaaataggcacctaagggggttcccaaacggcaccgattagctatcctagtgagagtgagtatttcatatatagatccaagggcatgacctattttatagcacaactcttttttttcaacgattatagtgaggtaattagtaatgaaaatttatgaactactttacagtctatatcattatactccctccgtttaatattataagtcgtttgttttttctcctcgtcaaacttcttttaagtttgaacaaatttttggaaaaatatagttgtattttcaacgcaaaacaaattattatcaaaatatattcaatgttagattaatgaaactaattcgatattttagatgttatttttttatatacttgttgaaacttaataaagtttgattatgacttataatatgaaatggagggtgtacaaaataaaaagatgaccgttcattcgtgtgaggtttcttcctactagttaattaaatgatggaagcaggttgggtgatataaatgtgcagttctctataattgaaacaaattgcaaatgcctcatatattaatggagcgaggaaattaatatatctttgtcgtcggaatgaaaagaatattggaaaattggtttgacatttaatggtctcatacaactagtgaagagaaccagtacaaacaaccaatctggaccagctgctgtgccatcgtatgcactgtctaaatgacttttcacacagcaaaagccatcaatatgtgtaccctcttccaaccggcgacgattagttggttcctattgttttctatgcacagtagacatattcatgttcgtcgcttgtgttgtgtgttccttcacggctgctccctttcatagacactattgctatgtagagatggggagaaatgaccatcacaatgaacacggtcaccgttaatcggtgatacgtcgctgtcaaggacgacggtcggaaggcacatggaatacctagctgttgttaactaatccctcgatctaaaaatatttgtcgccgttgacttttttttaaatgtttgaccgtttattttatttaaaaaatttaagtaattattaattcttttcctatcatttgattcattgttaaatatacttttatgtatatttaaaaatatatatgttttaaatatatattaaaaatatatatttttaatatatatttttaaaaatttttaaaaacggtcaaacatgcttaaaaatatcaacggcgtcaaacatctagagaaaaaggattacttattatatatgtggcgagaaactaaattgcaattcacactactacacaaatatatatgttttctgcatgaacacccctagtgacgctgatcctggctgtgcccgacgggtgttggtgtcgccgctgctggctccaccggcggcttggcctccagtgcagcgacctgagcctatggatgcaagcgcggcgggcaagtggatttttttagcaatagtgttttttatctcacttctaatttattttttcttctaaattatataatatcatgtgagaaataaactagtaagcgggtttttgtgcgggctgagccacgatacccccgacctcctcatggagcttctttatcccagcatccaagaatccaactttacatccccttgagcgaacccaggatgttgttgatgttgctggtgagatcaagcacccgttgattcgagctcaccgtctcttcctccaccgccaccattcttttttgagattcggcgccgatttaattattgcatgccattttctacaggatccgaactctctaatactaaattgtcacgaactcgcaacaatcacacggcgtcacaccaacgtgagcttgagatcacaagggattttggggatttggggaagaataacgttgtcacgagacacgcgcacacacagatcatgaaggaggtagttagttatgagttctcttcatttatgcctccctcactgataggtgggtccttcaatacaggcctgcacgccacatacgcaaatgcaaccgccagtccagcacgggactcttaccacatccacgtacacggcccacaacaggcccacacaaacacacaatgcagcccagcggcctagaacgctaatatcgctccatatctctacgactcatgatccgagctctttgttgttatcaactactcggccgccagtgcatggctgtcccccactcgagagagggatagatttggttggctctacgagggagtagtctgccgaggtttgcagaggtttttttttttttaagtaaagtatacgggcggtccttaaatttgtaggggtatatcatctaggtccataaactctcaaaatgtatatccaagtctcagaacttgtcatagtgtgtcatctaggtcccaaattgtcataaccccttcgggatcctacgtggcgttgatgtggcataccacatggacatgacgtggcatcattttgactgacaaatgggacccatttaaagtttttccattttctttttttcttctctttttttcctttcttctcctttatctgtaacccaagcagaagaatagaaaaaaagaatgagaagaaaaaaagaaacaaagaaaaaaaaaggacacgtcacatccatatggcatgccgtatcagcgccacctaggatcctagagggaatgtgtcgatttgggacctagatgatacactttgacaagttttaggacctggatatgcattttaagagtttagggacctatatgacacaaccctacaagtttaaggaccgccaatgcacctaactgttttttttttacctgatggtccacttattttgcttcgcggtagtggactggccattctgatgcttcagtggttcattttggtgccttcaattggaaaagaataaatgcttctaagttaggggtgtttagatctatgtgtgtaaagttttggcgtgtcacatcagatattatataggacgtctgttgaaattataagcacataatgatttaatttattcaataaataaatcatgacattgcagatgtaaactagactgaacgcatcattatatctacacatgtaaactaagcagtaaaacatgaatagatcaaatatgcgcaacacacgcgagcgaagaggaaggcgagccgtcgcggacgaacagggagcagtcgcgtgaagcgcttcccaaaaaccttattgccgctttctcccggtgcagtacgtagaaggcagaggttccggagacctgctttcccgatcgccggtgcacgccggcgagcgggatgaagtagtctacgagcgacggcgcagtatagtgtaggaggcaaaccctagattgatttcgtgcgtgttgcgtgaaggcggcggctcggtttatatagagataggtcgcctgatcagggcgcccgcgtaaaccgaaccggataagtcgcgcgtaaccaatctggactccacgccgttttcacgcaccggatttttcgaaatgtttccaaaacaaaacaaatccgaatttcccgtagcaaaaaaaaaactgcaaaaggaagctgcatctgcgcaagggtgaggagccaattttgcggaccattcgacgcgtacgtcgtgcacgcgcgctgcctgccctgcactgccaggccaggcgagcgagcgcgcgtgtttcccctcttctctccaccacgcatgtttcaaatggctaggagggcatcctcccttttaagaggtccccctctcctagaataagcaaggtggtactaaactccacatgcatgccatcccatgaggtgggcttttgtgattttccaaagaattaatcttcgaatgcaccttagcccatctattaattccaacaatcccccacaaaatcttaaaatcccactgagatttgccttttccaatgtactgtttatataccagcggttcgatggagtccgattaaggttgaacatccacctagaacgctaagctacacttactcacaacttgaacaatggactacgccttgaattgcaagtcttgcgcaagcaagtttcactcagagtcttatctggtactagaccctccgtagactacccctcgggtggagcgtataagtcatactcctaggtcttagtaagcttcttaaaagattcacccaaaatctccatagactgtgaccaacagtcaagcttacaaaggtgagttctttcaagaatactctgcaggacaacatcttcgctaattaaagccaacagaactcattaaggcatagccaacctgccttgcagctcacaagagtacatgcatcttcacttagagagggtatagattggtactctcctctagtttactaatagtgtgttcttcccaagttctaattcacgggatctccgatcacatagactgggttaccaccatagtataactcacatgggtctcaaacccatctccttcgatgcattgtctatcacatttcgtgatagtcccttcgtgaagggatctgccaggtttctagctgtttggatgtaatccaacgttataactccggagtttctcaatttcctgacagacttcaatcgtcttttcacatgtctagacgatttcatattatccttagaactattcactttgacaattaccgtttgattgtcacaattcataaggatagccggcaccggtttttctacaataggcagatccattaatagatcacgtagccattctgcctcaacagtagcagtatccagtgctgtcagttctgcttccatggttgacctcgtcaaaatggtctgtttgcaagacctccatgaaacagcaccaccacccagtgtgaagacatatccactagtggctttgatctcatccacgtcagagatctagttagaatcactataaccctccagtaccgcaggatacccagtatagtgaagccccgattccatagtacctttcagataacacattactcgctcaagcgcacgccagtgatcatcttccggattagtggtaaaccgactcaacttgctcacagcaaaggagatatcaggcctagttgcactagccaggtacatcagcgagccaatgatttgggagtattctagttgattcctagcaattttcttgttcttgcgaatcaacaagctaggatcataaggtgttggagaaggcttactatcaatgtagcaaaaacgattcaagatcttctccacataatgggactgcaagagcgtaatcccattctcacctctaattagcttaatgttttagataacatcagctactcccaaatccttcatatcaaaattttaagacaagaatgatttaacctcatttgtcacctaaggtttgtcccaaatatcagtatgtcaacaacatacaagcacagaataactccctcacccccaccatggcgatagtacacacatttatctgcctcattgactgcaaagcctgcagatgtcaatgttttgtcaaatttctcatgccattgcttaggagcttgtttcagaccatacaaagacttcaacaatttgcacactttgccttcttgaccttcaactacaaacccatcaggttgatccatatagatctcatcatccagctctccattaagaaaagctgtcttaacgtccatttgatgaacgagaagaccatgtgaggctgctaggaaaagtagcacacgaattgtggtcaatctagcaacaggtgagtaagtttcaaagaaatcttcgccttctttctgaatatagcctttagcaacaagccgagccttgtacttttcaatagtaccgtcaggcctaagcttcttcttgaacacccacttgcaccccacaggtttacacccatatggtcgctcagtcacctcccaagtcccgttagcgataatggaatccatttcactacagacaacctccttctagttgtctgcatcaggagatgcatatgcttctgaaattgacttaggagtgtcatccacgaggtacacagtgaaatcatcaccaaaggacttagccgtcctttgtctcttactccttcgaggagcttcactgacatcctcctcagtgacatgttcatgtgtatgttcagtttgttctggtggtgtgattgaattgggaattacttcagagggttggctcgaactactatgtgtatccttcattgggaaaaagctctcaaagaaggtagcatcacgagactccataattgtaccaacatgcatgtcaggtacctcagatttaattattaaaaatctataggcaatgctatgatgagcatatcccagaaagacagtccacagtcttaggtcccagtttgcgcttcttcgttattggtacattgactttcgccaagcactcccatgtgcgcaaataagaaagtgatggttttctcccaatccatatctcatatggtgttctgtccttatttctattaggaactctgtttaacacatgattcgaggtcaacaatgcctccccccaccatgccttaggtagtcccgtggtgtccaacatggcattcaccaagtcagtcagtgtgcggttcttcctttcagcaatcccattagactcgagagaataggaaggcgtcctctcatgtatgatgccatgtttctcacagaataagtcaaactcgtttgagaaaaactctccaccacgatcagacctaagcctttttatctttctatcaagttgattttcaacttctgcattataaattttaaaatagtctagagcctcgtctttcgttttcaacaagtacacatagcaaaatctagtagcatcatcaatcagcgtcatgaaatatcattttccacccttcgtcaacaccccattcatttcacaaagatctgaatgtaggagttctagtggtgccaagtttctctcctcggcagccttgtgaggcttgcgagattgcttcgattgcatacaactatggcacttagaacctttgacaatggaaaacttaggaattaaatacatgctggaaaaccgagacatcaagccaaaattaatatgacataaacgtgagtgccaaacattagcctcatcatccacactgccacaaatatggttcacagacttattgcagaaatcagaaagggaaaagcggaacaggcctccgcactcataacctttaccaataaaatatccatgtttagacatgactactttattagactcaaaaaccaacttaaatctgtctctattcagacgggagccactaacaagattcctgtcgatagaagggacatgctgcacgttctttcccgaagtaaacttcagatctaccgtgccaacaccatggacagaagcatgtgacccattccccattaggacagtggaaccccgtgcgacctgataagaagaaaacaatgagatgtcagcacaaacatgtacattggccccagtatcaacccaccaattagtagactgattaactgaaaaaacagttggtaaattaccatacccgcttccatctccagtgttgccaatggtcgcattagcagacttagaagtctgccctacaggtgcctttatccccttacgctgtggacacttcctagccagatgaccaggttgcccacacaccaggttgagctttgtatttccccttgctcttgttctgggccttgtgcacaacattggcactggaccgcccaccatcgcccttagacgcggcgtctttttcccgagctttctcctcaacatcaagagacgctatcaacccctccacggagtattcctgtttcttgtgtttgagtgcagtaccgaaacttttccatgatggaggtactttcgcaataatgcaaccggccacaaatttgtcgggtaagacacatttaaggagttcgagttcattagccatggtttgtatctcatgagcctgttcgactacagaacggttgtcagccatcttgtagtcatgaaactgctccatgatatacagatcattgctagcaacggtagcaccgaatttagtattcagtgcatcccacaactccttagcgtcggtcatatgcatatacacctcgaccagacgatcgccaacaacgctaagaatgcatcccacaaagagagtagtggcttcctcgaattgcttctgctgatcaacagtaagaattccttcaggtttgccagtactcacccagaagcatttcatagccgtcaaccacagagtgaccctgatctgccatctcttaaagtgcacaccggtgaatttatccggcctcagtgcatcggcaaaaccagccatagtaaaatcacagcgccaacaataaggtttttggattgttgaaattataagcacataattatttaatttattccataaataaatcatgacattgcagatgtaaactagattgaacgcatcattagatccacacatgtaaactaagcagtaaaacatgaacagatcaaatatgcgcaacatgtcgaacatgtattgaggtggcggaaagaccggttgctcggcaggaactactcgcggttgctagcgtcgacgaaggcgcgaagcacgcgagcgaagaggaaggcgagccgtcgcggacgaacagggagcagtcgcgcgaagcgcttccctaaaaccttattgccgccttctcccggtgcaggacgtagaaggcagaggttccggagacctgctctcccgatcgccggtgcacgccggcgagcgggatgaagtagtctacgagcgaagacgcagtacagagtaggaggcaaatcctagattgatttcgcgtgtgttgcgtgaaggcgggggctcggtttatatagagataggtcgcctgatcagggcgcccgcgtaaaccgaactggataagtcgtgcgtaacctatccggactccacgccgttttcacgcaccggatttttcgaaatatttccaaaacaaaacaaatccgaacttcccgcagcaaaacaaaactgcaaaagaaggctgcatctacgcaagggtgaggagccaattttgcggaccattcgatgcgtacgtcgtgcacgtgcgccgcctgccctgccctgccaggccaggcgagcgagcgcgcatgtgtttcccctcttctctccaccacacatgcttcaagtggctaggtgggcatcctccctattaaggaggtccccctcttctagaataagcaaggtggtactaaaactccacatgcatgccatccca

SEQ ID NO: 21413 - DNA, 15163 bp, Oryza sativa
atcatagatcgattgtacatctcagatctatgcaatgaatcataaattgtaatagaagaaattatacatctctcaaatcacaaattaaaaaaaagggccggcagcatgtcacgggtgccgcgcgctgccccgccggccgccgccgacgtgcgccgccgcgtcgcgcgcagcccctgccgcctgccgccgcgcgggtcgcggccccgccgcccgccgacgccggccctcggatgtgaggagtagaggggaggaggagaaagggaaggagggggaagagaggagatgaagtagctagatctctgatctgggagataggaggagaatatgaggtgggagataggaggagaatatgaggaggaagctggtctgggacttaaccgattagacgtggaagagaaatatttactcccagttggagtttttaaccaggactaaagatagatctttagtcccggttgatggttggtgtaaagatcctcggccttagtgttaccaaccggcactaaagtggtaatctttagtaccaaccgggactaaagatcctcggcctcccgacatgcctctgacaggccacgaaccggggctaccaaccgggactaaagatcaaaatttttataaccgggacaaaaaacaatctttagtcccggttctttttggatccgggactattgtggaatttgtcagaccgatcaaagatggtttctccaccagttttaaggctcagaagattcgtctcgcaaattagtctcaatctgtgcaattagttattttttagactatatttaatacttcatacaagtgttaaaactttgatgtgacaaggctggtgtaaaatttttgtgtgggatctaaacatggcctttcttccaaagttggttgtttgctttaaaggtagacggcatgctctctgttggtcctttaattggccggtttgcatttgtgctggctgatgtgtactgctcaaggtaatagttatatcctagtttggcctccgcaagctaatggaataatttactacttttgaaaataataacttttgcatattctgttgaatttttgttaaccctttattttgacgacatggctgaccattcattctttcaatatcgaatggattcttctttgaacaccatgaatgctctctgtcaaggaatttagcatggatgcaatgacaaggctgccgcaatacatcccattcccagctggcaaatttctctagaggagattggttggttacacctggtcataattatgccttcaagcatacatcattagtgtcactagagtcagcttaggggcttagggaagtgttatggtagatgtgactaccacatccaaatttatctattttattcactcataaggtaagaggtaactcatacaatgtatcacctgtagttcacaaatatcaatatatctaatactctcacacctttcttcttgaaaattgtgtggaggttgcctcttgatttaagggtggctcatcatctctctcctcacttctctcctccacctcatcactcaatccaatgtggcatttttagaggcaatatatggggcattatagtacttgcccttaaatatgatggcccatgattaaaaattatggtgtgattccctagttgatacggaggcttatatattattatgtactagaaaaaagcccgtgcgttataacgggaagtgtaaatacagaaaattgaggaaaaaataagaaagatttacattatgtatttttaagtaggtaggtgtataattaaattagtttacaagtaaagtagtgtgagaaataaaatggtatggttggatttagttttattaaattctacatgattaattacgctctttggaattttattagaattttctgagcttaattgttaattttgataatacaaatattattttagcaattatttaaataaaaatcatcctttctctctgggccattttcagcccattttattcttcagcccgcaaccgagccagaccactttcctctcttctcctcccctccacctcagtccgcaagaaagagttcggcccaacaggaagtctaatatgctccccgtactcctcctctccctaccgtgcgtggcccagcaattgtgcggctcggcgaggaggatggcccgacgcggatcgatttgtgccattcgtttcgatggacggcaaacgaacggctcagatcggttccgaattgatcaaaaccgacggggcaaaaaaaatccctaaacctaaatcattttcccctccccctcctctcaccgtaggccgcctttctctcccccaccggcggcgtccctcctctcccccccaccagcaatgcccctcctcccaccgcgagctgcccctcccccaccgcggcgccccttccctctccccatcggcggcgccgctcccactcactctccacccccactatcggctccttccctcctcgtcggggtgccgccactgcctcgctccttgccagatccggcgagtccccctccctctccccccactgtcggctcattccctcctcgtcgggtgctgccgccgccttcctcctcgccagatatggcgagtcggcggctccacggcgcagcgtcgggctcgccgctcgccagatccggcgagtcggcggctccccgcacaacggtggttcgtggttccctggcttcatatatagcggcgcagcggcgggtcggcggaggaggaggttgagaagcggcggcctcccatttgccccttcatctcctctatctcttcatattttggatgattttgtgagaatttcgatttggatttgaattgcgattttgtttttggttggattgtgattgtgatgatgtaggatgtggagaggagataatattgaatcgggctttttttttcggccttctttacggtttttctacaaattgaattggattatctttctttttgttttgatgttttttcctttttttcgttattacagacgacggaaacgttttcaattttctaagtagtagagactagaacatatcgatccaaatgtgttatgataaactcaatacagtatcaacaatcaacgtgctctggtgagcgaaaaacataagcaagctaatgggaattcagcttcaacggcactcgtagtcgagagtcgctccactacactagcaaagtcatccataattcccgccgagaacccaaaatgctgcactattgctggctcgaacaccgctcttaccattgcagctattgtgtttggactcgccaacactccatctgtggcaaggaaagtatcgtgggccatcgccttgttgatttgaaatgagccctcatcttcaattatcccatttaattcattttccataggtgcatagataggtatgtggaatgtgtcgaacttctctttgctaatcacaccctacagcaagttaaaaccattttcagtaaacctggaaatgagccttgattacaattattaattaactgccatgttacgtaaacaaattgcgcccaagtaaacacaaaaataaaaactgtgatattgcaaaagaaatattaacgaagtttttgtacatatctacttattatatagacctgagcatgcatggacaggccaggccccaagaatataatgtgcagattgatttgcatcaaaatttactacggatcggacaagcttgctgtgttaaacttttttgctgggcgagacaggactcaatcttctgttgggttcgggcttggccctgagttaatcatgtgcataatggtgctgttcaagcttgccatgtacgtgcatgtgtctcatccagggaaattgtcgattttttttcatatatatgtgaatttggtcatactttattcaaattcagtaaacatgtattaaaattttaaaaaaaaactcgttcagaatatctgaaattttcgaaatttcaatgcccaccgaaattttctcgctttccgaaaagaaaaactctggtctcatctaaactggataaaactaaacaaagcataaaccatgtaggatacagagattaattaattgattgaaaagctaaagcttacgctgcttaccctcgatgccatgtcattcaaggctacagataccactttccatacttgagtagacacggaggccgggttgcttgaacatctaccgatcagcgagaaaatcaaccgacctccgagaaccagttctcgagccctcaaggacaagaatagcgtgaaatcctttctaaactgtcgagcataagcgtcggcaacaatttcatggttcaacagcctcaagcgctcgtcgctatcatacattgggatttttctcttggcaagttcttcaggtgcctgctttcacaaacgcacattgatagtaacagctgccccattattccatatggctgcatatatacaattaactcaacctaatgttgcatgcctacctttgataaccattgcaagctgatggaggagcagaagaaatgcactgagtcagaagtgaaaagcctctcatagaatgacccaggtaccatgttggcgacgacgacgtgatgagaggacacatcctggctgtgcttgaattcggccagactcttcgcaacggagttgaagtcattggatggaagatcgttgaggaaaaggcacatttctggtggtggctgcgcgcattccatacaataacggtggatggcatcgaccgtagatgaaatgagcgtgagtgcgttcgggccagatgagcagcccaagtccgcaattgccatgctcttgggaacagatactccgcagaaggctgtgacggcttcctctatgagaggcttcatcctatcttgggcagttttctacaagtattattcgttctgaggtcacttttgatttttgactgaagggtgcatgtaaatgccatagaaatataatcagctgtgatgataaccaagggttgaaatttcggttcaattttggaaattttggaccccctccccggcaagtaactatctcggctgaaattttcgttttttacaaaaattcttatgaatttggtcaaaatttattcaaatggagtaaaaatttgtaatgttgtcaaataatttcgaaattcaggatacttcggtgatttccattttccaaaagtgaaaaccgtgatcagaaccaaattaatcaattaaggtgcagacaattgccatttcacaatgttcgtagatactcaaaactgccacctgggaggggaattccctgggcatcgtgcggaaagttttggatatttgatttattgttatttctagcaaacaaaattgttttcaagaatagctttaggtatgctatgatcattgagctatggttcatagcggtttaaaaaccattggtgaaaaatagactacaaaattaattaagttctaaaatttaaattttggtgataagctaacaacgagtacacgataagaggttacagttattcctaagcaatcatcaaaagagggttggaaacaaaagcgcaaaatattagcaactgcttttaaaatactttctacttcctccgtttcacaatgtaagtcattctagcatttcccacatccatattgatgttaatgaatttggacatatatatctatctagattcattaacatcaatatgaatgtggaaaatgatagaatgatttatattgtgaaacggagggagtagcagatgtctttgttttttttagcatatttaatcaactgacatcaacttatttattaaatatgatatacttgaaacctacaaaaatgataagaacaggaatcaaggatttcaatcttttttcaattatatgataaccaaccttgatcatttcatgaagatcagaagtacaagtacaattcaattatgatgtcctcctcaaaggcatgtgtaactcagaaatcagtcaacactcatatgaccagcaaatcaaacgaagtatattgcaaagaagtacacatatacctgaattgtagagttgcgagcatagcttgtttcgccttgccctggattcatatggacaatttgtatggtggccatggcacactgtttcaatatctgattgtgcttgctatgatatgaaggctgagcatactggctatgtatttatagccttacaaatgccctctatggactatggtcattgtagttggactggaaatgttgaaatgctgacatttgtgatatctgaactataaaataataatttaattaatcaccattactacctacagatacgtttcttttaaatttgtaaaatatgcaataattaacactacaccatgacccacttttgccaacacgccattatgtaggggaaacgcagaattaacaatagagcatgtgttgggaaaggctttgccgacagataatggcatagtcggcgttgcagcagtcggcgaagcctttgccaacagataaaacctttgccaacacatgttgtgtaggcgctttgactagcttttgccaacacagacttttaccgacacacataatatcctgaaatggtagagcctttgccaacacattccattttcaccaactgatagttcgttggagaaagtgtaattagcctgtaaatataatccacagtttcacataaacctgccattccgtgtttcacataatttctacagtttgacaagcacattcagatgcaatcatgttcgcaagcatgaatactaacatatccaagtcctaagcattttactaactttttagcttcatggtaatttttaggaagtgatgtccttgccggaaaagcatacttaagtagatctagatgcaaatcaaaacttttatcactccatccaccaagaaatttgatatggagtaatctaacaatgaagcgaagctttgagaagtctttacaccctggacatagctcctgcccagcatcatctaccaacttgtaaaaatccccaatatcaacattacgctgcccctcattgttctcttctaaatctcccatctcatccaacccacatgctagatcttgaagaaaaccagaaatatcatcctcttcatttgacttctctagttctaccctgtgatccccatcgtcatgcataaaagtactttcttttccatgaaacaaccatgttctgtacaattgcatgaaaccatcacaaatcaagtgctcccgaacagtagtacgttctgtccaataactattaccacagtttttgcaagggcataatattgagttcccctttgatgaattagcaaaagcaaattctagaaacctggttactccttccacatatccatctgtatgcctacatgcaattagttactataattttagagacaatactaacacaaactattaactaatgattccaactgagagtttgtggtgtatctaggtagatccatccattgtttatccatgttgcacctttacaaaataaaaacatcacaaaactaattcatatctaaggacgcaaacatgaaacttatttttatttagaagggattatagttttcaattagggcaaccacacatcatatcacaagccattagtgaagcatgaatcaacaaattaaaaggtcaagcacaagaagatacataatagttaaatttggtttcatgcaaacaaagaaatcataccgataattgaagaagtagaccagcacaaggatcccgtccaccaaagcacagagttgttggatcaattcattgtcttctcaacctaaacaagacatagcagcatgcatgcctcagttatttcacctctgttgattatagatattgacatacgctgaaattttaaagcagctttattccagaaaacaataaaaagattcctataaggagcatgtgcagcttttcacccaaatgcaattatatggtgattctagaaattttgaaatatatcatgctgtttattaattgatggctgatttatctactattaaactaacctaattgacagaattgctatagttcttatgcttcgtgatacattaaatctgtgcttgagttccggtacaaattcctaagtccatgactaagtctagattttgattttaattatctatatgtcaagaatatcagtatttgtatggacaaggaactgcagttactaaatttggtaaagacataagactatacataccctactttttcttgctttataacttgagatcttgtttacttgtagtaacattttagtaacagatgcatatctatgctatccagatttctatgatcaaagctaggttcttgcaacagtaaccccatgcatgtacttaaccctgattttgtctactagtccttcaaaaaagagtgtgtttcatgggtcaaacttgcagtcagctagtatctcatagtaggacttaatcgatgaaatatttatttccccagtgttcttacagatctaggggggtccagggtgagggaggaggagcagaaactaccttcccagcagagtttggggaaaatgtggagatggtcgctgaggcgccgtttggggaggaaggagagtgttctcaaggggaggagaactggtgtggaggacgagccttggggactttgaggtcgatgtgtgcggcggcaacgagatcgagaggaggtggcgatggggccaaggatgcgacgagatacggtggtggcggcggatttgggagaagggaggaggagatatatagggtttaggagcagaaaaggttgggtggtacacttcaattttatttattttttttgttttggctccgcaccccctattcctcccgcgctcgtacttcaattttttttttccttcggaagtcctcccgcgtactctaattttttttcaattcctccgcgcgcaaaggaagatatatgcatctttgccgatactagcggctacatgtgttgccaatgaatcaccgacagattatttgtctacaaaaattggaatcgccgacacataatatgttggcattgctacatagctagatttgactacaaattatgtgttgtgtaatctaccttttgttcccaacacaagttagttggtaaaagtgggtcatggtgtagtgtaatctatcttattataactagtatttctactcaagatgtttttcgcatttattgttttcattatgagtaaatttcaaaacaaataccgatacttccatgaaaccataaacaaactacaaatttgatcgaactgcggatttagtgttgaacatatcacaaagctaaatatcaatctgaagtaccatctgatcaaaaattatatgtaatatatcctagtggaactttcagttccatataatttggtgataaaattgcttgtacatctgtaattttgcagttgatggcttgttgttttgcaagtattttcatgtacgaatctaaaggtatcactgtacatgcataatacaaaatatttatgttggcttaattattagttaaaatttaaaaataattttgaattttctattacatgcaagtcctatatttttgtaaggaagcagtgtgttattaaaacgtggcaggtcaactattgttattttttggacctgccacgtgagacaaaataagagtcaatggacaaaagcgccagaactgagaagcagcaacatagatacattgttggggcgacaaaagaatttgactagcattatcgatggttgacagtcacaaactttggattgtagaagcaaatgtgttcaaatgagtctcatgcatgccgcctagctagtcgtcgatcgctccatagccgccaggcgccggccagcccgccactttattgctccatagccgccccttgttttctcacattgttctttaagcttcttaacacgcataaccaccgtttaaaattactttaggggtaacatgactggcattataaaatttaaggaattggatcactgctggagaaaccatctttcgtcggtcggccgaattccacaatagtcccggatgcaataaaaaccggggctaaagatgatctttagtcccggttcaaaagggtaacgggcatatttgatctttagtcccggttggtaacagatgatctttagtcccagttcaaatgctgtcagggcatgtcaggccccccccgggatctttagtcccggtaactttagtcccggttggtaataccaaccgggactaaagatcccggggatctttagccccggttggttaccaaccaggactaaagtcccacccctatatatatatcttcttcctcctctagctgctcgagcaagcttcaaaatttcttcaaaaaagaggggaggtcatgccaaaatttatagtgaatttattttggtgattacatacaaatcggaggtgcctaaaaggtttgcaacttcatcctccaatattttttttgtcatattacatttgcagctatgttttgcacacttttttatctccaaaatttagttgtaagttgatgagagagaaaatttgtgtggggaagaaagaatatatagaaatttagttcatttgctaaagaaggttttataaaatagttgagaaggaaaactctagtgaaagttaatcttaaataatagaaaacaaactaaaatgaaaattaaaagaagtaaaacacattaaaattagtttaaaactttagaaatagtaaataagaattatttgatgtaatattttatgatttttgtatgaataaagatatgtcattattgtatgactgttgaaacagtttgtaattatgttataattattgtatgactgtcattattgtaagaataattatttgtgtacggtttttttcgactcatgtagatggatcggccttggatgtatgctgaccggcggtccaaagagtttattgacggcgtgcactattttttgagagtggccgaagctaataggcaaaggggttttatttgttgtccatgcaataagtgtaagaatcagaaggagtattctgcatccaggactattcatttacacttgtttgagtcggggttcatgccaagctataattgttggacatcccacggagagcaaggtgttgaaatggaagaagatgaattggaagatgacaatattccggactttactcagtatgttggatttgaaggaaatcaaacgggcgaggaggaaatagctgctgatggtaacgacgttgcggatgatcttggtcagatgctgcaggacgccaaggaggactgcgaaagtgaaaaggaggcccataaattggataagatgttggaggaccacagaacttcgttgtacccaggttgcgagcaggggcacaaaaagttggataccactctggagttcttgcaatggaaagcaaaaaatggggttagtgacaaggcatttggcgatttattgaaactcgtcaagaatattcttccggagggaaacaaattgcccgagacaacgtacgaggctaagaagatagtctgcccgctaggactggaagttcataagattcacgcatgtccgaatgattgtatcctatatcgcggtgaggagtatgagaacctagaagcatgccctgtttgcaaagcactacgatacaagattagatgagacgatccaggagaagttgacgggcagctaataaagaagagaattcctgctaaggtgatgtggtatttccctataataccacggctaaggcgtttgttcaggaacaaggggaatgctagaatgatgcgatggcacgctgaagagcgtcaacaggacgggatgttgagacaccccgccgatggttcgcagtggcgaaacatcgacagaaaatttaaagaatttggaaaggatgcacgaaacatacggtttggtttgagtacgaatggcatgaatcctttaggagagatgagcagcggccatagcacttggcccattacgatgtgtatctacaacctcccccctggctatacatgaagaggaagtacataatgatgccgattattattcaaggccccaagcaacctggtaacgacatcgatgtgtacctaagaccactggtcgaagatcttaaactgttgtggaagaaggaaggtgtccccgtgtgggacgaggacaaacaggaggagtttaacctacgagcgctgctgttcgtaaccatcaacgattggcctgcacttagcaacctatccggacagtccaacaaggggcacaaggtttgcactcactgtatggatgaaacagaaagtacgtatcttaagcactgtaggaaggttgtatacatgggtcatcgtcgattccttgcagcaaaccacccggtacggaagaaaggcaagcacttcgaacataaggggccgaccaccatacaaagcctaaacatcgcagcaggaaaacagtgtttgctatggttaaagatcttaaagtagtgttcggaaaggggcctggaagccagcctatagagagcaaagatggtcacgcggcgatgtggaaaaagaactttatattttgggagttaccatattgggaattcttggacgtacgccacgcaatcgacgtgatgcacctcactaagaacctttgcgtaaacattcttggcttcctaggtgtatacggaaagtcgaaagatacactggaagcacgtaatgatctgaagcatatggaacaacgcggcgaccttcacccagaaccaaaggagaaaggaagccattacttgagtccagccagctacactcttagcaaggcagagaaggaaagtatgtttgaatgcttggagagcataaaggtaccgtctggatactccacgaatatcaagcgaataataagcacgaaggagaagaagttcacaaacctaaagtctcatgactgtcacgtgttgatgacacaactgctaccagttgtaataaggggtatccttccagacaatgtccgggcaacaataacaaagctatgtgcattcatgaacgcaatttcgcagaaggtcatcgatccggatagattagaagcccttcagaatgaagtggtgcaatgtctcgtcagttttgagttgatatttccaccttcatttttcaatataatgacgcatctactttgtcaccttgtgaaaaagatcagtattctcgggcctgtgtacctacacaacatgttttctttcgagaggtacatgggcgttctgaagaagtatgttcgtaaccgtgctcgtccagaggcaagcatcgccaagggttatggaacagaggaggtcatcgaattttgcgtagaatttatcgaagaccttcgcccaatcggggtacctgaatcacgccatgaagggagactacggggaaagggaactctcggaaggaaagcaataatgacggtagacaacaatttattccgtaaagcccatttcactgttctgcaacactcttcattggtagctccttacatcgaggagcacttggctctagttcgcgccaggaacatcagtaagtccgatgcatggattacacggcatcacattgatactttccccgcgtggctacgacaacatctcatgggtaacgagtcgatcaaccaacaacttgccttcctggcgaggggaccgtctgggtcgatcgcgacattccagggatatgagatcaatgggtacacattctacacgagagcccaagacatgaagagcacgaaccaaaacagcgctgttcgtgtcgataccatgggacacgatggaacaactgccacgtattacggtgccatcgaggacatatgggaacttgactatggtcctctcaaggttcctctgttccggtgccaatgggttaggttgactggtggaggcgtaatgattgatgacagtgggatgacaactgttgaccttaacaaggttggatactcggacgaaccttttgtccttgccaatgatgtaacgcaagtctttttcgtgaaggacatgtctagcaaaggaaagaagggcagagggcctgacgagcctaagcgtcaagtggttctcccaggcaaaagaaaaatcgtcggagttgaggacaagactgacgaggattacgatcagttggatgggcaacccccttttacggtgacgattgaccctagcatcctcctatcaaatgaagacaccccttactcacgtagcgatcacaaggagggaacaatagtgatgagaaagtacgtgcggtcaaccgtcaccgccgatgtattaccgtaattattgtgtacacgatgtaaactattttggatgtattgattatccatataaatcaattgatgtatggcatatgttaattacgtacgattattagaggttttaacaagtttaaatcatgtatatgctagttaaatcatgcatgtggcatttacatatgttaattagagttttcacaatttaatttactatcattcatatgctaattatatatgactattcgaatttttaaaagttttaaatcatgcatgtggcatttacatatgttaattagagtttttaacatttaatttaatataattcctatgctaagtatatatgatgattacaatttttattaattttaaatcatgccgtatgtacatacatatgttaattagagtttttaccaatttaataatatcattcatatgctaagtatatatgattattgaaatttttattaatttaagtcatatatttgcttattacgatttatccacttaatttataacagacaaaaatattttttcgaaataattgtcattaatctttgtactttaaataattgtaatgcattatcttctattttagaaacacatatgtaagggaaaataatattcagtgctataatcagtagtcccggttcttaaccctaactgggtttaaaaagaatttggaaatagtgggaaaagatctttagtcccggttgatgagaacaatcgagagtaaagatatctttagtcccggttgttctcatcaaccgggactaaaaatccaggggtatatatattcccggtgcgccctcgtcttctccaccaacacttagatgttttcggccgatcgatctctctcgcctctctccttcgccgccactgcctagggcatccccgcgccgacgccgccatatctcgccgtcgtctcgagctcgtcgtcctcgccgccgcgtccgcctcctccgctgccgccgcatctctggggtgagagccgccgccgcctccctccatctctctctccgccgcctccctccatctcactctctccgactccctccatctctctctccgccgccgtcttcgccgacgcgcaacgctcgcggcgacccgccacgccgccaccttcgccgccgcgcaacgcc

SEQ ID NO: 21414 - DNA, 17118 bp, Oryza sativa
acgaacacgtcaacgtgaccgagaacgtgaacgagggaacgaacgtgaccgagaacgtgaacgagggaacaaacgtgaacgtgaacgagaacgatcgaacgaatgtgaacgtgaatgagaacgagcgaacgaacgtgaacgagaacgaacgtgaacgagaacgtgaacgaacgtgaacgcgaacgagcgaacgagaacgagggaacgaacgtgaatgagggaacgtgatcaacgagcgaacgaacgagaacgagcgaacaaacgagaacgagcgaacgaacgtgaacgaacgtgaacgtgaaatgcaatatatatatatgtatgttacttcgcgtttatcctaatacatctttttgtatcttgcagaaaagacgtgttgtcggagtcgttcctcaagccggagtggaagagctagccctagaaggaattcgcgcaggcaagtgacgtaataatatatataattgttatatttgtaatgcaattaagattattagatttgtaattagacttagcatataagattgtgtagtgttctaataatagtcttaattgcatatacgacagttacacttagcatacatgactattttagtcatttattactattggtgcgactccggtctaactacggaattggtgcgactcctagcaattgactattttagtcttaattagacttagcatatacgacagttatacttagcatacatgactattttagtcttagcatgtaagattatttgagttttaatataagattattttatttgtaaatagacttagtatataattattgactagctagggtcgtataatatacgtcacctagacttagcttatatcacgatttgagttttagtatgagattattgactagctagggtcgtataatatacgtcacctagacttagcatatatcacgatttgaattttagtatgagattattagatttgtaattagacttagcacgtaaggttgtgtagggttctaatgtacgacagttacacttagcatacatgacttagattgttaaaacataaatgtctcatgacttagcttatatcacgatttgagttttagtatgagattattgactagctagggtcgtataatatacgtcacctagacttagcatatgtcacgatttgagttttagtatgagattattagatttgtaattagacttaacacgtaaggttgtgtagggttctaatgtacgacagttacacttagcatacatgacttagattgttaaaacataaatgtctcatgacttagcagatgtttcttgtatcaacagatggctgatcgcgatgaggaacagatattgtacgatacaatcgcggagggaagcagccagcactggaatgaagaagaggggaacgaggatccaaaccagtacttgaacgaggaagggaacatggagagggatgcggaggggaaccagcaggggcacgtggaaagggatgtggtggggaaccaggaggaggaggctagtggaagtcaaccctccattggacagaagagggcacgcgggcaacgaggtgcagcgaagaagcttgagggtcggcacatcataacggaagtggaagaagatggacgtcctagtgccccggccgaagccgccaaaaactatgtacgtcacagcggttgggttgtgcgggataacgtgcctgtcagtacggtgtactggcgaagaacaagggcacacggagatcatgagagctttgtcctagattcggagaaagagatgctgtggaccacaatgctcgagacattcacccttcctgcgggtacagaggacaaagtgaaaaggtggactctgaagaaaatggcagaacagtttcagagcttcaagggagatctgtaccagaagtatatcctgaaggggcagacaccgaacttccacacattcctaaagttaagggatcactgggacaagttcgttgcatataagacaggtgaacaagggcaagtgatgatggaaagaaacaaagaaaatgccgccaagaagaagtaccatcaccacttggggtcaggaggctatagcgtcgcgatgccgaagtgggaggagatggaggctagcttgcttgagaggggtatcgaaccggcaaccgctaattggccggaacgatcgaagttctggtactatgctcacggtggaacgctcaacccagctgatggctcactggtcttcgccgatcagatacgagaggctgcgcgacgactaacagatgcagtggaagcctcctctcagggcacattccgaccggacagagatagggacgagctgacacttgccctgcagactccagagcatccaggacgaacacgagggaaaggggtgattccttggaagattggtttcaaggaggacatccacatgtacaggagtcggatgaggagcaagagagataccgagacgaagattgcagatctagagttccgggtatcgagctacgagctcggcatgcaagaggaggtggcaaggaaggttgatgaatgcatggccgcacatcggtcccatgatccccagccgaccattcctcctgcaatggtgagcccgtcaggaaaccgtagcagctgcgcctcaacggggcaggtaggatcacagagcatggacgccatgcaaacccaggacgaatcgacctgtcccgttgatgacatcactcagcggacaccatgtgagctgcatattcctttcaagaacttatcaataaaggtaagctcgtagtttatatattttagatttggccatttcgctagttgctgcttatatatgttgattactaataaataatctctcacaacatgaaggtagcgttgggcatggccatcccaacggacccttctggtacttaacactgcaggccgattccagcaagatactcgaaggtcgaagttgagttggtcgaaggcgcgtatgaggacctcgagctggattaccctgaaggagacggtgagacgcatctacgagacacaagccaagccattattctatggcgcaggcggtacatcatcttccctgggcgacaagcggcgtctcgtgcaccatctcctccggctccgccatctcctcctcaggatcctgcactgtctcctcctcatgctccgctagcaccgtctccacctcaggctccagcaccgactcctcctcaggctcctgcaccgactcctcctcgggctcctacacctactcctccgcaagctcctcttccggcaccttcaaagtcaagggcccccccagctccaccgcctgcccacacaagggcaacgaagaaggcgaaagttgatgccgccaagaacaaggacccggggtacgattgcacgcaagaggagcttgacgcttacgtggcatcagaagtcaagagacaattcaagccttgaagtccagaaaagaagattgctatagacccgagtgtcaggaacttcttcaggggtatgtctgcacctgtcaagaggccatcaagctatcggactatgagcgaacgctgaagaaagcatcttctgcaaagtccaaaccagtccctcagcttggagagcaaccaaaccaggagatcgagccgttggtgaacggtgaagacatgacgatagaagaatttattactgacaccggtctaactacggatcaattgctaggagtcgaaccaatagaaaaggcggaagtgaaatacatgtacgaactcggtaaaccgcttgtcaagcccgagctggtgcagtccctacccacacaaatgtacaagttccatcagctatacatagagatgagcaccaccggtagagagatgattggagcgaggatcagggacccagacttcttgcaaggagatgacattctctggatcaatttcaagggaatctacgaactatacgagctggacgccctcgacgtctctattatgagttgctggattttgtaaatatatcgttcagttagatttcttaattactacgtctcctttaattaattaggtccttgtatataagtagactatataaaataaaatactcccttttatcgttgtagaatggagattcaaagggcccgacggcggagggtttttgatactggattcatcgaccctcggaaagtaaacgtcgcaatgctcgaccaatatccgcaagccacagaggacaatctcgtccatctccttcaggcgcagcattacaagacgttcatactgttccgtacaacacagagttagtttaattttactgtcttcctataccaaatttcattcccgtacgaacttgctaagtgtttcatatgtaatgcatcccacgcacattgcagattccactgggtgcttttactcttcgacctgtcggcctgcaccatcaacgtatatgactcaatggataaaaaagagtctacgtttgacaaggttttcgaacttatagacaggtactgtcataagttcctctgttaattaagaaattcttgttatgttaattgctactacgaatcatatctttaaactccatgtagggcttggtattggttccgtcatttggtccacggcaactggagagaaagacttaggcggaagttcaaatttcctgtgagtacacatgctctacatttatatttctccgattcaaattaatacatacaagtgtatattaattagatctcacgccgttaatttgtcatttatttgtagtgcgcaaagcaaaagcagggaactaacttgtgcggctactacgtgtacgagtattgccactgccttgcagaccaaatcatcaccacaagagagctcgatgtacgtacaaataaattcaaattttcattacgtaacgatttcttgtttaattactaatcaatttcatacaatgatatagtttattcgcatgagggataacctgaccacacacaaggaatttatcgcggcggttcaagaacaactcatgggattcatcaacgaagaaatccttgatcccaagggtgaattctactacgacggaaacacaattcatagatccttagcttctgagctagcgactactactacgtcgaaatcgtagctagctaggacatataatggattgtaattaatatatgactacatatgtttctatatgcatgtgtacacattttctataatgtaaatatattttggtcatatatatatatatatatatatatatatatatatatatgcatttgcataacatatatatgtataaatacatatatattatgcatgtacatatgtactgaaacatatatacatataatataatatatatatatatatatatatgcatatattatatatgcatatatatgtattgaaacatatatatgcatggtttatatatatatatatatatatatatatatatataaaccatgcagcaacagggccatgcaaaaaaaaaaaaggtcagctcgatctttagtcccggttggtaacggctcagccggccacgtggctaagccatcttaagtcccggttatttcacccgggactaaagatagcgatctttagtcccgaattggtagtcctggtttgaaaactgggactaaaggggggttacaaaccgagactacaaagggtttctccaccagtggatacacggtttgaaactatatagacattcaaaatttggtgtcacgtggattttctttaataaatatgttgctcatattatatttccttttaagtaaatataggtatttagaaaaatatgttcgtgcgttgtaacatagtctagcttacataagaactaaggctctgtttagttctcaaacaaaaacttttcaccatgtcacttccaatatttggacacgtgcctagagtattaaatagaaaaaaaaactaattacacatattacgtgtaaattgtgagatgaatcttttaagcctaattgcttcatgatttgacaatgtgatgttacagtaaacaattgctaatgacggattaatccggcttaataaaagtctcgcagtttataggcggaatatgtaatttgttttgctattagtccacgtttaatgcttcaaatgtgtgttcgtatatccgatgtgacacgctaaaacttttcgtcttgcgaactaaacagagcctaacataagttccaaataaatcccaacccccgcccaaacacaaggaaggtgtctatcttaatcccacgacaacatctatctgacgacagagatccacgagacaaacccattggacagtcaagacaaccaagaagaccgcacacagtgccttggtgggaaactccttccttcctttgttttcgagtcatttcttggtcccccgtcgtcctctgtgtgttctctgctttttctttttcacttcaaactgctactgtagtacaatattaatgaccatgtgttatctctactagtacttaaaaaatttgcagtggtgatggtgaagccaacataaacaagcgacctattaaccatggggtcaggaaatcggacgctcctccggatcccatcgcaatccgcacttggcgagaaaaaaccgtcgctcccaaatcccccatcgttgcgccccctcctctctacaaccaacctcgccctgccccccatcgccgcgccccctcctctctgcaaccaacctcgccctgccccccatcgcgcgccccatcactagcgctgcagacgcctcactccctccctcctcgaccatcgcggatcgcggcagccggcccccgacgacgctctcgctccatcctccccaatcccggcggctcctcggcgggttcgtcaccacggtgactgagcccccgcctcgcccttgcgttctgtccgtcatgactcctcgcccccacgccgctagccaggtaagcatcattcatttttctcatggaagtgtgtttttgtttccatttcttctaccgtacgcatagaattgcatgcaaaacactgctgctgaatctcctctctcttgagacagtgttatctttaaatcaatgcaagtatgtactgtgttctcaacaagaattgaaaacccatagatggatttagttgggcatgatgtgtccattaacgtaagcgatcacccacataacccccacaaataatagcttcagaacaagtgcaatgttacatctgaagaaataacatatcaatcctgggctgggcatatattccatatggacaatatgatcgaatttgtgaagcatcagacatgcagaattaattattttcccccttattttcttggttttgctgcaattttaagtaagcattcttgatatgatcccatggcgtgtaatagcaattctaaacttatgatacatacctacatcctcaagaaaatgtttttctaccatcaggataaataggtcatggtcatgttgacctgatcttttagatattactccaactcataacattagaaaagcatcatcaattaataattctcgattgtaattttatctcaaacagtctcaatcaaaaaatttcagttcatcagtttgtcaaaaaagtctcacttgatggatcggttttagcattaatattgaagcaaataagtgcataggaatttcagttcatcagtttgtcaaaaattgtggctagatggatcggttttagcattaatattgaagcaaataagtgcataggtgaattagatttttttttcactctataaggatactttgtgccacttgcttttgttgtcaggtcatccaagaactcggcaagagtaacttggtagggaacttgtctaagcaaccaatggtcaattttctcatgaagcggtctttttttttcagaatcattcctgtgcgaccggagaccctgacattacctctcgctaccagcaccgctgtcttctccctttgtcgagatatccattttctctgtcttgtcctccgttgaatgtctccctgccgattctgtgggattgggtgatttggtgtggagctaatcattcggttgatggtctaatcgtgcaaagggacaaactatagtctaaagtcagacatgccagaaaactataaatatcgatttgttcttttcttatgtgtttgtttttaggctacaatggaagtattgactgccatatactcgtgaattaatctatatgaattgtttatgttggccatatgccaatatacttgcagagtactagctaggtgtgggcttggcaaaatacctagctgcaactttttcttggtcaacaaatgcatttctgattttttttccagtttataatttgttccagacataaaagtaaattgtgctctcatttattgctttcaaaacagaaatgcattgtgccgaaagttgtggctgggaaaaatggctactggctattcagcatccttacgctcatgcaacttatcttttttcagatcagtgcagtactttgaactgatcaatacaatatccttatttgtaagcatgttttttcagatcagtgcagtattttcatattagtatattacgaaaatataattcctttaattgagtcagatagtctagtgacctagaaatttatattcaaatgcaattttccccatctaattatcctttgagtgagtgatcatgtgattgcttcaacaatcaagagcatcttgattggtgaacaatgacaggtaataacacatgttttaatgttttgttgtaaaagatcatttcaaaattcatggtttagaaaaataaattacaaattcgaatcctgctgacaactgttatttgattttgtacagtacgccagaagaaacatgtgtggtaccacgtgattgtcacatacataactctttatgtaatttttttcgtgaaccttaatagcatccacaatcaccatctacgagaccaactgcgtctcctatgagagagagcccgagaaggtacaacacgtcctacagtgttagtgccatcttcccacatggaatgtggtatgtgtgcgtctcaggtctccaacggtctactagagtggccagaagggacttgtctgcatcccacagctttattgggtcggtgtcgtttgcggccacctcgactagcctagacaatggtaggaggcctgcctcatgcaacctgcagaatgtaaggtcgacacattaataatgactattaaagtagagttagccgttcgtaaaaaataatagaaaatggcataccacggaacttgtcgacacgcaacagttgtcgcggaggacgtgacggaaggtgctgagttgtacaccctagagtagggatggcaatggggacccgatccccgatcccccgcggggaaagcatctattagggcctagagtgcttttcaatgctatggttattaggtcaatacgtgcattaaagaaacaacaaactttcatatcacaagctataaagattacaacaacatagttcagaatattaggatgcaatactaaaattgctcatagtacaataccttctaattgaaggttatgaaattacaagcaatgacgattacagtagttgtaggatactatacacaatacaataccggactagttcatggttcactaacaatactacaccatcgcatcaccagctgcacagggacgcctaggacgtgctcacctggttattccttcctcctgtggttgacttccatccgttgtcgttccagatggaccaacatcagcgccgctaggacctagcgtatcctttggtcatttctagtaagtcatagactcctatctcctgtttcggacatatacatgttatttctgatgcatcttgtcttacgcctgcctttttaaacccttaactaagttggatcttgaatgcaaataacctggggacttagagttgtgtaagatcctaagatcccgaacccatatatctcttcactttatgtatgaaagattgtttctttccagaaataatgtgacacgtagacatcgggaagtataccacaatcaccggctgtagcaagtacatgagagcaaggcaggtgccaaagcttaggcttcgtacagttgcaactacatctgccatcctactttaggacacatttctgcacagcttgcctatggtagataccacgcctgctcctatcaacacaaattacttcatattgacaaatctatgcccttttgcccttaactattttatctaccatgtccttagtaactactgtcccataagatatattgttgtgtaccattgaggtatcaattttcttgtataggtccttgaggtaggcctgtgtgccatgaaggataaattcaataataccaaccaatggcattcctcgcactcctcgcattacccagttgtaaacctcagccagattagttgtcattatgtcatatcgagaaccatcgatgttgtacaagaggacccactactcctttggctcattctcaattcaatgcgagaaattccaaatcgatgatgccgacctccgtctcatactaggtgaattgtcatgcagtggacctagagctactggaggcttgtcaccttcaaccagtggccagcgagattgctcgtccatttgcttggttttcaaatcatccgaccttttccacaactcgttgaatttctaaagttgattttgtgcacaaagcctcttaaaatgattcatcaggtgcttgttcttgaattgcctgtagaaattagtacacatgtgacacatgcaccatctactctgaacatcaggccacctagctggaagtcccttcttatcccaatcattttgcaagtagtcaattaccggtagtatgcttgtatgacgatcatgtataatgcaaacatcaggcctcttatgcatgactttggtgcacactttcttgataaaccagtactagctttcaatgttctcactctcaacaaatgcaaaagtcataagtaaaacttgattgtttccaaaagctccaattgctgtcaatatctgacccctatatatactggtaaaaaatgtaccatcgatgcacaatatagaacatcaatccacaaaatacgttcatgcaagcactcaatgcgaaaaaagctctgtgcagcattctcttgttaggctcatcagatgatgggaatgtatgaatgtcaaagtaagtattactatcttcttagaattgctggctaactggcgaagcaaattatcataagatgcttcaaagatgccatacatcatctcgataatctttcgtttctccgtccatgctttggcatagcttatgatgcatatgaatttgtcttcattgtggctaataattaatcttggttcaaacccaatgttgcggacaatgctgctatacatcttaagtgcaataaaagctgaagtgatgttgcggtggtacttctccaccccttgtaagtggcatttatgctcggtcatagtgcttacttttcaatagtcattccatttacccttatatgcatgaacatgccactaacactcttcattcacacacctggctttgtacacagatttggttgacttggccaccctaaactctctctacaatgagactgcacaatgcttcaccgcctcttttagatcctccgaatgagcatacctagcaccctaaattaccttgttctccttttattctcaagttacatgatgcccctcaaagataacaaggcctaaaaagtcctcatttgtccaatcagcaggcattacatcatcttcctcgtcagatgatgcatcacccttcacttgctcgagttcatttgcttgaccaagttatcccgtttaatgttttctttgttttaccatgggcatattttaatgcccatgttactaccatacatatctcatgctatcagcacagattctaccttcttgatgagagaacagatgtgaagggaacatgacacgtgagacttagcttcatcaacaacaacagctactgcagttgccctttgtccctatcaatggcgatcctgactcagttcgatcgtgttgtttttctcttcatcccgtcactccagtcaccctttatcccgaggtcgactgattgggagcgattggatcgatcagctttccatcaacatgccatatcttgactgcaattcataggcacaactgggggcgacgtgcaaccaaaccatatgaaggtgttgggcaccacccaaatataaattccttgtatggatagtgatccaagattgggtttggatgacttgcagaccgtattgaattgaagaggatgaccaaaccaacaagtatgcccttgtgattcacctatctgcaaaatgcaggctcaccgccaaacagtttgcagcaatgtaaccatggaccaaccttgaccttcatatgcatgactcatgcaatgtatgggaacactgggaaaacatatgggaaaacaaagaaacccctgaagatgttgatcatcatagtcaattgggagacgtggtgctagcgcaacgcaagaatcttctgacaaaccacaataaccccaaccaccatagtagaaacactagcttaggtgaaagtaggagcagccaacacaaagagggatgccatatattctttctcttgcgggagtgctattcttttcccatatattaatagagaagcagcaatacaaaggcctaaataaatctttaggcctttgtattgctcttctctattaatatacaagtgcaaagctttaaaacttaatagatgcatatgggccaacttcttatagggatgagattgcccttcctaaaagatgtttaggacattaagtaacttttaatcatgacatttcatactctttaaaatgtgtgtatttttagggacatttaactccatgccacttttaagatgtggcaactaattatttgccactcgctgtctatgacatgtaggccctcatgtggctatgacatgtgggtccagtagcaaataatttagcaccactcgtaggagtgacaaatagttaattattctgtatttttaacttgggggatgatacatgcacatcccttaaaaaaaagaataacaacatgacaacaagtatcatgccaagagagctatactatagacacgaccttcatcctcattcaccaagttttcatgtttttatagtaaaactaattcaaattggtctagctcaacactagactgcaggcatgactatatttgaactgttttccttaagtagaggttgcacacttatccatagaccgctcaacaatatcagtaagggaatcgaacccatatgttccatgaacctcatgaatggtaagtcaaggtaatcagcatgggtacaatgacaaaggcttttacattacatgccattcccagctagctcactagaggatattggttggttccaccgtgatcgtaagcactccaagcatataaaatattagtgatacatcattggtgtcatactatagtcggcttaactatatgcctgcaactaaaaattatgatgtgattccctagttgatacaaaggcatactatagaatatatcgatgcaaatgtgttatgataaactcaatacaaatgcaaggatggccatcaacgtgctctagtgagcgacaaacacaagcagactaatgggaattcagcttccaaaaaactagaactcgagagacgctccactgcactagagaaatcagccatagtttcacctgaaaatccaaaatgctgcactattacaggctcgaacactgctcttgtcattgaagccattatgtttggactaggcaacattccatccgtggcaaggaaagcatcatagaccatcgtcttgttgattcgaaatgaaccctcatcttcaatgatcgaatctaattccttgtccaaaggtgcatagataggtatgtggaatgtgtcaaacttttctttgcttatcataccctataaataagttaaagtattctcagcaaacctggaaagaaaccttgattccaataattaattcatgaagttcctttttacaatagaatgccatgagctaaacttaaagatagaaattgtgatattgcacgaatattaaccatttttttcgtgtatagaacttggataggatccatggcaaaaaaatttgccagtttaattttctgtcccaaaacattcaaacttttaacctcggatcgcatcgagattcgtgtggtgaagggaaaagaatcttgcaagtttgcagggggcgtcaaactccagacctcgtatgtagatgcttaatgtggtagccaaccagccatgcacttgtttgctccagttacatacggtatatacataagttacattgtaattatagtgtagttacaatataatattaaacaccaattacactctagtgatatacgaaagtttttcataaaaaaacattaacttactctcgatgccatgtcgttcaaggctatggctagcagcttccatacttgagttgacttggacgcatggttgcttgagcatctgccaaccaatgagaaaatcagctgacctccaagaactagttcttgagccctcaaggacaagaacagcgtgaaatcctttctgaactgtcgagcataagcattggcaacaatttcacggttcaatagcctcaatttatcgtcactatcgtacattgggattttactcttcacaagctcttcaggtgcctgcttgtaaaaaggcacaagtggtgaatattgaccaattattccatggcaacatatataggggattcttatgctgttcacatacatatagtttactgaatctagttgcatgcctacctctgataaccaatgcaggctgatggaggagcagaagaaatgcactgaggtcgatgtgaaaagcctatcataaaatgacccaggtaccatgctggtgacaatgatgtgatgggaggaactgtcctggccatgcttgaattctcccaaactttttgcaacggtgttgaagtcattgcatggaagatcgttcaagaaaatgcacatttctggttgtggctgcttgtgttccatgcaataacggtggatggcgttgaccatagttgaaacgagagtgagtgcgttggggccggaggagcaacccaagtctgcgattaccatgctcttagggagagctgccccacaaaaggctttgatggcatcctctatgagaggtttcatcctatcttgcgctattttctgcaagtgtaattctttcttagatattatgcttgttttactgaagagtgtgttctatagaaaaataatcagctggaagcagaaccaaattatattgtacatagtggagatgctttccatttcacaatgctgctaatttacacattgtcacgtgcgaggggaacaccgtacccccgggcatactacggaaaattctagatagtgggcttcttcaatattcctcagaaaagccaattttggctttttaagaataatctcaggtaatcatgaaattaaaaatagctgacaggttcatagcaacagccttagaggaaaaaaaggtgccatgaagagcctaactgatagaatcctacaataatttatacatacataaaaattatatatgtatatttacaaacagttttttttaaagaaaaagaaaagtaaatttgctgcttgacattgggttcttgattgacattatagaattttaaccaccatcattattttctttgtattgaagttcttatgcttaagtactcataatggaacatagtctacaataaaaacatgatcatgagcatgtaacaaatgatttgtactgtagaataagaacttatacgaggtaactccgaaagccgcaacctcattccccgcttggccagagaccgcaagtggctatggtgacggtagcagcaaccacatccctagccccgatctggcagccccagccccgcggcggccgtggctgctgccctcacggtgtggcacagggcccccccgcaactgacactgtgtagtcgccaatgatctggctaaccatcggagagaaggaacaagtggatctagctggtattttcttgggtgattttttgatgtttcagtctatgtatatggatgttcattagtaagatcaaagtgtttcaatggggtgtttttatggtgtttctttttcatcttcgatttcactcagatcttgttgatgttgccatggctttaaatcatttgttttgtatgttaaagcaaattgtttcatctggtgatccaattgtgtttcactattttcaagaactgaagcattctttccctagttgtctcgtgacttttcttggaaaaaatagtgcgagaaacctatttggcacacagttgtgctttgctccattttctgtcgacttctatgggtctatagggccaaacaaatatgctttttttcttattctattgagtgaattaaaattgattgaaattttttatagttataactcaattttaaaaatcttcatatgtattttagaacatttcaaattcaaactttcaactaaaaatttaaaactttcaattcatattttcaaaattttcaactcaaaatttaaaactttcaactccaatttaaaatattcaactcatattttgaaactattgactcgatatatgaaactttgaactcaaaacttttcaaacctcaacccaaactttgaaaattttcatatcaaattcaaaactttcaattgaacttttaaaactttcaacttcaaatttgaaaatccatatccagatttaaaatattcaaatcaattaattttattattttattaagaaattattgtagcgcttagcactaatcacggtaattagacaggcgaaggagacgcataggccacactttatttttgttgaatgggcctaagatcaatctaaatttagtggttacatggcacatccaagcaatgtttctgaatttaagatggaaaaacttttaggctcatatttaatcgccattttgggccaagaacaagccttccaagcaagcctttagcattaattttactatagttgataccccgctctttgctgtgggatatgtggattaatgcatgttatacatcatggaaatggtagacatatatctttaaataatgtgaaaacaatgtagagataatgatttgacattgcttgcatattgagttctaaaaatacaataaaattgtaaatgatatgtcatgtttgcatgatatttaaaatactatagataataattgttagtgggtgatgatgtggtatacttgcatatgatttaaaatactctagataataattgctagtggatgatgatgtggtacacttgcatgtt

SEQ ID NO: 21415 - DNA, 2524 bp, Oryza sativa
accactaatgggcgcataatcgagtttagggacgttaaaatataatttgagagtataaggacctagatgacacacctcgacaagtttgaggaccgtcgatgcacttcactctaaagaaaaactagcgagtcaattgcacagcggtcttttatccggacccgtgccgagcctccgctcatgttccgattttccctgatccgaccgatagcaaaaagtaaaagtatctgcagagtcatgtatacgtaaatatgttgtcatgttccatgtaaataaaaaaaatgatcacactgtagtcacgcaaatgattaatctgtcatgggcacgagtgggtataatgggccgaaaccgaaaaaccaaaccaaacatatcgagaccgaaaactcagtccaaaattcgggtagcaactctcactgtccgaatttatattgtgtttgaaagtgagtttgattaagctattaactcgtttaccgtgagcatggttcttacgctactaaacggaatgatttcttacaaatatttttttatataaaagctttcttaaaattaaataaatttattttcaagtatgtagtaattaatacacaattaattatatgataatgacttttttacgtgccactaaaatataaaccaaactgccgatttaatggtcaattcggttgtttgtctcggctaacccaaatattacaccaagctgctatcgtggtattgctatgatgctatcttcacagtttggtgtgttagacattgtattattgtcgatgggggatacccataaaccggatatagagtgtattggagtccgttggtacgagaatctacgtagtacgacatcaagcaaacgtaagacaaggattatactagttcagtccccttagtaggtagtatccctaatccagttggtataggattatatgatggaaaccactgattacaaagggaataacagaactcgatgataccgacgagaccgtagtcgagttggttcgactagatctcccggtgacttggctcctgtaggctctggctccgtaggctgtggtaggtgtgttggcggggagattcgatgccttaagtcctgcctgagggtcccttatataccgcgggtcagttgatctccaagtagaactcggagatatcggacccctcacgatatggtaaaaacccaacctcgtccgagtaggactccacccatccgtagattctgcttctatcacgggatagatttccttgacgtacacggaaactatccatatacgcgcgggttatccatgttagtatacaacatatattaaggatagagggtatactttatccataaccctaacaattattatcttgtaatattttactatgaaaacattggtccaacttgtaagagaggcaatgcttccaacattcatttgtaatttgtgcaattatttatcagctattctatatatttaaatttggataaccaaaattttcaaaagacccaaccgaattgttcggtcttaccgattaccagtatcattactacggatttgaatcaggtgtagtcggtacgactacaacttatacagtcaagagggtgatagatccgaatccaatgttcaaaatacgtttgtagcccactatagcaaaaattgatgggtacttttcatcgacactgtagctaatgatctggtcaattcataaaaggatgggatatctcctattgtgtatagtaccttaccttgcagtcctgccgtgttctttccggtgagtttctaactcatttttctcgtttttcgcgtgcacgtttttcaaaccgctaaatggtacgcgttttgtaaaaagtttatatatgaaagttgctttagaaaatcatattattttatatttaaaagttttttatagccaatacttaattaatcacgtgttaatctgtcgctctgttttcagtacggaacaaggagttctcaaccccttcgaaagaacacaccatagtgaaaccgcagggaatcccaatcccgttacgacacactgctgcattcggaagagagcagtggaagccggtcgactcaaaacttctttattgatgcaagcaccaacgagtgcttctccggagaaaacgacggtgacgggtggccgacggcgcgggtggagtgagctgctgagccaatcgagtcggcggccgacggggacgcgaaccatcttatctcatctcacggcgacaaggtcgaggccgtacccgatcggccacagcacaggacgccgcgaaataatgctgtgtaatgctggatcagtcaagtcgacgcccgcgctccccgctgctgcaagatgcatggcaccttcttctcttcttgactagtactgtgaagaccaagggcaggactgactgatgagtgaccacttccacttgatcttttcaaggaataggacggcaatggccttctttagatcctccggggttaaatagctatataaaatattgctatttaggagtattaaacataaattactgacaaaactcattccataacccctggactattttgcgaga

SEQ ID NO: 21416 - DNA, 18227 bp, Oryza sativa
aggacatatcgcatcctatgttagattgaggctgtgtttagatctaggggtaaaattttttgccttgtcacatcggatatacggacacacatttgaagtattaaacgtagtctaataacaaaacaaattatagaatccacctgtaaactgcgagacaaatttattaagcctaattaatcctcattagcaaatgtttattgtagcaccacattatcaaatcatgaagcaattagacttaaaaatttgtctcgcagattagccgcaatctgtacaattagttatttttaagcctatatttaatacttcatgcaggtgttcaaacgctcgatgtgacaaggtgaaaaattatgaggtgggatctaaggcatggtttagttcctaaatttttttcccaaaaacatcacatcaaatctttggagacatgtatggagtattaaatatagataaaaataaaaactaattgtacagtttgcatggaaatcgtgagacgaatcttttgagtctaattagttcatgattagccataagtgctatagtaacccacatgtgctaatgacgtattaattaggctcaaatgattcatctcgtggtttccaggcgagttatgaagttagttttttcattcgtgtccaaaaatccttcccgacatatggtgaaacatctgatgtgacacccaaaaattttcttttcacgaactaaacagggtttaaaacatggcctgaattttttgggttagggtgtgtttagttcacgccaaggcctggtttagttcccaactttttcttcaaacttctaacttttccatcacatcaaaactttcctacacataaacttccaacttttccgtcacatcgttccaatttcaatcaaacttttaattttggtgtgaactaaacacaccccaaaattagaagtttgattgaaattagaatgatgtgacgaaaaagttgaaaatttatgtgtgtaggaaagttttgatgtgatagaaaagttggaggtttaaaaaaaaagtttagaactaaaccattccttacagggagcatcctgctgctgttgctgtcgcctgtgtgtgtgatgtgagcacctctcatttgctaccatgttcacgtgctagcacagcactagcttagcaatgtgtagcagcagcacgccagtacgagaaggtaaggtgtgcgaaccgtgcgagacttccactgtgaatatgtgagaggggcaatggcatatgggaaaggagacaacacggaactgggacaaaatctactagggctgtgttaagttcacaccaaaattgaaagtttggttgaaattggaatgatgtgacggaaaagttaaaagtttgtgtgtgtacgaaagttttgatgtgatggaaaaggacacgactacgcgtcggtcgtccgacggggagcggggaaatcgggcgctgacgtcaggatttatgtgcaaaactattttaaactgatttttctcttaaattaattatccaaatcatgatccgattgcactattaaatttgttgcaattaaatcttttaaacaagaccacacatggatatattccgacgaaaaattttatttagcttattattgaattatttttaaatgttgcacgatatttcaccaagtatatcggaattgtttcaataagcacatcgaaaatgtttcactcgtttaaatcggatgttgtttcaccttatataaaaacaatgtttcagcaaatagcgaaagaatatttcagttcactgtaaaattagatctatacatagtgaaatattataagtacactaggtgaaacatttttcggtggaacaacaaataaaatgaattcccttaatagggggttttcaaaatatatgggttttctattgcaatggaatatttcagttcactgcaatattagatctatacacagtgaaacattgtgagtacaataggtgaaacatttttagtagaaaaaaataaaccaaattcccttaatagagaggttctaaaatatatgggtgatttgttgcaacggtagataggagcatagacatggtggggccaggcctgtatgcagcgcgtggggggaggggcgcgcccgggggggggggaggggagcgcccgatccggctaccctcgcgctggacgaccgggtttaatcattctcgggaaaaattagaagtttgaagaaaaattttacaactaaacactgcctagtttgtagtgcatagggttgtgattgtacctgccgggttcccatttggagggtgggagagagtgggagtgccagtgcagttctatctccccatgtaggagtactacaattccacgcatcaatacgcacaagccttcctatcataggctcatagcccattctctctcttctcaaaatatacttcatccattttatattataattctctttaaccgttttataaaattcttttagtttgatcaaatctctactataataaaaattaaagatgtttttaccggtattttgatatgtcatctttatttgagtcggtttttaagtttgttcgcttttgaaaataaagatccgtgtttgagtcggattttaagttcgtttgttttgggaaatataaaaggagtcatataagaaatctcttttaaaaaaaactcgcatgctaacttgagatgaaagttagactcttaattgcagctcatgattttcttaaaaaaaatccaagcgaattccaaaaataaattttatcctagctaaaccgtataataataataagattaaaatagcattcaccggttgaaacgcatgggcattttttcttgtgtatagaaaaatttagctttttctgtaacaccaaactactttcattagatgtaacgttgaatatattttgataatacgtttgatttatgtagaaaatattactatatttttctttgaatttactcgaaaacttaaagtgacttacaatatcaaatggagggagtagtaatctaggactgaatgagacaaatactagtgtcagggttacgagtaaggtgtaccctctacccttcgatatacgtcatatatcgatatggtatatttgcgcgtatacggacgttttcggcatacgttaaggaaattcattatggagttcacagatggaaggagtcctactcggatagaactgggtcgtcattgtatcgtaccgggtccgatgtctctgagtcctacttggagaccagttgacctgcggtataaaagggaccccccgggagtacctaaggcatcgaatcttaccgccaacacatccaccacagcctacgaagccggagcctacaggagccaagtcgccgggtgatctagtcgaatcaacttgactatgatctcgtcggtatcgtcgagttccactattccctttgtaaatatgtggtttctattgtataatcccatatcaactggattagggctattacctatcaaggggcctgaaccagtataatctttgttttctgcctactcgatgtcgtattacgtagatcctcgtaccagcgtaccccaataccctctatatccagtctacgggtatcccccgtcgacagtggcgcgccaggtagggggacttggtgctcaagattctactactgtgacatccagcttcgtcgacaacagcgtcaacaccaacctcaaccaaggagttcctacttcaacgatgctagtgtggactcaagtcggcgaaatcgtcttcccggtttacaccacggtgccgatctcagctggtccatcaatggccggaaacgagaacgcagtggctacaacccagaacgattccatgtcgaaggatcctcccgctgaagcggagatcggaacgtcgacgacatccgagcccgagaaggatcctagtgcggccaaaccttgcctttccgacaagaatcacgagccgacgaggatgacttccgaggtgacaaggtcctggtgtcctatccacaaaaccagaaaacacaccttgcaagcctgttgggtttttctcaacgtccacgctgaaattcgtgcctgcaaagagcgtggaattcagcgtacttctccaactcgtgatgtctattgtcctattcacaagacaaataatcacgacctctcaagctgcaaggtctttctcagcgccatgaaaacgtcacctcctaaggtccagcagtcacacatctccctcagggatgaggacaaggaacaaggagcgacgctgatttcagatcgaatggttggggtaatcggcatcgatccccacgaaccatcagtcttgtacctgctcgaagactatggctcatcgtcaacgagtacgccgcgcgaggtattggctatcgacgagaccggcacatcagcgcgcgccaatgcggaagcggagaatcaagtgactacaccggcccagcacatcagggccgtcaacgtaatactgagggaaaccccctacgatcccgttctgaacgacgatcttgcacgatggacagaacggttacaggaatcagtgaccaacccggaacagccaccaactggcgatgctaatggtgaaaaccctgaacagcgggaatcgcctcatcgagtcacccctccacctcgcggcaccggcgatctccgcgatcacctgaatggccgccgagaggcgcgacgcacacgagacaacgagaaccgttcccgacatcgcgtctcttcacagcgtcacgataacgaagaacgaggaggccgttcgagcgaagaccgagaccgtgataaccgccacgatcatgacaatcgcgaacggcgggtgctgggcgatactggtcgaggacgtcgccataatgatgacgatgatggagatcgccaccaagacaacaacgggagacgatgataagattctcgagaacccggccgacgtcctcataatcgtacgccggagccaagtgacccatcgtcatcgtcgtcatcttcctcatcctcatcatcagatagacatccacgaaggacgtacgatcgccgacaacccaccgcccccagcgctgggtgtagagctttcggtcgttcacttcgagatgtccaatggcctgaaagattccgaccaggagcaatagagaaatacgatgaggagtaccgacccagaagaattccttcaggtttactccacggtactctacgctgccggagcagacgacaacgcgttggcgaattatttgcaaaccgcattgaaaggctctgcgcgttcatggctgatgcatctccccccctactcgatttcttcatgggcagacctgtggcagcagttcgtcgccaacttccaaggaacttacaagcgccacacgatcgaagacgacctacatgcgttgtcacagaacccggatgaatccttgagggattatgttcggcgctttaatgagtgcaggaatacaatccccgagatcaccgacgcttctgttatccgcgccttcaagtccggtgtcagagatagctatactacctaggaaatggcaacgaggcgcatcacgactactcggagattattctaaattgtcgatcgatacgctcacgcggacgacgcactgagacgcaagaatgacaaaccgaagaccggaggagagaagaaaccagtcaaagacgcacctgagtcgagcaagaagaaaaatcgcaagagtgggaaaaggaaagctcaagcggatgttctcgcaacagaatacatggaccctcccaagcgcccagacccacaaggcagcgacacgaagaaaacatggtgccctatacacaagtcagacagacactctctagaagattgcctcgtcttcaaaaagtcgctcgcaaaacacatggcattgaaaaaaggcaaacgagtacgtgtggtcgagaaggacgctgaggcggctactcaggaatcggactcagcataccagactccgatctccatgtctcgcacatcttcggaggttccacggcatactcctcaaagcgagaatacaagaaggtggaacgtgaagtctattcgacgtggcagggggctgcgcccaagatgaagtggtctgagcagaagatagaattctcagaagaggaccaccccaagactgctgtcatcccagggcgatatccgatcgtggtcgaacccactattcggaatatcaaggtcgcacgagttttgatcgacggcggtagctcaatcaaccttctcttcgccagcaccttggacgcaatggggatcccacgaagcgagttgacacccaccgatcaacccttccatggaatcactcctcagtcatcgtccaaaccattgggcaaaattacgttgcatgtgactttcggccaagcaaataacttccgaacggaacagatcacctttgatgtcgctgaattcgatacagcatacaatgccatcattgggagaactgcactcgcgaagttcatggccgcatctcactacgcgtatcaagtgctcaagatgccgggaccgaagggaacaatcactattcaagggaatgctaagctggcagtgcaatgcgacaagcggagcctcgacatggtcaagcacacgcccagcccacccgtcacagctgagccacccaagaaagtgagcaaaacaaacaagacaccgaaaccggacggcgcaatcaagatcgttccactctccagtgccaaccccgacaagaccgtcaagattggggcatcactaggcgagaaataggaactcgcgctcatcaccttcctccgcgacaatgctgacatgttcgcttggcagccgtccgacatgccgggggtacccagggaggtgcttgagcacaaactcatggtgcgacccgacgccaagccagtaaagcaaaaactatggagatttgcaccagatcgaaaacaagcatacgagaagagctcgacaagcttctcaaagctggtttcatcagagaggtactccatccagagtggctagccgacccagtcatggtgcggaaggccaacgggaaatggagaatgtgtgtcgatttcaccgacctcaacaaggcgtgtcccaaggatcacttccctcttcctcgaatagaccaactggtggactcaacagccggttgtgagttgttgagcttcctcgacgcttactccggctaccaccaaatcagcatggcgaaagaggacgaggagaagacggcattcatcacgccgttcggggtattctgctacgttaagatgccgttcggactaataaccgcaggaaacaccttccagcgcacagtccagggtgcacttagcgaccaactcggaaacaatgtcgaggcctacgtcgacgacattgttgtcaagaccaagacaagtgactcattgattgacaatctgcgggaaacgttcgacaacctccgacggtatcgcctcatgctcaatctagagaagtgcacgttcggagtaccatcgggcaagctactcggcttccttgtctctggcagaggaatagaagcaaatcccgagaagatcaaggcaatcgagaacatgaagtcgcctacaagactcaaggaagtacagaagctaaccagatgcatggcggcactaagcaggttcgttgctaggatgggagagcgaggacaaccattctttgctctactgaaaaagcaagacaaatttatatggacacaggaagccgaagagccattcattgcactcaagcgctacctatcaaatccacctgtacttgttactcaagcgccactactttcaagcccacagggtcacagttgtatcctccttccctctcggtgaagtagtgagaaacaaagatgttgtcggccgcattgcgaaatgggtagtcgagctaagccagtttgatgtccactttgtgccacgaacagccatcaaatcccaggtacttgccgacttcgtagctgattggactatgcctgataacaggtcagacaaccaaatcgataacgaaacgtggtcaatggcgttcgacgacgcactcaacagccaaggagcaagggcaggattcatcttgacatcacctttgggagatcaattcaagcatgcaattcacctcaacttcagggcaactaataacacagccgagtacgaaggactactcgccgggataagagctgcagctgcactcggagtcaggtggctgatcgtgaaaggggattccgaactagtcgcgaaccaggtgcataaatattacaagtgcactagccccgagttatccaagtatctcgcagaagtcaggaagttggaaaaaggttcgatgggatcgaggtccgacatgtataccgcaaggacaacattgaaccagatgatctagcacggcgtgcgtccagacgagagccactcgaacctggcacctttctagacgtcctgacaaggccatcagtgaaagacgcaggcggcgaagatagcccggtctccctcaacaacagctcgggggctacagaggcagagcgcgccgttgccgatatcgagaccacagacgactggcgcaccccactcatcaaattcgtaggcagcgaagagttgcccgaggacgacgcagaagcctagaaaatatcccgtaaagcaaaagtctactgtatgatcggcaatgatctataaaagaaggcaccaaatggggtactcctaaaatacgtctcgtccgacgacgacagacatctcctcctcgacatacatgaaggaatctgtgggtcacatgccgccggtcggacattagtcggaaaagcttttcgagaagggttcttctggccaaccgccctcaaagacgcctacgacatggttcagcggtgtaaagcctgttcaatttcacagtaaacacacagggctaccaacgcaagcactccagactatccctctcacttggccggttctggtggtgggggttaaatatactcgggccattcccacgaggacagggcggctacagattcctattcgtggcaatggccaaattcattaagtggatcgaagcgacacccacgggagaaatcaaggccgacaacgccatcaaattcatcaaagggatattctgcagattcggattgcctcaccgtatcataacagacaacggctcctagttcatcaatgccgatttccaggattactgcatcaggctgggagtcaagatctgtttcgcctcggtttctcaccctcagagcaatgaacaggtcgagagggcaaacggcatagtactacaaggaatcaagacccgcgtctatgacaggctcatgtcacatgacaataagtgggtcgaagaactcccatcaatactatgggccgtgcgtaccacaccgacaacgtctaacaaggagacacccttcttccttgtgtacggctcagaggccatgctccccaccgaattacgacatcaaagtacacaagtacagaaatattccaatgaggatcaggaggaacagcgaaacgacgatgtgaatctactcgaggaacatcgcgaacgagttgccgttcaagcagccagctaccaacaggcccttcgccattaccacgagaagcgcatccgagcacgcacactttcgatcggcagctacgtcctctgacgggttcaaagtcaagcagggcgaaacaagctctcacccaaatgggaaggaccgtacacgatcacacaagttctgcggccaggcgcattcaaaattgcagacggtgatggtcgcgagttgtcaaattcctggaacattgatcaattacgtaaattctatgtataagtcaatagtatccatgcttgtaagacatcttacagcttcaataaagcctattttcaggtacagactacaatcaaagtgttccttcccgatgatcccttacccagatgacacctagtgttgaaacctatcctcatgtccctttacgccgtcttgacaaggcctccgaggaacctaagggaacttcggctggggacgcccagagccgataaggccttgtcggatcctatagagacgaaagaccatgtaagatctggtcgtgtaagagttctcgccgtgcgtattaaccaagccgtgtaatcggaaataaactttccaacttcacggctgggggctaggatcaatgcttgttcaaccgaggcaggtcaaaggtccaagagccttatcttccgagaagaattctccgatgacaaggctgggggctagggagagtgtataactcaaacgactgatcgaagtcgcgaagtgagaagacactcatacacgctacatccagagtaagaaagcttagttagatagatttcttttctatttcacaagtacttcttacaattctataaaaatccaaaattatattaaacttttcccctaagacatttgtcacaagacacggagaccttttccgccagcggcgccatcgacttcgccaggccatctatctccgtaggagttctccgagaacgagaaaacccttcgtggaggaactcgaggtgcagctgcggacgatgatctcgtatacaagccaatacatgccccccggcatatcagctcgatcgacgacactcctgcttcagggccttgtcgatacactggtcgatgccctcgagctgggcgcaggccccattcagccacgagatgtatccagccgccgattcctcgggatccccacggggtactcggagctctctacagacccttgacatggaggtgcagcaactcttcagatacgagttgaaccacacctcgcgaccccggagtgtctccacggcctggtccttcttcacttccagcatagtcctctcgagttccgcgacctcaaacttcgtcctccaatactgggtgcgacggtcctggtcagcaagcgcactctcgaggtctgctcagcatggaaacgactaagtcaaactgctcttctctcccgagaatacagcaaatcaagtcgatccagacggaagagtaaaggagatgaaaacgaagataaccaacctaagggagtcgtcgccatgcccgtttccacagcgaattttgagctacatcgccctccggcacatgtggcccgaacacaagtgccggaacgatcactggcaactcaggctgcccgcgctgctgaacatcctcgacatcaacatctctacaaacgacaacaaagtactcaagatcaaaatgctaaagaaagctaaggcgatgactgcacacacagaggcggttggaaccaatgaaagttttacaaagcgtgactaaagagtacaagagagtcaaaatcctactcttcaaaaagtgggagaacagactcccccagatcgccgacttcttccatcacatctttgcgcgcgtcgctagccgccccctgatccaagatcttccgcagatcgagttcagggtgcgccagcctcacacacgcaaggacatggcacgccccggtatagatcccgttggacgtctcctctccgatcctagccgcgtgcttggaggggatctcctccatcgccgtcgcaagctccgcaagagaagtcgtcagcgagaactcatcgggattcgccgggatggtagacttgataccgcactcccggcgagctggtgcagaccagtataggtgacccgcaacgagccacggatttctgacaagttgttctcaagctccgacatgcggtgctcgagtccctgccgttgtcgctcattgccggccaccagctccctcatcttctagaggtcctcgcgaatctccgccaaatcgtgcgccagccggtcgacgcgctcattcgccgacgacaccgccgccgcgagcaccagcctcgaggaggcaccccatctcgacctagagctcctcccaggtgaggacggcagccggcggaccacgatcagccacgagatcgctggctgggccgctaggtgtcgcctcgcggctcctgggcacgaccacgacatccatcgaggccacagcaggagacacgctggaggtccccccagacccgtcttgcaccgccttcgcccgcgccgccctgcgaaaggctacaattgagacagactgcaagagtttgacgaaatcacgaaacctcaaattcattcacttgcttctcgccaagcgtcacaagccgctgccatcgcggaggcgggggagacgcatccgaggcctggagtgtaacgtatatgaggtgaggtggaagttccccgactacgcgacgaaggaccaggagaacttactgagggggtgggcgtcttccgacgatgtccgatcacagaggagaatttcctccccttcttcagaacgttgccgccactcgttgtggcagcaccgtcagacgcctccttggcgactttctccttcagcgacgccgccacctgatggtccacgagcggcccgatgatgtcagtcagagggagagcctacgcttcatgaagtcataatgcgatcccggaagaaaaatgcaaaaggaccgctgagtacacttacattgatggcagcttcgcgctcggctgcccctttcttgcaaagggggacggggacgttgctcaccattgtcgggccactgatcatcagttggccgacgcggcgctccacggttgcgctgtccaagcctgtagatcgagaccagaattcgataagtcaggaagaacacgcacataaggtagtcaatttaactaaaaataaaaataccccgaggagaaacctgggtcgcgtcctccggcccagaataatcaaaggctgggtgggctcgagcctggagcggctggatccgcctaccaatgaagtcggcaacgatttcataccccgacaaccaccgtactcggaggtcatcaatgatatcgatgaaagattggaggaatggggtcaaggcgggtttggtggtccaagatgaaatcttgtctggttgctccttaggaacaatgaagaccagatctaaatcttctatctgaagatagaaccacctcccctgccatttgctgcgagatgaggggcactggaaggggatgtatcgcgacttcaggccatcccgaagtcggaaaccgacacatccgaacacctttttgggttccatctagcgcaactcatagtaaaagcggaagaggtcaagaaacggctctaccccaatgtaggcctcacaaagatgcgaaaagatactcaggaaggcgatggaattggagttcaaatggagcaaggaaaggctgtagaaattcaagaccaagagaagaaattcagaaggcggaggaagaaagccacagagaatatagtcctcgatcgcaaccatgcgacccaggacaggctggggttcagtacctcctgcttctctctccatggtcccgcgatcgggaagggcgccatcctcctgcagcttcttcagcgacgcgctggtggaggtagacttgtcgagatccaatgccgccggggatcgccggagaagacgagggacgcttggaggctagagagttttttcacaacaggcggactttaaattggatccccaaaactcccttaaatagacgcacttccgacggtgcgaattccaaggaaaggagagagatggccgccggaaatttctgggtccattacgcgcggcagtttttcggacttcaatttaaattcactcatgaccgttgagcttcacctggcgttgtcgatcactccttgtctctcgatcctcacaccgagaatgacgacaacctcgacatcagaagtcgcgatcggtttcacgagttcatttaagcagaagtcgggggctactgtcagggttacgagtaaggtataccctctacccttcgatatacgtcatatatcgatatggtatacttgcgcgtatacggacgttttcggcatacgttaaggaaattcattatggagttcacagatggaaggagtcctactcggatagaactgggtcgtcattgtatcgtaccgggtccgatgtctctgagtcctacttggagaccagttgacctgcggtataaaagggaccccccaggaggacctaaggcatcgaatcttaccgccaacacatccaccacagcctacgaagccggagcctacaggagccaagtcgccggatgatctagtcgaatcaacttgactacgatctcgtcggtatcatcgagttccactatttcctttgtaatctgtggtttccatcatataatcccatatgaactggattagggctattacctatcaaggggcctgaaccagtataatctttgttttatgcctactcgatgtcgtattacgtagatcctcgtaccagcgtaccccaataccctctatatccggtctacgggtatcccctgtcgataactagtactatgagtctgaatagatggtatgtcataatttgtagtattagaatgcaccccatgttctaatttgtaggttactatattttgagagttgatggacatacctactcacactattaggttgtgtttaatcttatcctaagttaatttattttgaaacacagagagtacattttaatatctatatctatacctatttaaaaaataggtaagacttcgggatgatatttttcgtaagttatttatctagcgttgtcaccacgcgccagagtacttcgttcgtgtaatttggtttgatcatgagtccaccggaacaattaattatccgggctttgccctgactctttccaaatcaatcgatctacatcctaggatacccagatacggctcacaagccacgtatccatatcggatacttcatcggatacgtatacgtatcagatacgctccgatacgtatcccgtacgtatccctaattaccacgatataaaataaagaaaattacttggatacttctctgatacgttcccaatacttctgaactaacaaacccacgcacgcagcacagaagcgcagatcgaatcctcctgcagcgccgcttgcatcgctaccaggggcacactgcacagggcctccacgggttggccgccgggttccgccgccgctcgccacctgaggagcagggcctccaccgccagccgtgcgtcacgtcgccacccctggtcccctgggcgcagggcctccgccgtcggtagtcgcggcatctccgtcaccaggcgcagcttctccgccggctaccaagcccaacgcgtacagtccatcatcaccggctatttggttctttccccttttactggttgttttgttatgtgtttttccttgttatttagatccggtgaattttagaattggaagcttaaccacttatctagcactagtatgtactgctagcgcggctacagattcatcagggtcacttgtgaccaggcatgggagcatattatttacaaggggcaagctacatgatgagcttgatctcctgggatagtactattaaaagatctggtgcatgagacctgtctgggatgtagctctttcaaccacatcgctggctatgaatgcaagcagctcttgaacttctattgagttgaacttatatccggaacaagttttattctaattatctctaatgatgtcatgtaatttgtataactctatttgcaggcttatagttatttatgtgttatgtttttcctttgtattttttatttttttaaatatatatagacgtatccccgtatcggtgtttttaagaaaatgacgtgtcctatccccgtatcgcgtatccgtatccccgtatcagggtaacatagtctacatctatgaattaggttgttctcatgtgggctggctaggcctgtcttgcactgggctatgacactttctatttctaaaccccaaggtgtgattaattacttaatcttctaggtctaaggttaattgagtaattatcctttcttaatctaattttggttcgatggatccatataagagcatattcaaggccttggtagaggcttttagaaactattatcttatcttataataatagttgagacgataaaaaaaacttacataattaatacactaaaacaatatttcatttttttctttccttttcttcattgtcatacaacgaaaattcattttataagcgttaagagttgatattaagccgttgtaatgcgtaacaacactatgtttctctctttcttacatgttagcaaagttaccttgttaacaactataagaatctaacattgtacatgtcctaaggcgttgtttatttcagcttaagattattataatcgattattgagccagattactataagctagattataataagccggcatagaataagcggttagctgtttgtttctctggattattagttgtttgttagctgttagccacctaataattaaaaaaacacctttagagtggattactatcttatagattgtaataatatatcgtaatgagctatatgtttatttcagtttactcctaataatccagattataataataatccagattataataatcctaagctgaatcaaacagggcctaagtctattattggttgggttggttgggttaattagcctgccaatgttatggtctgatgctaactaccttcatccaacatcctacttcattacatatcatttcctttatttatgctctccattctgggaattatgtaataaatgcttactttatttatgctctccattcagtgaattatgtaatgtaatataagtggttgtagattttttaagcaaaggctaggaatttttctattatctaaaatatcatttatttatttgtcatcttacatactttaaagaaatcacaggaaactattcgtatcaaatttcttttttttcaccaaggacgatggatcccacgcaagttcaccggatttcacccattgcaatgcactaacatattttttagttaaaaaagaaaataatacatcttaaaagcattaaaacatatttttcacaaaacctttggtataaacccaggttttactatttgtttcattgaataccagatttaagataaaatatttcataaaacacatgtacaacattatatcgtttatttaactaatatattttaatcgattatggtttgattttttatgtatatattttaaccgattgccaggttgttaactattaggattatcaagttttatgagtgcaaaattgagaatacatgaacggtagaaaatgcatgtgcacttaagagcccactaatgtgaattcatgtaaactaatcatatataataataaaatatgagtattttatataaatataaggttttaaataaatgttgttttaaaatataaggttcctcaaaataaatcacaataactgaggttgtgttacctacggatgccccaacacctaagattttgtgaaatttactcttaccgttaatttgcttctttggaaatctgcaagtgtgaactttgaagatggatgctagtatgctatccaactgctttaccaaagagccaataagatgagtcattttcatagtcggtagctgctgatgaataaacctatacagaatgaaatatcccctaaaataacgggggtacacaaataaaggacatgggggtgtctgttcttctaagcaagggagaagaggtagcaaacaacatagctacacatgcctttctcagccaatttccatgcttttgaagctatacctaaaaaaaacccatccaatgcaataatagcattagttctcacaaatatagagcatatccaggcaaaatttcaagatgccatctcttcaaccttttttttttctagcttcaaaaatggggaaagaaaaagacaagataagaaggcgattgaatgatcatgctgaaaccagcctccaccacagaactatgaaaactgaaattgcatccttcagaggccccccaaggtgctgaaagcctgaaatatgtataacaaaaaaatgaaaaaaaaaaactggcttattaatatagagaactatggccaattacatgcaattcagtaatagacattcatgcaattacagaattgtttcttttactagctgccacatatcttattccatgcacctcaaagttatccttgcaaattcaccatttactctatgcaagctcttaaataatcgagagggcaacctttctaatacctctgtcaagaaacaacaatagataaaacgggaatgaatcgtggaccatggattgcatatcctaccacactttttagttgttttttttagataagggtatttttgcctggcttctacatccaactggaacttagccctgtaaacaacccaatctgaaattcactcctatggagatttgaactcagcacgttgggatgctactcaggtcactgcaaccaataggctacatgccctcgccccacattttttagtatagcaaaaatttgagtaaaagggtaggcagttcacttacattcttgaatactacatttgaaccacatcttcaccagcactt

SEQ ID NO: 21417 - DNA, 1091 bp, Oryza sativa
atttgaactcagcacgttgggatgctactcaagtcactagcacccaatacgctacatgccctcgccccacattgtttagtatagcaaaaatttgagtaaaagggtaggcagttcacttacattcttgaatactacatttgaaccacatcttcaccagcacttgaataaaagagagctaacttttattttctcgtaaccattcaacaaaattgtccaaaataagaggccaggcaaggtctgaatcataattgtcaaatgatgggaagtttatctgcagtaaaaaaggataacatatcagcagtgatgaaaaagaaatgtgtaaatttggtatgagcacttcaaaagcatgttttagcctcctggaaaatgaaataagcagggaacaaaataagatggtatgaaacatgacctcattgcagaaacgaagaaagcccatccactggtccatgtttatcaccttgtattcactttggtgctacacagtttcaaaacggtaagctgttaaccattaaaagtcccacagaagaaagggacctacctaatgaaccaaaagtataatcaatcaataccttgaggtagttaacaagtttgtcaacctgggggcgaaactgcaaccccaatactagattcagcagctcacaagcaactggtatttctatacacttcttcttatcctctggccaaacataaccaaagataagttttctatgaaatgaaaatcagtaaagtgagtaaaatatatcaagcaataatacctgtcaggcagtaacgaaaggcatatggatagaaatcctggaaatttgatggccttgtaacctagatttgtaaagcagattacattcaattacaatataaccaaactcatcatcacttataatgacaaaattattttaatacaatcacaagttgcaacattggttatcgcataggacagtattccctagcaatagcatgataaacttgcaagccttgctactgagatcctatcctagaaaactctatataggactaaccaccggtaaaatatagcatcttccaaatatatttcagtatccattaatatatttgaagtgaaaaaactcacttcttgc

SEQ ID NO: 21418 - DNA, 47313 bp, Oryza sativa
tcatcagagcaggaaacaaaatatgtaggcaaaaaattgacagaataaagtcgatataattaagccatttaaacaaacctgtatccattaagtacaataaaaagcttgaagcatgatctcaggtaaaagtgacaatcattaatatgacaaacagtcaagagttaggaggtaaacccaccgatacaaatatatttggaagagaaaaacaagcatccttgttagctggagtttgatttcaattgttagagtgaactccacagcatatgtgctaaagaatccaactcatcattgtgttgagtatgtaatattctcagggaattaatcacatattatgccacgccaattccccaaattcccaaacgtctatatttatggcaacacaaaattaacttgatcacagtcggttaatctggcccttggatatcatgtagattcgtgctgcggctatcaatgcttgcatttaacagtcatttgatttgctaagtctgtagctattcgctctgtactacgaccctgctgcccctagttatacgttagtttctcattgaatttgcactagcatcttctatttacatctacttacatatgtaattttgggacttacattgtaaatacactcactaaaattacatatgcaatgtaatttagggaactattttcttcatgttttatatggcggcataaatataggtagtcccattcccaaattgtgcaaaattagttggtacatgtaacttatggttctactgattgtagccacctagctattacaattagagtcatcatgtgtcactgtatatgtttgtattttagttgcacttgaaatttgaaaccattttgtagaatgttatgtctgccaatcagcatctcattttgtacttagctgtcaaaatgcagcagtatcagcagtagaggacactaagattgaaaatactagttcagcattttaacaaattagtagagcatgaaagatagcgcatctacaagacagaagatggccgtgatgagcagcaaaaaataatgctggcaaaagagcaaacatgggtaaaaaacatactcaatcatgcccgatgagctgtcagcataggtatagaaaagttggtcgatccgttcaatttcctttgaaactcccctagttgtacctgatatgataatgaaagcgtgttaacctaaacagacatattgtttgctgaagatcactgtatatctctatctcttaatggtacgaagataagacacaccatatattattattgcagaacttgcgacaacaaaagatatgcatgcatttggtagttatattatttcataataatagcctttaaaagaaacaaactcagggaaacaaacaatagcttgacatatatcagttagctgaataacattacaactgctgcaagatttcactaaacaagtaggaaggtacataaaaatgctgccaagtcacatgcatatgcaagaattactccagagtttaaaaatgagtaatccaaaacagtctgtaaaggtaagaccgacaacatataattctgaaatgtccaagacaatatgtattcacatatgtttgtgtaggaagataaatcatccagccacacccaccgctacattattacacccaagatggataaatacaaacaattagatgagtaataacagaaagaaaaggaatcagttcatctcaccacattgtgctttcctgctggtcaggtttgtactgactccttttctttttctgttttttttttcatttacttgtacatcacctaaatataaccgtttgtttagtattcattcaagtatgtataccctcagaaagagaacaagggatttcctaagctcacgcatttgaaaaacaggaaattccaacaagaatgtcaacccataaaatgcatgaatcaaagccagctaagacacaattagagctagtgacaaattttaccaggaacttccactaacacatgattgcacggacaactacccaaccagtcaaaacaggcttttaaagtaacatcatagcattgaaaactcttaaggcagtgaattctagacatcatctcatttttattggcagcctcttccaatcttcagttggcatcacaactaatcgctgatattggtgttcatctccattaatttaattatttagggatagcttcttcagatagaagaaagtttttgcactttgttttacctcataacacttgaagtggttcacataaactaacgtaattgtaaatttgcatcatggaaacataacgcagaccgtaatattttataaacagctcaatctaggcttgcttacaaacaggttcagagcatggccggccaccctgccaaattttatcaagttcactacaaaaataaatccgttaacccaggagcaagcctacatcgaattccacatccccaatctacacacgacccccatccaatccaatctcgtacacgcgcgatccaaaccccaacaggccaatatatcatcaatcaacacgccatcaacgcagcataaacctagggcatggcagggcagagtccatccatcatcaactcgagattggatcttcccccgaggagaagagcacagaaccgaccaaatctcgcagcaggcaaagcaatcgggccccgggcccggcccgacccgccagccccgatcatctcaacaaatacgagagagaaagaggggggaaacggaggatccgagggcggaggagggcgttaccggcggtggccgccgcggcggacgacgacgacttcttcgaggagcgcctcatgacggcgccgcgccgcgccccctcggatactcggttggatcccccctcccctcccggagcccttccccacagcagcctcctcctccgccgccgccgccgcctccgccgccgcgcgggtggaacgcgcaggcctcgccgagctctcggcttcggttgcgagtttcgagttggctgtcgagcagaagagaggagaggagaggagggaggcggaggtgtgggcgcaagtggaccctcgactcttataggattcggcccgggggcaggcgggctgggccccacgtgcgggcccggccacgacgatacctgtgggcccccactgctccccttgggtttcctggatttggtttttgggatgtcgagaaatcggatttcctttcctttccatttcgctttgggtagctgaccggccttgtaacatccattaaaagaaacgcgttgaccatacttggaatgtcaagaggctggatttgtagatatgtatttttattttttcgaccgaattttttatttgtagtaatattcttttctaaaattaattaaatagtaattctaaatagggattctgagaaataggaaggacgctagttagaagagcgtccagatgcggacgcttgggagaatagcgtccatcttgatacgtggtttgtaacagcgtccagctgtttgggccaaacacagcatgggcctgcgtccaggtgcatgggagcacacacagtaaaacatttatctaatccaaatctttgagcatccacgtggtgtttactgtgtaggttatagtacatataatttgtttagaacgatcttatactaacagatattgaacaaatttagtagttaatatcggtagtatgcatattggcttcggtcctttaataacgcagtagtcttataaatctatggatagtttgtagccattttcaaccaacagataatgtcaacgagctagctatcacgaaattccagcagcaacacgacatgacaacaatagtgcaaataaaaaaatccagggtttttcctcaattgcattagcatgcatttcattaaattatggtggattatcgaatcataaaaaaaaaggtcgaatagtatatgtacaaaggaggacgaaatctcaaagaggaaaccagtgagaaaactgaaaattggaaggaaacattgacatacccctaaattacaagaaagggctaattacacctcaattcagtatgcaacagaaagaaatacctatgcagactcccttcgtcagattatgcatttgccttttcttctgatggtcaaccaagcaaagaatttgcatttgcctccatgtatgtgtttgtaggtaagatatgtttttctgttgtactaggtagtcactccagataaaggtccaccgcactctcactgtttctatgactgttgaaccgtgcaaatcagttggtaaataaatatcttgaaacgaatttcaatctgaaacaaaaaaaaatcagttacagtgaaacgtctaaatgtcattcgatatagttccctgaatttatatacaaaatgtcattctaataatcagtttgtggagatgataaacatgcaaaagacacaggaagagccaagcatcaaggaagaaaccgtgttcactaactgaaggtgaagggcagcgctaaccacaaacatagctccgcaagaacgatggcatctcgagcatcaatgagaacgccggtggctgcgcctcagcgcctctcacagtcgagttgccaacggcctcgcacctaggactctatgatcgacatcctcaaccagacaacgtggaggtgggagaacggcgtccgcagaccgcagcctattggcgtagtgccgtagtcagcgtggagacgacggtgacggccgcctctcatgctttcacttaatccctccctgatactacggcggcggtggccgtgtcgcgagtgtgccctacgaggctgatgaaccgatcattgatcagttgttggccttgggtcgtagcgagggaggacgttgctttaaaccgcgtccaatcttggacgctttacataacaacgtccacatctggacactaatagggagggagtccttcctatttttacaaattgtagtttagatttaccacttatttaaatttactattaataattattatgaataaaaaaatcggttttttcgagcattcgtattcatgcgtttttctaatctagtcctcaacaaacactcgtgttaaatagtttgatttagtttattgagtcgatcattatcatgaattatttatttaactatagaataaatttaataataaataacctaaaataactattctactatgtttgtttttgtaagtaatataccggtacaaaataaattgtatttttcggagcacggagcacataatccgtttcagtaatccgaagaataatctgaaaagaacacggcaagtatcagctgaatccggatctcaaatcgacctaaacgtaagccagcaggccagagtccagacaatcgtctgctgctggctgctgcacgcgaggtgcaagaccagaggcaaaacagaattctccaacagggggacaaccagtatgtgacttggaagaagaagcaacacaaaccttgacttcctttcagacgtgaacacgtatccagttgggatacgccacgttgccgagtggaccagccaactttgttgttgactgcgatgttttcttttcaagacctcctggacttctcttgaccaactatttcaagaccttttggccacaaactccatgtccacaagtaccttggcacagctaaacagactccacaattgtgaagtggcagcatgagaagtccagtaaggctcactgggaatccttcggttgctgtccccaaactggagataaataaacgctcatttcctctatttgtatgtacgacagcatcatgtctgtaataggtaatctgtacatgtgaaattgatgctaccttcttttttacaaatggtatgcaaccacagataataaagaaaattgcagaaaagcagatctgccaaaaaaaatcccaccttttctgtgggagaaaaggataattgagccaagaaatatagaactgactttagatgggtactgcagagtcgggattcgcacgatttaggcgaactgtgccaagaatgtattcaggcagctctttctcttcctttgcctgaaaacatgaaacatattagcactcctggtgttacagtcacatctgcacccctgactcaacaaacccccaaaaaatactctttttcattagagaccgtgaacattgttagttgagtagactcctacatgaaatcagagtctttaacatttgcaagcaaagagtggaactgaaggctaggcatatgccagatatggaaaataccatactgaaaaggcgaattagccttagaagggggtttgcattgagatgcgctataaagcacactaataatgagaaattgtactgcgataatgtccttttgctctcaaatgttgggcaggggtggacacaatcgacgcaaaccgagcaaccaagccgaattaatcgagcaagggaagtgctttaaacatttatttgtgatttctttgattttttggatctcctgaatttggtcggtcactttggtcatgaccgaagaatgaaccgaaatgaccaaaaccgaatagttcggtcttcattattttgtaatgcatttttgtcttcatttttagatgacggaaattttcaatagacagaaagaccaaaccaaaatttttgatctggctgaatggccacccataatgttgggaatctccaatagagtaaatacaggatgttgtgcaactgctgttacgttacaatcggggttgcacaggatgtcagaaaatcaactattgttcacactattgaactccaatagacactttagtcttaaagcttagctagaagtaatggaggtatttgtagaatctttatttgtttaaatccacttagaaataggaaatatatgaaaaacaaaaaagcaaactgttgtttcaggtctgattttgcaggttcatacctcaattagaatagcaagatcaacaacaaggcctgtgacatatcccaggactagaccaataatgctccgtgcaacggatgaagaaccaatgtcaacatctatctgcaaagtaaattttacttgtaaggtcaccgaggatttttttaaaaaaaaattaatataatataaatatagtactcggtttttttcccaatttaaaacaataaaattataaaattgagagattcccgattatgcaaatctttaagtagcttgagttcaaatttgaagccaccatgcacagtagtccttccctctgcttaaatagatatttcaaaaaggttcaagattcaacaaagccaaagttcactagatcacctctagaaagttatcctggcgaaggtaattgcatgttactgcttttcccagaagacaagcttttgttccaactgcacgttttaccatccaataaccctgagatcatttatagttcaattcacatcaaaagtttgacttatcaccagtttcacaaatcaattcacatgcaagataataagaaacataaattaagtaatgcatacctcaacaatgcttggtataagtttaaatctggcatctcggaacgcatcggttccatcaatgaatcttcccaacagagaatctttattcacgggcctttctgctgcgtagtacatgaccaagttatagtttggcttcgctggaacctacatgtttaagagttaatatactatccatcctgatcatccatataacaaagatgatatcctcctccaatcaaataaaatgtgatagtgtggaacacaaaaatatactaacaaattaactgcaaactaatttccgatactggaagaaaaaactacaaacctagtttccagagcttatggtgttaagtcgttgagattttctgaatgataaaatattgtgcatagaagctcagagccattagatagtaaagacatggtgtacatgagacccccaaggtcacttccaatggcccggtttcatgaaccaaccattcccttttgagcccacattcatgtgcaaacgacatcacgttaatgagaatagtgaaaatgatggtacacacgagagtttacccaagtctatcaataacttggtagaggttacccatgtgtttcatgtgaaatttggtacatgtctgcatgtacagtatctctgaaggacagaaaaacctactgtttagtctgttatatatatcactatctattgagctgaatccgtagctttattcgttttcatttaatcggtgtctgttacaccattactttaattagtagagtgttgtcaaatagacagcgcaagactcgtgtcatgctccttttaaaagctcaaatgcatgtatgcaatggacggacgaataatccaaaaccataccatttcttgtgtacacttgtggatccacctctaaatgttaccttggttggataatccgtttaggcttgccggtaaattctccattgactttttatataaactactctatagtggagagtccgtacgttacaataaaaaaataagtggttgcattacttctttagaaactatatgagcaaagattttttgtaggacatcttgatcaaaatagaaaaatgttgaccatctatctatatactacagaaaatttctgtccaatagaattatattttgattttgatttttattttttgaaccttttcatttttttattttaaaaataaacccttccaaaacttatttccaaaatttgaaccttttggccacgccaacctgcctggcgtggcaaaacaacactaacacgctacctacagcgggtgtggcagttttgtcttgccacgctagcgagaccggtgtggccaaataacactgtcacgccatcgagaccagcgtggcagtattgttttggcacgctagttcggcttgcatggccaaaaggttcagatctcaaaaataagttttggaagggtttgtttttaaaattaaaatttcaattttttaaaaaaaaatcttctattttggtctacatcaaaactgaggatttctatgttgaacaaaaacaaacattagtcaaatgaaaaatatgataatgccatgtcaggaaacgtgagtagcatacaatatctagaccaaacattatggatttacaatacaattagaagttcccaggttcatggtggtaaacttgcttaagctctgctctctgacccctgccttccaatacaattaagaattacataatataatagagacctaaatataatacttaacacctcctttagaaaatcataagcaggaacatattccaatccatggatcaaatcactacaggaagttcactcattgaaggactgccatatttgtagctatagaacttttgactgtaattttgaactacctaattctcaaaataacaaattagttaatataaccaataattacctgcaagtttatgaccagtatgaagggaatcttctttgcagcttctgactgtaatgtaaatatgtaatgatcagaaaaatcggctgcagtatatggtcatgtcataaagttcagcattgcaagcaagtagacagcattgcaggccctatctaacacttcaatgtgtgttgagtttaaactagagttttgcctgtaggttcatgaaagaataatgaagcttacaatgatattaaataaggacttaatctcttcaaaataaataaggtattaatcttagccaattttattgatgaaaacgaaatatcatcataaagataatatgtaaaatcaaccattcaaggtcaaactagtgctaaacagctgttcttttagcttaattgtaagattaaaccccatccagaaatagaagcttaccatagtggagataattaatgccttattggtacggtctaagattttgattgaattttatatgattgtgattaaaaaaaaagatagattagaggcttaagagtacgtgtttgcagcaaagtcacaatccacaagatagtctaacacatatgactactagattatggatactgatattagaaattttgttaacaaggacactgaagctttggatacttctattggttgtgccaagaaaaagaatgaacaaggaatgtacagttttactctagcatgactgcatcaatactttgaaaggcatattgattctcagttacataaaaacatgatagagaaaaagctggttgcattactttgggatattggtggtggtcaggtaaccttttttacctgaacgaggctcttggggtgtaaggcaactgaatcaaaacgctcatcagccttaaaccaatcgacagcaataagctttagaaggggatcacctccaacaacctatgcaaatgccaaattaaaaccatttgataggtcaaattatgaaacaaggatatttctcagaaggagtaatataatgtcttaaccacaaaatattcagtgttatcttcatggccaattgggaccatattctcatatggccttgtcacaaaaggatgattaaacataaaactagtcatgcatcttccccgcatagcggtttcaactcaataaggcgcataaccaaatgctgggctggtatctgaattttttactggttggtctttggtaagaatactgatataccttattacacttcagactggtcaaaataaactaacttatccacacgataattattattctcctgacattttctaagaagttttgatatacacaccataatgtatagaataaaacccttctacttctttgaagcacaccattatgccttctaacttttttcaacaaacagagaaataaaaaatgtaggttatgcaattctctaattagtggaatagaaatgtagtactctgtcctaccttagtgtaatctgtcaggtaagtctttcctcttatcatgaacttctctccaccaggctcactccaagagtttgggtcattctcacttttcgctcgtcgaagggtgccatggaaatggtttgaatcaatagttaccggagttgaatttgtaaccaattcactcttctcaaccgaagctgcaggagaacatattagaagtaaaatcatagttaagaaggacagcttcctctgtgaaaaaaaagaaaagaaaagaaattcaaggacagcgaaatttcaacatgatctctggatttgagggtacatggttacaactatagcaaattagtgattcttaccgcccttctgtgtaccacatttttatcacctatgttctccttcacttgaaacaaaagggaacaagtgaacaagctttaaaaagacaaatgcccataggatatatcattctttagtttatcccatatgctttttggtagtactattttacttgattaattacaatttacaacatatcactttttctccttctccaatgattaccttaagatatccaaaatgactgaaatgaaccatgagaaatgttgtaatgcaagctagcaacttgcagttatgcattctagcaggttgaagagtaaaagatggcgtgctgcaatttccttcattttcaaatgattgtcaccattgactccattgttcaaactttaatcataattctttttagtaaatttataactagttcaaaataaaaaataaatattgtaatttttatgcatggcacacctaacagtatgattttccttcgatctaattaaatatattagatgctataattggtcggattttgcatagaagagttaacttgacagttattgaaaaacataaggaatattaactggcataattttttttacaaatatagacaaaggcaacagagacattgcatccactataacacagatgtgcacactttgtgtataaatgtcctttttgtggttgagaaactaatggtaaatgcatgtatttttttatcaacatactgtctaccagtgcttgaagagttgaaatgtctcttgtgtttacgattatgacctttagtcggtttcatagcaagacctgcgatagcccatgaaatattcttgaacttcacttttccagcctgtacagaaatttcataaggaaaccgagtctcaatttattactgaacataatataatacataacagtctgattgcataacgctgataaacaataaaatatcaccttaggaatcatatcatcatcgtcatcactatcctcatcttcaaaggattcgcctctagcaagtgcatcatagaattcatcattaagttcagaatcttccagttcactctggatgatcaaagaatcagactgtttgggcttcactactgttgaaggcaaatcagatgtcaaagctggatttgctgcaaagtattctcttagacctggccatatgaaatacaagggcatcattataatgtcctaaatggaaatagtattccttgcaataaaagcaaacctgaccaacctgctacttggctgagcaaagcaaaagcaatacttctgtcaaaattctcgttatgtcttctcttccatctatcccaaaaacttgggctcatttccaacatatgagtaacaaggcatttcggagttgatgatcctggtgggttcaaccttcttagttcccatgttgaggctgaaagaaatgttggaattaacaaattacaataaaatgtgaaaccctaattttttttccagttttgagagtgatgggcaaaaagttcttttttctcgaaaatgcaagagccatgcatttcatttcattaagaagaagaaagagtatgtacaatagagtgattcacaagaaacactctagagggaaaggaagaaaaagcctcgccgaagagatacgcaacaactctcacaggagctaggctcctaagtgggaagcgaccgggacaagagttcatggagtgctcttgccccagcagcaccataacaaactctcttgccacagcatccaaaatagcagtagtgctaggcgtggcattgctatccacccaagttatactacgacatactcaagttatctatgaataggctggtgtgatattgctatccacccaagttgattacaagtgattcattttttttttctgaaatactcatctatgcaactactgcaacatactctccggtcacaaaagaatgtcgttgtcgacccatgcagtcaaaataagtttactttgaccataattattgtttagaatataataagttttgggcatatgaaagttgcatagccaaatttctaataagaaaggatccatccattaattgtttggagaagatgagaaaggatggtaagtaataataaatgaacgcatatgatgagagaataaatgggggcatggtacgacaaaacttaactaactgagaacatggtctgaccaaaattttctgaaacagaaaaataaatggttattcctactctacctgcttcaagtcatcacaaaacaagctgatgctaagatacaggaccaacaaacaactcaaactcactgaatcatgctaaaaatacaaataaagtatgaaagatgaatcttacaattgatttttgtacgctcgtagccatgccttgaaggtttgttcttgtgacaagcaggaatctgcaaaatggctgcaccaaggggggaaaatgaacacataaccaactcatttgaaccataacacaaagtatatcgtggaagacggctgctatatgtgctgttaacacacttgacagctagttgccctatacattgaccacaacatgatttcttatgttcaaaaagcttgtgcgtcaaactgaaaacctaagggttctaggtttacttaattaatttataccctagaacctaaggctgagttcggcccccaaagttgggaactcactcccttttttttccgcgtgcacgcttttcaaactgctaaatggtattttttttgcaaaaaaaattatataagaaagttgctttaaaaaatcaaatagatccatttttgaaaaaaaagctaatatttaattaatcacgcactaatggaccgctctgtttcccgtgcgggagggattcgctcccaaccacaagtaacgaacatagtagcatttagatagctggtcactggttcataaagattgggcaatgctgatgcagaccaacccatcaaatttatacatcaatttgatgtgacttttgtgcactatctcatgtaaaacattatcatgtcacagttctttcagaaatatgaaggaatttggtcctcaactgatatcaactcaactacttcaaagtcaactccagtaaaaatgtattcctggaagcactggccagcacagtcctatcaatcttggtcgatattttttccctagggcatcctctatagccctactgacaagtgttaggaatcaattgattctttgtaggcatccaaccttcctatcagattcctcagtccccattttgctagtgattactagtattcactactgatggacatgccccaaggtgaccaccaccacctgcacctcacatcttagcacaccggattatgtacccctcctgctgtccaagttaaccaattcatttcctgttgttaatagcacctaacagaacataacaacacacggggaaatcaactgatacgtcataagatctagaaaattgtcaagtaatttgtattcaaagttgataggttgaattcattacatcatatttcaatctagctaggtgaacctctaattatatattttaggaccgtccatttaggagtgtcaaagagtagtagtagagatctaaaatatattaaaataaagctgtgatataataaagacttagtacttactatatgccccatcttgtccacgaaaccattgtctggaaaaaacaaaatccttctttgttttccacctgaaaacagtctccatacttaagagctgaattgacatattttaaaaactgttcaatcaggaatagcaacaactcttagctaatataagctgaagcttacatgtacaaatataagcaacatgcttcctaaaaagagcatgtcctatatcaagcttaagttgtccaaattccaaaagaggtctgtttgatcatgttcagacaacccttgtggataccattggtacaaaaagaaaagcctaaatatgtttaactagcaaatgcttcccccaaaacaaaaacagctataagcaacatgcttcctagaaaagcatgatctatgtcaagcttaagttgtccaaattccaaaagagagctatttgatcatgttcagataatctttatgaatatagttggtacaaaaaaaatgcataaatgtgtttaactagtacattaatttataatgttaaacatttatttcaccgtatgcagggaataatgcaaaaaacattgaattaaaaataccagcttaaatatctaggttcataggttccataaaccacgtcatagtatccatcaattgtttctaccaattccaaatcggcagtcagcatatcccacctgcacaggataatttcagtagagcaagttgtcaatatattgtagtacaacttgtatttggttccactgtaagtgtaaggtgcaatcaactgctagcttactcatatcgcttatgcttatcagagctgagaaccactgcaaatacagtatcaggattcgccccaaccacaccaacagacttaagaagtaccccttttccaccctacaaaagttaggaaatgatttgtatagataagcttttattctaaaaacatgtgaatgaaagagaaatggtcctatttggctcattcccaaaatcagccatttttttaaaagaaaagtttatattatgaaagcttggccaggaaaattagtagcttgtggtcagaccataatttggcaaagaaatgaacaacaataccaacaggcgcagacttttgcagcaaacccaatgtgatcaatctgacaaaattttggcaactactgtcttcaaaccaaacagtcactgaagcagcaactttgctgggagggatcacaactcattggatgaaagatgattatccacttcaggcatttcaatcattgaagaacagaactaccttgctctaattttgtactagggtacaaatgtttaaactgttaaaactgagaaacaagtctgggcaaatacacactatcattatgtatggagtatggggctgtctgaccaatattggctgctgcatagttggacatggagaaaccattgttacgtggcttgctccttgcttaatcattattgcatcataaagagtgggggcaaagacagatcaacaaccaagtaaccaacaagaacatggaccatgagaaaatggtgttcctctgttcttcccctttctatctccccaattccccagccatcatctctggctcttgcaattgatccctcagtcatccaggatcataacaaatggggataggttcatctaactagcaaagctacagcaatatgttatacatttcttacctttgtgtttgcaatatcttcaaaaattcttatacctgcaaaacaatcaaacacaaagaaaataagttcatgataatttggacatgattagagagatttcaaatttcatcattatatatgccctaggaattgaataatagacataaaggtaaataatcccacttggtcatgctagttaaaccatgtttagatatcttgattggctagctattttttcttaaatcaagttgcaagttgatgtatgtatcgtgttgcagaacatatgggataaaattgactcggtatcaatttaatttatccgatagatgttaggggtacaaactgagtctcaaggtcattaggacatagtgtcaactattatcctgtgcacttaagcaatgaactcagaactaaagttaactgtccaagatacaatggtgtcttatagttcataaaaataagtgactgttggtcatgtagattgccaggtgaagtgtagagtcagtaattcacaagaatattatttttcagcaagagaacttaaaaagatgttttctgtaacttcatctaacatagattagagtagacatccaaaaggaacaaaagaggaatacacgcagattaaccagattagttataaggtgccaataggaatagcgtaaggataccattaaatgttcgaacatatctccattcgtgtgcttcgaatgcatctccagaatcgcctccaaagtttgtattaattatctcatggctttgaagatttgaagactgccgcaagagcttttctggccctgtaatcaaaaacgtaaataaaagaattgtaggtaagtaatggatctatcacatagttagcactttcatgtaaaacttcaaaattgggctaactgaaaactatctgggtcaatttctttccgtagagttagtcatatgctcatatccaactcttctgcagagcttcaaagtcaaagtgggttggcctgctggctgagttgacaacaattggacacctcacttttgcagagtaaagagcccaccaattgaaatgtttctgaaactgagtaacatcggtcctctataaaacaactcaatctgactaagccctaaactctgttagaatcgaactaggatgcctacaaaagaagcccagtacttttttttcaagaaaattaaattgataaataaatggaaaaggattagcaagttgtacaatttaccgataccacatttggatttcagatcttgattatcacccttctggacactggacaaccaaaatgttttttttttggtttttttttggggggggaggagggtgttaaactgatttatggaaaaaaaataaagtcaaacattcttggtttatttagccaaggaattgagtgaattgtctaacattcaatattgagctgtctcaaaagttatagagtaaaactgtaatctaattatcatggtacaaattaatattgcatttttgttatcttacctttaccaattcgtacaagtttccccaagccttgtgcatatctccttacacgtggtcgatgcccatcaagattaagcctccaggtgtaaataattatatggcgtaagagcttggcttaacaaagaactgtaaattgcaaattggaaaagaaaaactaggtatcatctcacaaagaagctcccatactcgttttcattctgggatctattccaactaacccctctcgtcatcaggtcataatcagcctgttatgagaaatcaggataaaagaatcaaatgaaatgtagcagaaattattaattgtatcttatcttgatttaaagagggtgttaagggtgatattattggaaggttctacacccacctccactcaagatcttttgtgactgcaaatatataggcatgcacatattatttgtaagaattttatagaaaaatgtcgcatcactgcatacaagtatacatatgtagtcaattggtttcacataaatatgtatataggtttcagatttgaatataattatttatttattacatcttgtaatttagactaatatatttatttgggacttgttgcaacacatggacatgatgtgacaattggaagaagtcatacctaaaacaaaaggccagtgctgtctataaatttgaaactcaattttcaagtaaacatttttgtacaatgaattatgataatggttttacagcagaaataacagatagccggcggagattttattaaggacctatctgagtaatgaattattgaaatctctattccccgtgacaaaaacaagtgctaacactcaggggcaggtgccagtgcaagagtggcacatgactcaatgagcttatttgttaacacttcaacatttccaagatttcattcttcccttgcctccctcgtgccagcaatcatgtttattggaagcaagctcgatttcaagagcagctgtttaaagtttctactgctgcaatgccaattttcatgcatccctgtcataattcttaagtatttctggttattgtactgtgatgagccattgtctcaaggatttgaatacatgttaaattttggtgcataaataaataacttcagtggtatgctatcacaacctgaatgccaacaacacaattaggaaaaaatagaaatattttttttaagatttctttgagctgaacgccatgaatacagtatttccagtttggcagttacaggtaactgaagttagcccacattttcataaagggtgtagaagatgaccccaaaaacacataatctactttacaccgacaataacagttagcattttatagaattattaaatacctgctgttttgcctgctcaaatgcttcaacccatttcctagcttcaccggggtccccacatgcaatctagtaaaaggaaaatagtagtaaacttttaatcattatataggagcattgtttacaaatattcaagagcataatgagctgtgcacctctcctttctttgtttgatccaaccgattgtaaaaccgcaagacatacagttcctgggttttgaaaaaaaaaacatatttggttatttataaaggcaatcacatgagacatttagaacaaaacgttttaacaaaaagacatgatttatgctgcactagaaaaatagggacataatatgacagttaaatgttaatcaaaggacagaattggaccattaccccatggctagtaatccggcgaccaagctcctccaccataagagtgtgacttacaacaccctttcggataggttgctaagataaaacaagaagaggtaataagattccatatgcatgtaatgtccaaaaaatctcaagagaaaaaaattctgcaaataaggaatcactttgtgatgttatgtcaaatgtagatctacacatctacccaattgtcttgctaccttgaggctatgtagggacaacagccataaatcattttacgtatatattctagcaagatcaacataaccgtttcttaaaaaaggttcatattatcaaaactacaactcaaaattcaaaacaacccaaacgctgacaaggcacatgcactgcatccagcccaagcatcggtcctaaaattgccagcaaccttcttcatccttaaattgcagacagtgtcagtcgtcggtcagtaactgaacaaatacagaaagcacacacagcttagcagtttactctaaaactcccattttctactggttggatttcagaatcattggtaagcagacaatatataagcggggttataaagcaataccagcagaaccaaagaaaacctgcaacccagaacagccccaaatgcagaaacgatcagtttcttactgtaaatgacacggttgtcatcatccaaaccaattgaagccgcattttcgatagcagtcgcatctatcgatgcatcccctacattacgccaaataaaataaaaggttcgccaaaacaaacccaattcaattctgacaaggtcgaagagcctctgtgcaaagcaacggcgcagtacaaaaccaaaccaaaccaaacccaacaaagagtaaagcagctccatgcctccatccatccaacccccgctcaccgctgcagctccgacgacaagctctaagccgaaaccctcgagaagcgagagcgatcacaaacacgcataagaaatccagaaacgagactaagtgggagcaaggagggaggaggagagagagagagagagtgggggggggggggggaaccgacgattccggggttcttgctcgggtcgcgcttgtacatggccaccgtcttgccgcggatgacgaggaaccggaggtggcggtactcgtggccgatggagttcacgccgaggtggtacacccacccggaggaccccgccgtgctccgcccgctcccaccgctcccgctgctctggctgccgacatccggcgatcccgcctccgagagctccacctcggacacctcccctcccgccgccgccgccgtcgccggcggcttcaaggtgatcgtggccatcgccgacagcgtggggcgcaatccgatgggggaaaaagttggaagactggaactctggaagggaaggggggagaaaaggacggggaattttttcagtgacgcgcctcgtttctgacgttattatacggatactcttcgaaaccagctcacatgttcccaaaaatttgataagttgaccctttttataaacttattttgaaactgtggctgtgtttagttcacgctaaaattaaaaatttggttaaaattaaaatgatgtgatgaaaaagttgaaagtttgtgtgtgtatgaaagttttgatgcgatggaaaagttgaaagcttgaagaaaaattttagaactaaacaaggcctatagaccatgaaagaacttcaacaaaaatagtccaagtctaaggctgagttctttccccaacttctcaaactcacatgttcatactcctattttaaaatcttattttaaaactagtccataaaaagttcatactccctccatacaaaaatctaagcatatatttttatcaccaaaatcaagaagaatttaactttatccatcatgtaacaaaatcaaggaattgtatccatgtaggcaaccaatgagtagtaagataacttcctatgttccgattaacaatttaatgtggtacatggatactataagagcaagtccaatagagtatataaactagctacaagcatatatggaggagagagaagaaaagcgggttacacatatatagccagctacagcacgaactttaagataatatgtgtatgcgaggtggttcaagtattaacggtgtagagaccgagcgcttgctcaggtggcaagcgtcgtcggtgggcacgctgcccatgagcattcgaaccctaggtttgacgctcgtgctcgtctgggaggatttttcccctctttccctgggactgactttggttggtcccggctagataatagagtacatacatgcgtgcgcgttcagtgggactgcacgtttcccgtgcactgatgcctagtgcctccaatctcatccctagcgtgtgttagggacgtgcacgtgtgtgtgtgcgtgtgtcgtggtgtgagtgtggtgtgtaagtgtgcgttctgaattgtacccttctaaaaaaagtattaatggtgtagtatatatttatataaaagttttgtatgagtaggttattagattagcagtagatgatgtaatttttagagttagcagttagctatattattaaacatgctctaaatattaccatctcattcagaaaaacctgaaaatgaaatataacttaggctatgttcgttggtgtgtgttgagaacacatttctagcgcacggaaaatgagtagtccattaacacgtgattaattttgtattagctattttttttcaaaaatagatcattatgattttttaagtaactttcgtatagaatttttacgaaattttttaaaaaataatacactgtttagccgtttaaaaaagtgcacgtggaacaggtgagttgggggaagttggggaaagaactcagccttagacttggagtatttttcatggtctatagttaattttttcttgattttggtgataaaaatatatgcttagatttttgtatggagggagtatgaacttttttatggactagttttaaaataagtttttaaaaagggccaaatgatcaaattttgggtcagatcttctagtctcagatagggatgaaaacggagcggatacggacggataatgctcataccatattcgttttcatattttttaccggatacgaaaacgaatacggatagctcgaatacggaaacaaatacggattatctcgaatacgaataagaatcgaatatcatcggacacgaatacggaaacaattttttatcggaacacgaaaaccaactcaacttctaatagaaacaaatatcaacatatataattagctcattttatataaaatgaggtataatttataaatattttttaaaatttaaataatattaatagtttggactagtgttaagagataaactacaattaaaatctataaaggtatattgaaggttatagagttagaaagaaatggggtatgtcttatgggtcctgcggatatccgaatagcactgttcaccggatatccgaattattatccgtatctgacggaaaccctgataccatattcgtattcgtatctgggagaaaatattcgtattcgtatccgaaatatccgagaattatccgatccgaaaggtatccgtatccgtttttgtccggagctaacggaaactatccgctccgttttcatccctaactctcagatactgtcagctgtccccgccacagcggaagctgtgccggaagcgcgcaaaaagtagccgttagcttcgaggtcgcttcgttattctgatttagtcctcgggtttacgcttttaaaattaaaacacgtagtcacctggtgacgccggtcgcttcctagtttcttttttttaagatgacaatacttgaattttgaccgggctttcaactccaattatcagaaatttcagtgtacaaaatgagtttaaacttgtcttttaagagcagtactcctatgtttgaagggttttttttttgtctattccaatttgtaggagaagttgtcgattatcgtgaattcgaacacatgattttttttctttaataaaaaaatataacaacatgattttcacacgaacaattcaatttccacctaattcataaaaaaatcatgcatttccacggaggccttagcttacaggcaatcaaagcgtaatataacctatttgtggaagtttatttataatttggggatatggaagtaagattggcaccaactgataactagtcaaagttttagtgggccatttgttggacaatcggactatttctagtctttgccgataggttatcttgtcttaatccagaccatcttacctacatccatccgaaaatttagatgcttactaatttattggacgcgactacatcgagagtgctaactgaatagtgctaaagagagacatccttcttccaaaaaaaaatctactagtacattcaatatctatgtatttttttccttcttagataagtttctcttaaattacttatccgatttataatccgattgtgccgttatgttcgttgcaattaaatctttacaacaagatctcacatgattatattttgatgaaaaatcacaaattacttttatgatatgtctaaattagttttagatttcactaagttacttcttaaactataaaagtaaattcagtaagtcttaaagtaatttatatacattatagaagtaacttacaacaaaacgaaggtaactttggcatgtcatttgaagtaaatccgttgtagagataaaaatatgactctatctagaaattaaattaagggtttgctggaaccatgccaccctatatttgcaaaatttgagatatgccacccgtatctcaatgacatgtaggacccacatgagtaaatgacatgtgggtcagggtggcatatcacaaattttgcaaaatttgtgtggcatggttcaaattgtcccttaaattaatcagcacaaattatggaattaactaaaaagtcatattttatccatacaacgaatttacttctaatgtcgtgacaaagttacttccgttttattttaagttacttttagaatatatgtaaattacttttagactttattgaatttacttttatatgtctaagttttatagccatcactctttgtctgacctggatgacctatttagtatccattgccgaaatgctggtccatccaaagtaaggacagtgacgagctaactgatgtacaccaaccatgttcgacgcaagtagtatgatgaatgatttgaagaggagcccaaagtaggatatacatgtaatcccccgtcctaaaatgtaaacattcctaatggatctatactcatatattaaaaatttagataaaaataattagaaacatgttgtattttttttaaaaaaattagagaacaatattttttacccggcctctatatccaaccggattatattggtttaaataagaaagtatgtgaagaaattaaatagagaattattgtgtttttgttgagatgaggggatgagtggagaatagttttattctaaaacaaatcttataagtgatagaaataatatcattctgaaacggagggagtacgttgcatctttaaatatttgtaaaggacacaaattgaaaatttggagtagcttacctaagaaaaccaaacttgggaaattgtcaccgagcgaatagtaatagggtcatagtgtacagatggaacaagatcctctgcagtcggaacaaatgacttttgtctacagtcgatggatatctggccgttcgcttccatccaacggtaaccaagactgcttgcgctgcccccacttggctcgtgggccggcccaacgtcagcagacgcacgtatacaacgtatagagctgcggctgcagtaatttctggcgcgaatcctctctgttttggcgccgggttcacctttttggcgcggtgaaggttctgcgccggcgatcggacttatgctgcctccatcgacagactggtgccaaatctctgcactcatgtcgtctattgctgtgcacttaaacttgtgttgttctaatttgatttttttctgtcctcccgtattgttgtgtaccccaacttgtgttttgttgctggaattgatggattgaaggaaaactgaaatggaagattgaagaaaaatcaacttagcttgcatcagattaaaatttgcgtatttaagatggaagaaaataggtgcgtaatgtcatggttgtttctttttatccatagggggcggcaggggagccggccacgaagccggggcgtcgcggtggcagagagggaagcgccggtgaggtgaggaacgccgtcgtcacaacctggggcgggcgtctgcagtgagctcgatggcttgagcacggtggcaggggacggaaggtcgactggtgaggtgagaactctgctgtcgtggcgcgccgacggatcagggaggggaggggaggggaggggagcgctggcgaggacctccgagcgtagcggtggcgtggagtcaaacgatgcgccgacgaggacctccgagcgtagcggcgccgcggaatcgaacgatgcgatgcgctgcggcggagtcgaacgagccgtccaagggtcccttagctattgggctgatatgggcctggtacaaaggcctgtgtttccacagttttcttttatcacggttggataggaattggatggctctgatcagcgactggagagacgagtcgttctgcctgattttagaggatctgattctatctgtatgatggtcaccgagtgaatagtaatatgatttcaagtaggaatatttgatttcccccctccattcaacgtgggtacagccctacacaattattttccttgtataatgtctcctctagtcctttttgaatggaaggagtatgactttagagggattttacagaagtcgaactaattcatttggatctctataaaattttggcattacaaagaagtcctaagtatggagcacaagggttactcactaattttacaagaaacgacacgcacaaagactaatcaatcggttgaattgtatctcgtatacatgattctgctactagcttcttccactctgttcatcacacacccttgctggacccattcaactggacaactgcaacaccggccacccaaccgtgcaccgacaagtgacagacgacaccatcagcgagtaattcaaccagttcccacgtgccggtgcccgtgccactctgccacttccggctgccaataatttgccctttagcctctatgctagcgtggcaaatgttagcgccatattatctggcgttgggacgttcgatcttagcgccagcgtgattggcgctgagcccacgacctatttttgttaaattttttggcaaggtttaattacgaaataagttttctaaaaggaccaagttataaaaaaaagcggaaaattccactatctacgaaccgagtagacgtgtattcgtatcaacatatgagttttgtgtacttgtgtgctagaattgtactcccttcgttcccttcgtttcaaattataagttgtttcagctctgatgaaagtaaaactactttaagtttaactaagtttataaacaaatatagtaatatttacaacactaaattagtttctttaatcaataattgaatatatttttataatatattcgtcttgggttgaaaatattttttttaaattttggtaaaacttgaaactgtttgattttgactaaagtcaaaactatttataacctgaaacgaagagagtactttaaaaaagaaaatcatacacttcttacgtataaacttgctatattttaagacagactactgtcagggttacggataaggcataccctctatcctatgacttatgaaaccgataagatataccttcatgtatacggatcgtttccgtatacgctgttaggaacttgtcttaaattatgaaaaatatttctatgagttaagaaattgccgaagtccaacttggaaggggtaaaatctttggtgtatcgtgtcggtttacatatccctaagttttacttgggggtcaaggtattacacggtataaaagggaccctagggggaggtgaagggcatcgcatctcattgtccacacacccaccaaggtttacgaagccggagtgcacggagccaagtcgccgggagatctcgtcgtatccctcgactacgatctcatcggtaccatctgtttcgacaactctctttgtaatctgttcttatcgttatcaatctcacataaactggactagggctattacctgataaggggcctgaaccagtataattcttgtcttctatttgcttgatgtcatactacgtagaccctcgttccaacgtaccccaatacttaactcatccggtccgcgagtatccctcgtcgacaactataactagagactattgactcggaagtcgctgatgggtgaccagttcccctcctctagtctccttagagcaggtacaatagcatactattagccatctataaacatattttaatgagataaaagatgagagagaagaacagtgggctatagatctgtagccagctgcaatacgcaatgtgtgtatgacaggtgggatcatatactaatagtatagtaagtaactattgtatgaattggctattagattggctatagacaaattgaagctagtagtggactatactattaaacttgttcttagtatatactttacatacaaacgtataaagctcagaagttgtatagctataatcccttcccatttggggcacaaatttttttttttgctcggcccaacccaatccaaaaggcatcaccggtgaggtcaacgaaccccaacggcatcgccgtcgcatcgcatctccagatatccagcagcatgtgctgttccccggcatctctctgcccacccggccccaccactactccccccctccgccggccgccgcgagcacgctgcgtagaagggagaggagcagcgagcgaataccacagcgcggccacaaccaggagcctctgctccacgccatttccccaccggagtcccgtgctccggcctcgccgccgcattcccgcttcgcgctcgtggtacgttgctcacttgatctctctctctctctcctcagattcgcgcgcgagtcgtggccgtggctgcgctcgatcggctgcctatacgcgccgcggcggcgcgtggtggagccgctgctccggctccggagaaccgggagcccgtttggacggtagcaagcgctggagctgtacgcattactgcaaatggcggtcgctacctgccggattcgcctcgcccaatcgcctgcttcgttcgacaagcggatggggctgtgcgattccgttcactgtagatgcggcactgtagcggtagagctcgctcatcagctcgccgattgggtggctccagtccagcagcgccacctcacagggcaaatcgctgtgaatccctgactttaatgggctaaagatggagaatccgcttccgtattggctgcatgtgcacgggataataaaaaagtctcctgctctgatgggcatgttagtttttgtctctacactcggtgtgtgcgattgtaaatagtggacgcatgggcaccgcactgctggactggtatttgtccgccatgatttggagttttgttggattgtgtagacgaatttgggttaggtttttatattatatgattccatctcacgcggtaattagtactggtgcgtggtcatgcagtgttgtcaggttatgatgtgctctggctagtttttatttacacttcatcagacttcagtaagtaaaggttcatggccttagttatcttagggaattttgattatagtgttgtaatctggaatcccaagttgtgtgataaccgttttgtttattttcagtgttttttattatcctgtatcggagggtggtgaactactgcttctaagaatgtaatttagtttagtcagtgagcacaggagccttagttttctcaactaattggcattgcttgttaggagttcgccaaaagttgatttaggacataaggggttttcccactttcccagagcttgattcactgctaaactgcactctcctgagtttctttgtagcttcttagccatcatctagagctggttattgccttttagtttcttaaagttgatttttactcaatttcttaaagtctgttgatggtataaactatgaaaaggtaaatgcacaatttgctgaatatcttttccagactgttggacgataaccactttgagctggtgcacatccttatcaagatggctgtttctttaaaatcaagtggcagtttttgtagcacaccgcctcagtggctgcattcaacaagggatcgaattttatacggttattctcattcaaatgccaaagagtgcacttgcaagaaaacaaaaaggcctgctccactgtgtgttaaagctacttccacgaaagtggaattagatttcaatgatccatcttggaagcagaagtttcaggaagactgggataaacgttttaatttgccacgtattacagacatatatgatttgaaaccaaggccaaccacattctcactcaagaaaaacaggtttttttttgtgtctttaactgaattggctagctttcccttaagctgctaaagatgtgaacaatactttcttatgcaacactgtctgctattactcgggcagaagtcctgcaggtgatgaaaatggtacacctatggataaatggaatggttatgtgaacagcgatgatcgagcacttttgaaggtcagtaagcaggcaaaattagcaggcagtgttagattttaattttcttgtgtttaatttaagtaggatttgtatctaagtcatcaaagttcaaaatgtttgattgcacagattttgaaatttctattaggttatggagggagttatattttgttttacagtgtactccactgtatctgcacttacttttctccaactaacatttggtatttaaagcaggatgcagttcataaaagaacacctttacttttgttcattgctgtgtatgctttgcacttaacgtaatgtgcttgcttttaggtgataaagtattcctcgcctaactctgctggagcagagtgcattgatcctgactgtagctgggtggaacaatggtatatttctcatcacttatgagttagtagctctttcgattctgctaatatacattgtttcttcaaatatttgattacgtattacatcatatcagtttccaccttcagcgtttagcagttgttaattgtttattagacttaattcgttatattcttaaatggtaaggcgttgataaatagttttatgtagggtacatcgtgcaggccctcgtaaggagatatactatgaaccagaggaagtaaaagctgccatagttacttgtggagggctctgccctggtttgaacgatgtcatcagacaggtcattgtcttttagcattgttcaaacatctttgaattgctcatactgctacctcaaacatttgatatgaattctggtagctacatccattttgggattagggttatgaagcatgcatatgaattatcagcaatagtcaataccctctaattgcttcactttttcttggcaatgtctaattgctgcacttagctgcaaagaaaatcaaaacaccaaataattaattgcacttcatgtacaggtggttacacatcaaacattggttttttaaaaatgcagattgtgaagataaaagtgggtaaaaatgcaccactttatgatactgtatttctgtgtgtcccttgaccttgaatcagaaatatgaacattcctttcattcgaaatccccatgctgtttttagaactatgctctgtagtctattatgtactttgatttcaactggtattttttacttatgcctagaatatgtgctgattccttctgcaatttttagcaagaaataatgttgcatgtatgacttacaaatcgttttttccgcgtttgcagatagtattcactctagagacctatggggttaagaatattgttgggattccatttggttatcgtggattttttgaaaagggcctaaaagaaatgccagtaagatacttttctatattcataattgtcaaaaactcactactccccaattttttttcaaatttcatttgatagcatcatccagctttcacgtcatctggtggagaacataaatcttgctggtggaagttttctaggagtctctcgtggaggagctaaaactagtgagattgtagatagtatacaggtaagcactctgcactgcaaggtttgatgctgtatttgttattcctctctttgagggaggctgaactgttttcaaaattattatctgattattgtaggccagaagaattgatatgcttttcgtgcttggaggaaatggtacccatgcaggagcaaatgctatccatgaagaggttttatgtctttaattttcattcacttcatcattcaatttttatttcccagtaaatctttcaggactcattaggccttcttttacgtgcaaactaaaacagaggccaatgtacctatgtacagaagaatttgcataacatattccgtgttcatccttctttgttataaaaaaaaattatattcatttttctccacaattgcagtgccggaagagaaagctaaaagtttcagttgtagcagttccaaagaccatcgacaatgatatacttttgatggacaaaacatttggtttcgatacggctgttgaagaagctcagcgggccattaattctgcatatatagaggtaagttaaattactgatattaattgtgtgttaagcttttcaaatcagttgtagagatgaaagttcaagggaataaatcactactataattaggcacgaagcgcataccatggcattggtttggtcaaattaatgggaagaagcagtggcttcattgcaatgcatgcttccctttcaagtgggcaggttgatgtctgtttaataccagaggtgtgtaaacattacactgtattatgtttgagactaccaattctcttatgtacgatctaccgataaaagcttactaatatgaatgaaggttcctttcacgcttgatggagaatatggtgttctacgacaccttgagcatttgttaaagaccaaaggattctgtgttgtttgtgttgctgaagctgcaggacaagtaagctaaacttcagagtgatttcttcatgactttttggctacttttgttccagatacagctggaagcacgtgagtcgagagcctatgatttagttattctacgttcattacaggagtttacaaaaatcaggtgcaacagatgcatctggaaatgtgatacttagtgacatcggtgttcatatgcaacagaaggtgtgtatgcgataaccctcttttactttgtgctctgatgctgtagttttagaagcgcatggttgtgccacattttgttgttaaaataggtttgccttaccgtctcatttgctttttctgtacattcgtagtagttcagttctatttagatagttgaacccaaggcttccctgcttttgtcttcccacgtttcttttctgtattgtcaatcataccatcataatagataacatcagttacaattttcagattaagatgcatttcaaggacattggtgttcctgctgatgtaaaatacattgatccgacatatatggttcgggcatgtcgtgccaatgcatctgatgcaattttgtgcactgtacttggacaaaatgctgtaagtcgcttcaggcatgcaggcctctgacatctatctttcgaagtgtggaggactagaggtagcattgctgcccatgtcatatggttggttaaatgaaaactgcatgatggtgcctgcaggtccatggagcatttgctgggttcagtggcatcacttcttgcatctgcaacacgcactacgtctacctccccatcacagaagtcataacagtaccgaagcgcgtgaaccctaatagcaggatgtggcaccgttgcctaacgtccactggccagcctgatttccattgatcaattctttgaaggttccagctcgagatgatttgctattctttcggtgatgtgcttcacacaatcacactacagcacgaactagcctagaagatagtcaacacaatagtgatgctgttataacacttgtttgcaagaaaaatttcatggatcaatgtgattattcaaactccaaagccataactacggtgtacatcagattctcagttctcactctggagtctagccacggttcttgtagtagcagtgttctctgaactgtttctgaagaagaaactctgaattttgatttggttttgctgtttctgcttctgctatctctaatgcaaaattcaggccggtttggcaagccggaagagatagccggtctggtgaagttcctggccgtccatcctgctgcaagctactactccattcaaaaaaagacaaaccctagctacgaacctagacacgcatatgtccaggtttgtaattaggattggtttttttttttttttgacggagggggtacatcactgggcaggcaagcacaactgcagagatgttcttcagatgtgcgatcaaatgaacatgttttgagagattaagttgcctaattgtggtgtcttagatacaacagatcaaggatgcaactaaaattgtacacgagcccaaaatgacgtttctctttcgtgtcttcactgaaaactagtcgacgactcgggtttatatcctctaccataatgtcgctattattatagacactgacatgtgggataatagcagagtggaacccacgtaccagtgatggtggtggtagtaacattatagtagatgatcctaacccatgacgactcccttcaagaatcaattatccatctacattcatttggtttcctggttgcaaagttgtctacgttgatttatcagcttcatttggcattcggttgagttggtttattgagcaccgtccaggcgagtaggcgatccaccccaacttcgccggcgatcatcgcctgcacgaaacggtgaactcgcgcacgaatttcccttcaacaaattcggccaccttaattcatgtcgacaaattcagtccacaatcgaattcggcccactaatttctcatcaataaatttggcccaccaaaaaccatgactgaattcagcccatgaaattcccttaaaaaattcggttaaccacggccacaaataaaatcggcccatatttcccgtcaatgaagtcagcccaaaagtaaattggcccaaaaatattaatggacgaacttcgcccacaatctaatcttcacacctcaacgaagttagcccacgaatttggaccacttaattctcccaacaaattcaacccaagggcaaatttgaccccactgaattcatgtcaacgaattcgatcccaagagtatatttaccccacgtaatttccatcaacgaattcggcgcagctacgaatttggaccacctaattatcgctgacaaattcggcccaccatcgaatttaaccctccttttttctgtcggaaaaagtacaccgaaggtccctcaacttgtcatggagttacaaaatcgtcccccaaacataaaaccagatactgtgagaccctcaactaacaaaaaccgttcatttgagatcctttagtgggtttgactccggttttatccgacatggcggctaagtcggatgccaaatcagcctcctctttcttttgctctcttctctcccttcctcatctctctctctccattctctgtggtgatggcggctacgggcaacgcggggctgagtggtggccagcggaggtggcgtgcgagcgcgcggcggcggcgacaacgctcgcatcctgtctttcccctttcttttttctctttttttttcttctctttgccgcggggagtagcagcgggcggcagcggcagccggcggaggcagcgtgcgagcgcgcggcggccggcggagcagagcggcagcgggcgagtgcatggcggagggtgccgccgccgccgccgcgccgtcacgaagcgaccgggagacgccgacgcggttgccgacatgcccagaaggaggccgggggaggcggtagcggtgcactggctgcgccacgccatgttcgacgcggccggggacgacggcgccgccggcggcggccacgggcgcttcatggacaggttcgtctccgcgctacaccactactcgtgggcgcgtcgtcgcagccgcgttgccttgccttgccgttctccagggcttgctcctgctgctgctcctgcgaactttaatctgaatcagtgaacttgcatttgcatttgcgcaggcagaaaaaaatcagttacttgtctaaaactccgaagttactaacatgcatagcattcactccctccgttttataatgtaagtcattctatcatttttcatatttatattgatgtaaatgaatctagagagatatatctagattcattgacatcaatatgaatgtggaaaatgctaaaataaattacattataaaacggaggaagtacgtgtttaaaacgttgtgtatttgggttgttttgttatagactgttttggaattgcacaactgaaactaaggtaatgataaattttccacatcttcttgtttcaaatggatgaattgaacaaaatttattgtgcttgcatttgcagaaacaagaaattcagtttcttgtcagaaattatgttgttacagtatgaattgacttgcttaactagattgaattttgacgacgaacggatcaacagtgaagaggcgtctacattcatggttcgttcccatgaagatgtacaggtgcaaaatctgccgtccgttcgtcttcatcgacctcctacgccccgtcccagtgcaggcgtcggtgggagagtgcggctgtggagaggcggcggcgacaggtgagcgcggctgcggatggggagcggcagcgccgacgactccgcgccgctcgggctcatcgtcgtcggtggcttcgtgcgcgggcggagcagaggtgggggaagcgaagcaaaggggcggggggcgtggcgggcgagcggctccgagcagcggctgggatagggccaacgggaggaacccgagtcgtcgtcgtgctccgtgtcgcggactgccgcccgtcgcaccagccctcctctcagccgcgctcctccctcgccggctaccgcccgctgcccgtcgcaccggcctcctccccgccaccgaaggctgcgccggccctcttccctgaccggccaccggacgcgcctgccgcgccggcactcctcccgtgctggccgtgctcctcgaggggagaagagtatgagagagagagaggagggagaggaggggaaagagggagggtgctgatgtggcgatgtggcaccatgacatgtggggcttacgctgactcagccgccacgtcagataaaactagggtcagaaccatctgaaggataactcgatgacaagttgaaggaccttcagtgtactttttccttttctgtcactaaattcggcccacaaataaatgtggcacatttagttcccatcaacgaatttcaggcctcgaacgaattctgacgggccaaacattaatacgagataatccggggcttttctgagaaactacctccaatggacaactgctgcctcgctgaccggtgggaccgcttgctccggtgaagcgccggccaggggagaggcgccggcgtccgcggccgcggccgcggccgcgaagagcttcctcgggaagcacacgccgccgaacttgcgcttcctcctcctcgtccgtcgcgacggcgatgcggacgggacaggcgctcggcgtcggcgtggcggcggaatgcgtcagcgtgggcaacggggatcgcgggggagggcggcggatggaactcctggccgtggcggtggaggcggaggtctaggagtgcgcggacgacgaagagaaggaggtggtggcggctgagaggaacgcgctagctgggtctactccggcggcggaggcaaaccgccgcgcgcgagccgcgagtttgtgcggcggcaacggaggaggaggacgacgccgccgccgactgattgcggttgtcccattggagattgaggtaatcactgatgatgattttctaatttagcctatgatgatctgaatgcgccctgataccttttagaactgatccaatccgatcagtttggatcttagtgctttgcagaagaaatgccactgtatcattgataataatgctctatttggtaatcagtaaagcatcaacattgtgcttgtcatcataattcgtcactagcaggcttgcatcataaattatttcagagaaagcctagattcgattgctgataaaatcctccaatattgaacttattgcatcaggcaactgctgctcacgttgtgcaaaatattaaaagagaaaatccatgaaatgccattgacaagcacactaatccaagaaatgccatcgacgaacgcaacttccaggaaatgccatcgtacgagccattttgtcccagaaatgccatcaccgtcacttttactctgttagataccgttaattttgtcaaaatgaccagattgcccttctcaacctaggacaaatccccttcaccgccggccactcctcttcctcccctccacttcaaccactcctcttccacctcttctcccatcgtcggcggctatcaggaggatcgacaccgttgccgcacccccgcgcacgtcctcactcggagcaccccggtcgtcctcgccctcgagcttccgccgccgccaccgctgccgtccccgagctcccgcccccggcgacttctccccttccaccaccgtgagggggccctctctcctctctctctctctccccgacgacgaccttgaatgacgaagtgagactgtggaagttgaggcggactcggtggctgtgcgcaagtggatctggacgtcgttgaggatcgacgccggtgacgtgcgcaagtggatctgggcgtcacggccaccggcgggaggtcgccagagctcctccgcacctcccctggccgccgccgagccgtcctcgccctaccctggccgcgccgcacgtcgccactcacgctgttgcagccggctagaggaagaagacgatggggaaaggagagcaagcagccgggcccacctgtcattagcctatcaaaatttttccatagaaaaataaatcagcagaaatgtaaatcaaagccttggcccacttgtcagccactgtagactgaggatatgtgtcggattaaaaaaatacattatgaacagtgctgtttcatttggtgaatttttgagatttttctcatgtatagtttttcctatgaaaattccaaaatcttaatttgcatatacattatacatcaagggcaaaatagtctttacacatcatctaacggagtacaaatgacagagtagtgacggcgatggcatttctgggacaaaatgactcgtacaatggcatttcctggaagttgcattcgtcgatggcatttcttggattaggatgcttgtcaatggcatttcatggattttctcatattaaaaagcaagttcagagaacgaaagctctgttgtaagccttgtagcaacaaaagtattagataataaacgaacaatttgtctcttattaatacatatttcgtcaacactggtagcattatcctcctgataaaatatcagctcatcagcagagagagagagaaagcagcctcacggcctcacccaatggatggctgctcttcctttttgttctctgctttatttactcttcagtgcaaagttaaagaacaaagcccctcgagctggaattgcttggttaggaccctgtgcattccaccaagcagcaccatgcgaactcacttcttttcttgtttaaagtaaagagaattagagctttagtagtgccccaagcagcatgctatcatgtgtgtgggcgatataatattataatgtgcaaagaggcagcttaaacttgaatgaagaaaagaagattggacgttgcaatgggtgatcttttctgtttgctgttctttgaaacttcggtttgagggtaaaaatccatggatcaacaagatttaaaaaaagggggcatcatttaggacaactacttaagagaaaggatcatttagcacaatgaactaagtatcgatgttttctctgttccttgttagtttgcatggggttgggagcttcttgattcaaaggggaatttctaaagcataaagcaatagttcttgagcttgttaaatgccctatcccaacacttctcttctttacaagggttgcttggtgtgcaggacagggactaggggaggagaccagggaaccggtgtaaagattcttagcttcccaaggtttatgtcaccatctctttattcatgcctgtcacaaccttctaaaacagccttgaattaccctcaagcggcatgcatatgattgtgacagaatctaaattgcctgctgctatttctttggaccctctcagctcatatataggagcagcaattgctgctggcttccctacaaaaacagggaaagcattggaggggaaagggaaatggcattgtctgccaataggctgctaactgttcttctatgcttgttgctgttatctcatcagcagaaggtgtatggcttgaaaggcattagtcttgccttcggaagggaagaggatgaagtgcccgagaagaagccgcgggtgcttgctcaaagtaatgctgccaatctcaacaacaagggcgggtactcagcaagtccttcatcagctgatcccaacagaatgagtgaaagaagggttcggaggggttcagatccaatacacaacaggtattgatgcttcatcatgtagggaggatcagagacaacaagaacatcatccaagatatgatggatcagttgatgcgaggcgctaaaggttttttggtgctttctacttgtttttaaacttgtctgtttgatgcttcttttctatttcatttgtgtttcttaattatttcgtaatggatatatctgtaaaaagtttttagtggtaaagaatgacgacgtactgcagtaatcaagtgtggttttgaatgaaaaagtgtatgcgaaatctccatatgttcatgttttagcttagcttcccaaaatatattgctgtcaccaacatgtatcctgcgtttgcttcttttccgttggctggttcacaataaggttaacatcaaaagcgatcggtgcaatttgaacatttataaccttatcacatcttattatcgccatgtttgtttgaatcatgtagattactgtatttcctcaaatcattatttctttctttggggataaaagaactaataagaataatataatttataactaactgtctaataattacctcttggacaaagactggctgcacatagtccttgcaacttagattgcaaaatgaccatagaactttaccagccacatgaaaattattgatcaaaaactgcaacctatagctctgaatctcctccatgctttgctaccctaaccttttatgattcagaaaatgtcctctgatatctaccacgcttgtgaagttgcagcttcaccaaatgcatcttccgagctacagctccccagatcatctgaacagcgtcaccaggctgcgaagggtactggtactcgaagtggtgtgcaacctccttcagcctcctccacattgccgtccattcttcctgggagatccccctgaggagatgcagcaggaagcccctcttgacggcgtcggaggcgcggacgaacacgcagaaggcggagtagtcgaggacgtcctcgaaggggagctcgatgtcgtcgctgatgatcacggggacgcagtggctgacgatggcgtcgaagaggcggttggaggagggggtgtcgccggcgatgttgaggcagaacttggaggaggccatccccttggtggcgcgcctgatgccgttctgacggacgctgccgtaggtgaagtggacgtccttctcgtccttgatcagctggtacagcctctgacgaacccttccaccctgaaaaaaacattacagtttggctgaaaagttcagtgcaagtgtgcaactcacttagacagtggcaactcagtgttttataccacctatatttgaccatagtcctttagaagaacttgcaatggttgagccctagactctggtagaaaatagagtttataaattaaagtttgaagtggcttaatcctcttattttggtttaaaattaaaatatgaacaaaatgtctcacactactaaccataatctaccagtagctccaactccaatttacttttggagctagaaaaaacccaactccagaaatcttttggagttgaaactgtagcaatcaggggcatagattttaaatcaactccaaatcatgaataagtattccagaacgatatgttttcatgtccagaggaaatggtgcttcaagtcgaagacaaacttacatctttcctatgatttaatttttaaattttgtgtgagcaaaaatcattttccaaaagtcaatagcgtcgtgtatttaaaaacggaggaaatactactttgatttggtggaggaagtagtagtttgatttggtggcgaacttacatctttccaaaagacacgaatattaggaaaatgacctaatatcaaataattagaaagggtgagacttcgaacccaggtcatctagcgcaccaccttatggagctagctagaagacccctgggtgtttctcgaacttacatttttcctatgaatggcgccctggaagtaagcgaggacggggcgctgctcgaaccccggcgagtcgccgtcgccgagggaggggacgacgtgcttgtacggcgcgatcacgtccttcctcaggttggcgacgtccggcgggtacctgccgaagtcggagaggacgaacatggcggcgctgagccgccgccgggcgtccatcatgctgttcgggtggtgcggcacgacgaggtggtccgcgccgccccaccgccgccactcctcccgcctcgccaggtacctcaccagctcgccctgcagctgcctgtcgctccggccgccactcccatggccgccgtgcggcgacttcgactgccggttgtagctcagcgacgcgaagaacggcaccaggaacacgtcggcaaggctcgcgttcgtcaccctcacggcggtgcacggacggcggcggcggtggtcgccggaggtggtggaggagaggatgtccagggtgagccagtactcgacgctgtgctgcaggttcaggccgcccgggtagcgcggcacggcgcgcgggtcgccggccacgtccggccacgccgcgccggccgccttgccgtcccaccccagcatgccgaagtggaactccggcgggaggtcgtagaggtacaccctcagcagcgcgctctccgcgtcgcacgtcgccgccaacgccgccgtcgtcgtcgtctctcccgacgacggctgccgggtgatcatcgccgccggagtacccacacccacctcgacggcgccgcgcgacgtcgcgttcccgcctctcgctggcatctccgcttgggtgctgcttctaacaataatgccatcgtggtcgtcatgctcgccgccggcggtcgccgcgaggacggcgccgtcgatccgcgagctgacgagagcccagcaggagaaggcgaggagggagaccgcgaggaacaccacgtagcgcagcagcgcccgcctccggtgctccgccgccggcggcgccgccggcgatggctgcatcttcctctccgccaccatccacgacaccagcgcgcgcgagcagcgcaagaatccagccaaactcaccgctggaatgaaattcgcccaaaacaaaaataataaattcaaaccccgaattacttactgccaaagatcaaatcaaagaaacgagctgctgctccatttcaacaacacccctgctccctccctgcagatcgatcgattgagccgcggtcgtcagttaattcgtcatccaagaacggattaactcgatcatggcagggatcagaggaactaaatatatatatattctctaaccaacacaacaacattaataattataattaaatttataccttcatggagcactggtttcttcttgtgcgtggtggagaatttgccggcgttgaaaaggcggcgtcttgacgagagatcgatgaggaggcgcctcgtcagggccatcgtcttcttgaccggcctatgctgcgatgcatgccgctgtcttcgttctgttttttttttttgttctttttttcattttcttttccctgatgacatctactactagttcgctgtttctgttgaaagatttctgcagggctcgacgggaaaatcggatgggaatatggggatcgcaacggactttgtcaagataaaatcagtcagatactcgcggcacaactgtgagcccgtgtactctcctagtagtcgtcaaccgagttggaattcgcacatctaaaaaacaagcaaagtgtacttaggatatcgagacttcgagatcattttgatagagtacatgttaaggatcagtgttttgatattagacgtcagttcaaaactctagtattccgggaacacggcttcatgaagatttatttggttagtgcttctcaattaattaagtttggctcacccaactaatgttggctttgacatttctaataacgaactagtaccgaatattttgagaattctcttctttgttttggtcaggaattgagtttcgttgtggcatgtgatttgatggcgatgagtttctgttcactataaatttgttttaacaaacacatgctcacatactaaacaccacactcatattcatacacgcacgcgtgcatctcctaacacggctcaaagaaacatagaccaaccacatgcatctgtggggttttaaatttatcatgtggttttgatttagaaaaaaaagtctactacctccgtcacaaaataagtgcagttttacaatatttatatctaacgtttgaccgttcatcttatttaaaatgtttttatgattagtacttttattgttattagatgataaaacatgaatagtactttgtgtgactaattttttcataaatttttcaaataaaacggacggtcaaacgttggatacggattcccatggctgcacttattttgggacggaagtagtattttacttttccgaacaatttcaccgaaacttagtatatttgtctcttcccctcaacccatccctatccttctcaccaatcacctccactatacttattggcataataatgacctgtttggtagagctgtaactcctaaatttagctacaatagttgtgtctgaagtggagttgtaaaatagcttaaacccagctacatctctctagttcattttgtgagagcgcttcaccaagctccgctccgatgttaggtggagtgaaactatttggctgggctccagctctaggagagagagagagctggagctgtaccaaacaggtcctaaaccgtcaacatttcctttcgacgtgctaacacttatactatgtccaaagaggtgatgtttgtgcgaaaaaaaaactcatccgtcccattttaaagtgcagttgtgggttttcgtgtccaatgtttgtttgtcttatttaaaaactataaaaaaaattaaaaaataagtcacatataaattactatccatgttttattatctaataacaataaaaatatcataaaaattctaaataagacggacagtcttgtacataaaaaaatccatagtttaaaatagaacggacagagtatttaagtctgtcaagtccatctttgacgtaggcatcagcatcactatccacgtgaactggcacaatcatgtacactatggaaaaaaccaaatctatcgtgatttgcaagagattaacaaaagctagagcatgtggtacaaagaaattacatgagatattttatggtctcgagagataccaaaatttttaatataaattttaagaaatagtaaatcttacataaaaaatatgatacctactttttcaatgactgtaattcactcaagaaacaaattaaacaaactagacaatcacagagtaactggtcatagtgttttggaagatagtactaggaccgaaggagacacatgctgtccggattcgtaggattacaacgcgtcatattatgtattaggtttattttttaatgagacgaaggaagtaaggtgctaagagcacccgtaatggtaaagtaaggtgctatctataaaacatttacatctcagcaatagactagattaatagtaaaccacttcaatggtatgtctacatggatatctatagctctctaatgcattgcctcgtttttctctatagactatctccaggttagtagatagctttactctctctcttcatttaatctcttccaagtaggaaaatatgctgacatgtatctcttgtagagagcctatagataaccattgtgggtgccctaataaaatgttcatttggtactttgacttgaccgatagcttcttcctccttcctcttcctcttgacctatgcaagttggggagaatggcgttaatgcctcaccgccctcgtagctgacgacgtcggccttcccgctgcttccttgtttggcatgagtaggccggcgaggtcccatgccatgccctcgtcgatgaaagtggcggcaacattaggcttcctcgtcgacgcgtctgaagagaggagaaacagaagtgaggagagggaagggagggaggtgaggtggagggatgaaggttgtcacttacacgtgggttctagtgtaatttttctttgtttttgttgctgactgtgagcgccacgttcgtcttctttttccctgctgattggattgctatgtactcccttcatattaaaatatgtatgacgccgttgactttttgataaacatttgacatttcgtattattcaagaaaattatgtaattataatttattttattgtgacttgatttatcatcaaatattctttaagcatgacctaagtatttttatatttacataaaaattttgaataaaacgagtagtcaaacgttagttataaagtcaacgacgtcatacattaaaatacggagggagtgcatggaaccgctgttgaaacccgttcagggagataatatgaggcggattgtcgagggagtaaatatggatgtctttttttcctttgccatttgagccagtgtacacaaaagttgaaaacggcccaacacggcccagtaaaaggaacgggtgccgtgggcaatgggccgaatatcgttgggcttgtagtaaaacgttgcagcagacgagaagcgaaagaaaaagaatcgcccgcgcagatgagcacgccgcccagggtttgcaaaaccgtcggtaagcgcgcggttacagtgaaaaaaaaccacggtcacttgcttaaattcgaataaatttaaaaataatttaaaattttgataaattttacacggtttcgtacaatttgtcacggttgggccgcttggagtagtggagtagtagcagagatgaaaaaacacggcgcgttttcataggggaaggaagcaagacgtgcttagcttcgatttgtttgtaattgtacgccgaggctcgtcacagcctcacaggtcgcggttgcggagtggaccgagtacccgatctgaggacagtagtagtcgtctcgtcactgcaaggaagtgatgaaccgtgtgcaacaagtgcagcgtgctgcttcccccctttccgttccactgggaccaaaccaaaccaaaccaaaccacaacacgtgcgtccgtcccgtagtccggcccactcgtgttggtgtgtctcctccgcgtcaaccactacacctgaccaggcaaagccgtacgtaacgtaccatcgcatggcatcacatgcggcgcga

SEQ ID NO: 21419 - DNA, 17827 bp, Oryza sativa
aggccccacgccgccgcggccgccatggggccccccgcctcggccggggcgccgcgaagtcggcgtcgaggaagcggttccggaccgagttcagcccggagcagaagcagcggatgcaggcgctgtcggagcggctcgggtggcgcctccagaagcgcgacgaggccgtcgtcgacgagtgctgccgcgagatcggcgtcggcaagggcgtcttcaaggtctggatgcacaacaacaagcacaacttcctcggcggccacagcgcccgccgctccgccgccgccgccgccgccgcgccactcgccccaccaccagtgctcactgacttcagcatcaacggctcatccacgcatgccgccgccgccgaccacgccgcggcaacggcgagtggcggcggcggcggctcgccgcagtcgacttaatcaagactagtagcacagtcgaatcaaggttgtctctttcttttcttttcttttttttttcctctttttttgtagcctttttcctgtctaattaaccaaccctaatggctaatgaaatgactcatcagtcaacctagcaagtagtagtagtagcagcagcaaattagcttttgctctaatggtgaggcccaagcaaagattagattcataaacaaaaatgtggcctttttttttggatctgatgaagagatgtcaatggatgatgcagggacaattagtactaccactaagtacagtgattactagctttgttcttgagctaatctgggtgtgcatggataatgatgatgatgatgtgctaatcggagtcctaggtggggtagtgttctagtaggatcttatgctgtccttgagtgaatataattttttttgacggtttcttgctctgtgtctgccttaatccctgtttggttctgtcctgttcttatctgtgtgtaatgactgattggtggtgggggatgaatccccttttttgatgttgcaggtcaaattcaattgtttcattagatctcgtagtgttgtcatagtcaatgagacatgctttttgaccactaattgcataacggaaaccataaaaaatgtaacgttgccaaagatatttgttgtcacaaatggctacgcagtacttcatccgttctatagaaaatcaacaccaatttctaactacgaactttaacacatttaagtccatcttcagtcaccaccaaatgccacaaattgttggaatttggactggaaagcaagtagtaaattggatggttaacgcgtggataatggaggggtagtacatgaaggttgtgttgttgaataacgagtgatttgtgataattattgagtaaagtacatcaccggtccctaaacttgtaccgctgtgtcatcccggtctctaaactcgtaaattgaccgttcaggtactcaaacttgttcgactacgtcatcccggtccataaacttgcagatcactcgtttaggtcctctaacttgttcagttgtgtcaccccggtccctaaataggacggtctaaaaactttatatcaaaaaaaattcataactttttcatgtaaactctaatgaagacaaactttatatcaaaattgtagccctcgactcaacctacaactttgtagttgaaaagttttttaattaaaactgtttagggtcccaaaatattattacatgtttatagattttgaaattttaattttaaaattacattttgggataaaaaatgacttgaaataaaaaaaattcaactacaaagttgtagaccgcgtcgagggctacaaatttgatataaaatttgtcttcattagagttcacatgaaaaagttatgaattatttttaaatataaagtctttagaccgtcctatttgacccagatgatattcaaatccaagtttagggaccggggtgacacaactgaacaagttggaggacctacacaagtgatctgcaagtttagggatcgagatgacacagtcgaacaagtttaaggacctgaactgtcgatttgcgagtttagggaccgagatgacacagcggtataagtttagggaccggtgatgtactttactcacaattatttaatggtgcagacgatcagattaattaggggtactattacaaagttggaaaaattgattggaaactcatacataaagagttaatgaaaaaacacacggtttataagcacaaaaattatatgcgttaatccattgttccattccttagaaaataaacagtgccagaaataaaatagtaaaataataacgttggaataagatttttcatgttggcttacaagaataagacatttatatttatatttttagcttaaaagaaaataaaaaaaagaaaactaagaaaaagccttaaattagttctatttaagatgtaaaagtcaaaatagattgtgttttatatgccatgaatgctcgaaacaaataatccgtggtaataatctatctttttttaaaaaaataaaattttccaacttgttttgaattttaaattatttgatttttctcccaaacacttgattgtctgaaaatgtatttattggaatgcaaattttgctataggacactttgacttcgtggttttagccgtaggatattgcctgacgtactccataaacgtgataatttatcaatggaaaccgcgccgattaaaataataatttacggttgaagaggagagagaaatcgtgtgaaatgtcaaacaactacccttggacccacatgtcagctcttctatgtctcttcccttctctctctagttggcaataagacaacacttcgttctactcttaatcaggaatagtagaaaatatagtagaattttagttttatcaaatggtaacacaattattttctactaacttaaattgttctttaattttacactcttaattaggatttaaaaaactgtatggttaacatgtgtgataaccttctcaaattttaaaaccacagtataccctggcggtaaccacgcgtttaccataataaccctcgaacagtaaaagatagcggtaaacagtaagtagtaagtactcacaatataggtaaacggtgagtagttatagtagttatagattttaactattacagcattcacaatataggtagcaagtagtaggagaataagagaggaaatatagacaaatgacattttattatatatgggcaacccatatgtttattgatgacttttgctatttcttctatgaactacttttaacatgtgattctgaatgtattattttatgggttaatcaactacgaactggttttgaagtacattgtagataccctagatgactccaatacaataacaactctcatgacaccaatacaataacaactcctagctgcagtaggcagaagtactgcacgactactccaggagaggactagtgcatgatgggacggggtaatgagtccctcggacgcttttgaagtttttgtctcgctgtgttggtggaaagcgcgcattgacgccggaaagggagccgctgtgctgcactacagcagctatcgggtcagatcatggcactgctcccagtataaccctgctgtgtgcctgtgtggttgatgcttgatggaactgaaggtgcacgcacgattctgtccaaagttccggttttatgatcaacagcttgaattattatgatgtccatggttacggcccatgcaccatgagtataaattttgaatgcatgaattttactctatatgtttctataaatttggttttaagtctggttaaagcgaccggtttttgtaaaatcgttgactgtcggcttgtaaggattactcggttttagctagaatgtgtacggagttgactgaaagtcatcctttttagtaaaggctgtgtttaggtccacattaaaattgaaagtttaaagaaattaaaacgatgtgacggaaaaattagaaatttgtgtgtagaaaagtttgatgtgatggaaaatttaaaagtttaaagaaaaatattagaatctaggccaaaatcgatcaggagcgattttcacctaaaaaacgagaatgtaatccctgcttttaacctcgtctcttgaaacaaatgtcatagaggctcattagtggctacatggtgcacatttgttttttcttccaaaaaaataataatgtaataaaggattatattcttgatgcacactagtcacgtgccagtgcattgcaaatataggatttggtgaatgtggtttttttttctcttctcacgtattttctctagattgggcaatttgtttggtacacccagcagttttttaatacatgggattacatatttttctcttggttggttgattttttgggtagacattggaggagggaagggagggataacgatctttttttaaaagagaaaatccaaaaatgccaatgataaaaactcgatttcaagaaatatcattgttgagtacgagtttcataaaataccattgtacaagcacttttgtcttagaaatatcatcgtcgttagggttccaaacaacatttcgttaagtgctataggatgaacagtgcacttaatggtacataatggacaaaatcctaatagtgatgatatttttgagacaagatcgtttgtacagtggtattttatgaaacttgctatttcttaaatttaggtgtttgtcaatcatatttcttgaaatattttgtcttgttttgaggtagtgtagatacgcagcgcagtggtgtgtcttttgtgtaattgcaaagaagaaaaattaaagttggactccttttggctactgggttggactattgaaagttcagattggtgtttaagcttattataactaagcttagatgcatgcatgatcttgctttaatttaacaactgcccttgataggtctgcaattccccacaagatttggttgcttggttggtagggttcatgggatcctaagcccctaacaaataatagcattgtccactgtcatggcatgatggcaatattatactccctccgtttcgaaatatttgtcaccattgactttttagcacatgtttgaccgttcgtcttattaaaaaaattataaaatatataaaactatatgtgtacatgaaagtatatttaacaataaatcaaatgatatgaaaaaaataaataattacttaaattttttgaataagacgaatggtcaaacaagtactaaaaagttaacggtgtcaaatattttgaaacggagggagtacaaaccaactcagatatcagttcctcctcatctctactcttgtagtttctccacctttaccacattgtatatattttaacacctaccgtaagcatgatgctaagattcctcctttcccgatttgatcacttaagcatgaatcattgagtaatcacaacggtttccaccacaagtagtagtagtagtataattgtttagcgttgcaagagacaacatgcatctgctctaagtactccagcttttactaacctcttatctaatctttgggctagtttggttagttgtttttgactttacaaatgctgccttcttgtgagcaactctaaactgtaaacttccttattttttatttggcaaaatttgctacaagacaatgaaagattttggcatttgctgtgagacactcgaagattgtgaatcttttcatggacactgtaaaaagtgataattagccgccggacacttctcccattattttattatttccgaccaaaacggagaaagaaagagtggtgtaagtaccaaaatgcccctggacactatttctcttttccttccagccgagtaacagaggagagggagagagtagggcgtcaatgctccggtggccagggatcggcgacgttggtggcggataatgttcccgggcgacgcgcatccggggagggtggtgtcaagcaaagggggagaaggagatggccggaacggcaacacaaagagctcagctccggccggctatggtggtggcgctggtggcctgactcagaggtggagggaaaggggaaaggggaaaaatgaactctcctcggtgaggcaaagcctatggtgaaagggaataagaaggggagaaacggaggaggagatcggccgacggtagatggtggctagtcatggcaaggagagagaaatttggccgacggcgacgagcaccaggtcggcacccttgaccagccggccggagacgccgagcaccaggttggcgcccttgggcaacctgaggtcctcccggaacgcgcggcccaacgccgcgtccggctcgaactgtgcctcgtcgacaccgttgaggatgacgtgcacgcggcggttggggatctggtacacgtcgcgcagcatctcccccgtggtgtcgctgatggccacgtggtgcacgtagctccggaagaagtgcacctcggacagcacccggtacaccgactgggccaggctgtggttggacgccggcgacatgcgctcgtcctcgccgcgggtgaggtcctggtatatcctcgagtgcagcgcctcgagggatatgccgtgccacgacacaaccaggttgggcacgtcgcgcgcccagcagtggaacatggccacgctctccgagtgtatgacgtcgaacgggtcattctcggcctcagcctctgtacagcttccacgcctcgttgcagcgccacaccccgggggtgcaggaggaagaagatgaacagagaaagagagaaagagggattgacaagtggggcccatgggtaaacttgtctttaaccaatgtttctctctccgttttggccggaaataatacaataatgtgaggagtgtccagcagctaattactacttttttacagtgtccacgaaaagattaacgatcttcgggtgtcttacagcaaaagccgtaatctttcagtgtcctgtagcaaattttgtctttttattataatattttttgaactgcaaaacaatgttttttttagagaaattgatatataccaaagttctttataaaaatcaaataaattcaattttcaagtttataattgatattcaattaattataccctaatatcttgtctagttttacctaccaacaaaaaaaactcaagcaagatgaacatatgaacgcagcctaagcctaattgacatgtaagctttctttagttatgataagcccaatcggttggcctaataagctgaaataaaagttaaaatttaaattttcaaacttaattttaaggttgattataagatatttttaacgtaatttttttacactggctttttaagtcactatgaacaaatatataaaatttttacctataaattaacttttattctctaataaaccgttttgtcttagtagggaatataggcaaccaataaggctcgatgccataaagttatatataactctattttgggaaaccaaagattctaagaaacatcttatgagtaactatctagtgaaaaactaggtaatctcaccttcaagattctaaggcattgcttttttttttttctgattatggatttaggatttttcacttgcatacctccaaattcttaaatggcgtaattcgtgcaaacttttcttaaaatactttttttctagaataacttttcaactttgtatgaattctatgtctatttatattatataaaagttagtgtattttgagatgaaggtgtatcatttatcatagttgaatctcttagaagtactgaatatggcttactaagatttaggatccgtactaaagaacaatttgacatagctttttatcacacttaaaataagaaatatcattagtaggtgcctaattaaatattaactactccctccgtcccccggatacgttccatccaccctaaaattgttaaattttagaacagagggagtaataaaaaaatagaaaatcatatttatttatttatttttagaaaagacttttatagaattattttaagaaagtaggtgtatgaccttttcttttcgcttatacttatacttatcagctaaattttcaatttttactcttaaatttagagccgatttcgaggtttttttaatcgtagtttattttttaacatttgcttttagatcgttaaaaatacatacataaaagttttgaaaacaaattattttttgtttgtagatatatcatttggtttatttctggaatgtcccaaaggacccaaacgataggctgttaggtggtgtttgggaaggtttagtccctttgacaaaaattttagtccctacaggagggacttatgcttttgtgagccctccttcccaaataccaccttagaaagctttcaaaccgaggctttttcttcggtttatgaattattatgactgaccagggtttacgattacgacgaaatctagttggattttgcgaaattttaatgtttcgacgaggctcgaaagtagaaaccgcctgagatttcgagaagtttcatgcaaattcaaatttgaattgataaaaaaagaaaaaaaatcaaaaaaaaatcttataaatactatgatattcatagaacctattgtgatataaatttttgaaaaaaatgatgtattatgtgtatttactcaaacttacatcaggaaaaaaatttcagcaaattacctctattacaaattactgattgaaatttttcgatcggaatttcgccaaaaccgatcggttttcgagaacttgtcggcaaacttagggaatttgtattcaaattttggtttatgaaatttattcataatttatcggtttttcaccggatttcatgaaatcccgaattctgtccgtgcccgaaatagaaggggctctcggctatcaaaagacaaattcgttttttcttgcctactgctaacatcgttggcaatttggaagcgggtagtactgccaaggatgcagtactgtacaggatttgggtgacctgcagaagcaacgcgtcttctcagccgcagcgtggcagagagtgagtgaccagtgtcacagtgtgtgatggcctctagtttgttggcttctgggatttggtttcgagctggctgtcagctggatgctgacctccgataattataatcaccaaaccccgggccacgcgattaaaagtagattcccttaggcacaaataaagcccaaccacttttcagccatcagccctctttgacatggcaaaatttcccttctcaaatcttcctcaaataaaatcatctcatatttggctacaatattgtaagtattgggacaaatttattgtaaaggttcttggttcatgaacttgtgctttcaaagggtatttggagatatgccgtactatttgtagagcttatttatgtgttaaaattcaacgtacatggatagattttgtagaactacgagattcttttggtcaatatatctctactattataaaaattaaagatgtttttgccggtattttgatacgtcatttgtgtttgagtcggtttttaaggtcgttcgcttttggaaatacagatccgtgtttaagtcggtttttaagttcgttcatttttagaaatacatattcatgtttgagtttaattttaagcatgttcgcttttaaaaatacaaaaggaatcgtataagaaatctcttaatttaaaaaaaaaactttgcatgctaagttgagatgaaagtcagactcctaattgcaactcatgattttctaaaaaaaatatattcaagcgaattcccacagaattttaccctaactaaaccgtataacaataataaaattaaaatagcattcacctgttgtaacgcacgggcattttctagtttagtataaaattggatttgagtacatcatatatatcgtactatgataaatacgttattgatattagagtctgttgatgctatgttaaattacatcataatttttgttgtagatttgtgttcatttggaaatgtggtgaacaacgagtatctttatctcgatattttacgtgcaatacctaattttttttattttggactaaattttatggcacttttttgagttattattcaattgtctcgttgctatgtgtgaaaccactatgcaaagcattactttatggtccctgaggaacacaaataattacatttttttaatactgtgttcgcatgtgggaggcagaaaacctggtactatcgctgcccatggaccatccaaaaacccagtgtccaaatagttttaattctccaatggagtttgttgtccccattgattgtcatcacccatttgcaagccagatgagatgaaactccatggaaactgtcatatgcccgtttggactgactgaggctactctggtgcctcaaacgtggcatgtcttgagaggtaggggtcgctaggaataattaccatattatcacgctcatgtgccattcgattaagaaaccaacgtcaatgatgtctgaaataatggtatgattgttagagcagatacaatagcggactattagccagctataaacatatctaagagcaagttcaatagtagagttaactgccggctccaaaattcaccacatcatttaagagataactaaacaacggtagatacagcaattggctacacacatgctttaaccaaggcattctgtcaggtgttggtaacttctgcatgttcaagttctaattttcgattggttgtcccgagctgcagggggtaggcccccggtgttaattttggtaattaatgacaagcgctaattgtggactaaccgttgtctttgagctatacattttaagttagggccacgtcgaatgtgcgcatggatgattatcgatggattaaaattgacggcgcaaagcaaagggaaagaagacggtaaaactagcgctttaatttagaattgatcgaggtgtagggcgatcaaatttgctagtttatttttagtttcgccgtactattaagaggagtaatgacctagcaaagagatgattttaattgccacattaggtcattatgcatttagacttgtgctcacatttcacacacacacttcactgggttcggcctgaccaggggcggtcagaccggccacatagtggcggtctgaccggccgcaagaaggcggtctgaccggcgcataaggccggtctgaccggaggcacatgcgcggtcagaccggccccctggaggccgggatggtgctgctcgggatggccgatacagagtcaacggagccgtattcggtcagaccgagccgatagcggtctgaccgagccgaggccggtctgaccggccaccccatgtcggtctgaccggctaggccgatggggccctctgacagggctacaacgactagttttctagccgttgcagagtagcacggtctgaccggctgcatacctccggtcagactggcagagcacagagttgggggatttcgtccccaacggctagttttggtgagtgggagtataaatactcccctactagcagcaaggggactctcttggcaccctattcaattgcatacaccccttgcacctctctcacactcacttgagctttgtgttcatccatctagtgtgttagagggttgattagccaagagtcaagtgcatttgcttccattgtagagctagtgtggcacttgatcatctccacgccgggttattgcttgttactcttggaggttgccgcctcctagacggcttgtggaggagttgcccggtgacttctccgagaagattgtggaggaggcccggagccggtttgtgagtggtttggagttcaccaccttcggagtgaaggaagaactaccccgagtgatcgaggcttgggtagtcctctccgtgggccggctcccgtcttgtccatcccttgacgaagggggcgtgcggtggcttcgtggttgagcgatggagttgggctcgcctcaacggggagtaggaaaccgacgagtttctgaacctcggtgaaaaatctcttgtcgcattgtctcatttgattgtcgcatttacttttgtgcaatttacatttctagagacatacttgagatcatatcaccctaggattgctaaacattaacataggagtgtgatttactttcctagagatatgattgagccactatcaccctaggtttgcaaaacataacttagttgcttagttagagttgaccctcaccaatcctagcaacttaggttagttttgattaggtgtcatttaattttaaatcgcctattcaccccccctctagtcgacatctcgatcctacagggggccagagcgcctaggcgctcgtgcttgagccggcgactggattgtcgtccgctttgctctctctgctttccctctctctcatatatgttaaaatattaggtaagcaggctattagtctgctattgtacctgctctaatgagataaaagataagagagaagagcagcatgctatagatctgtagccagctgcagtacggactttaagacgtaatgtgtgtatgacaggtgggaccatatattaatagtatagtaaatagctattgtatgaattagctattagattggctatagatgaattggagctagtagtgagctatactattaaacttgctcttagtactactctacttgctccattagtctcaaaataaaccaacttctaaattttaaaatttgtcttaaaataaaccaactcttacattcttactactacccactatcaatcaacaaatcgagaaattttattacttcaatacccctcatctacccattaaccaatacccctcatctacccacggtacaacaatccagtgcaagaacttgaaaattgaacatccgagtacaacaacttgacaagtgggtgtgttctagtacaagaacacgagaaatgagcgttctagtgcaacaacttggcaagaaggtgtaacttagtataggaactttatgagtgatcatataaatgcaacaacttgcaatgtaggtacgattttgatacagttagttaagaagttattgttaacagtgaaatttggtaagctcggagtagtcatcggcttagagtcagcatcggcttcgaagtcctgagattcgccgacgagagttgtcaagtcgtcagttgtcggattcttgctatattcggttaaggaaattgatctactaaatgaagcttatacataagagaccgagttcaaagagaatacgacatggcaagttatctattaattaggaatagtttgttagtttccttttatctttaggaaagtgtgtttagtgtcctataaggactttatcttttccttttatctttagtaaactttctttcttatccgacaaggacttgtatcagcccatgggtataaatatgtacacccggggtctatgtaatctatcttcacgatcaatacaattcggcgcatcgccacccttttttacttctacttttgtttttacgttccggcggaacttggcacccgacgcggggctgcatcgtcttcgatctccggcgaagggataagtccaatgttccgccggtccaggcaattgtatcgtctacgtcggcgttgttcaaggctgcatcagtacattcgacctcttagattgctctggtttggatgatatatttgcctacctatttatcatgtctctgttaatctagtcttagcatatcaatttagctctatcggctgcttctcgttttagggtttctgccggtatcggctaaatcgcgttgctagattagattagcttagacatctaccaccctgaaaacttagtcaacggcttgattgtctagatattatgtttcttttcatacttagtgttgcatcagttaagtttgatctactaagtcgtgcttagaaccataatctctagcctgcttcttgattgccaataagggtttcatcggggtttcagccggtgagttatctggatgttgcatcggctcataaggattgcatatacatataagttggatttagccgatgacaacaaaggtttcactgtttaatctaatcttgtggatttcatgacatcggacctccagccgatgtgtgctttaaccttcggattgatgcttatttattatatcttgtttctagccaattggtttctactcgactatattgttattacatcatcaacagccgattgcctttatatcattatctacattggatatatagccgattgcttacactctatcgctatcggctggtatcggcatcggctattattggctatcggctggaactactccatcggctgtcagccgatcgactgttttgatctactatttacatatcttgtcagttgcaggatcaaaccgactggcacgcccgcatatcaacaacctttggacctgcactggagctaagcagatctcccaggccggtgtgttcgattttttagtcaacagttatacaacaacttaattacttggagcatattttatacaaattcatttttaagtacttattttgacaatatactagcatggttttgtataagcatatttatatttttattctattaactaataactgaaagtcaatataattggatgtagaaatagttatatttcggttgatatttgagaaggtaaagaaaaaaaattcttaaaggtaattggatgtgcaatataattcttaaagattaaatttaatattataagttaatatccataggattgctatataatggcatactgacatcgtgagaaaaaaaacttacttagcatatgcttagctaagttgatacaccaaaatactaaattgtcaagttcttgtaatataacgcacccacttgtcaagttgttgcactcaaacgttcaattctcacgttcttgcactggctcgcatccatctgtcaagttgttgtaccgtgggtgcaatttactctaaatacattatggccttctgtttctcttcttaaaatctccttgggatgctagggtttgagggttttttttaatagagggagcaaccctggaatatgacataaatctgaacatagtttatatctagattcacgtgtaaaatttgatttattttgaagtagacggaatagtgtattattaaatctagataactgttgttcacttgtttgtataaataatataaccatacaaattatataatatcttgttgtttggcatatgcttatgggataaccattgcaatttcagattccagcatgctagtgatgtcaaacatccccaaatgatgtttgagccttttggagccttttgaagcatctactgatgttgatgcatatcaagttaaactactctggtaaggcagtatcaccattgtaggcttgtagtagctgctttttttttccactggtaagcttggaaataaaagcttatcctggccaatcaatgtgggctacttgctactaacttgctatcattatttgctttctcatgaagtattagtactttggttgtttggtgtcatcagctactccattcagcttcttcaatacctaaccctgatgagtggtatagaattctaggagctgaattactccatcattcctaaaatataaaggtttttaagtgaataagacacatcctaacaatacaaatttgaacaatcatagtagtatgaatctgggcaagagtctatccagattcatagtattaagatgtgtcctatctacccagaaactcttattttttaggaccgagggagtatgctttaggcccatttgaacaattatttttctctatcttgtaggatttgaactactgttttcatgttgttgtttaaaacatgttctactaatttccaaaaaataatgtctctttcatagtatgatgtacagtactctattatctttcttccttttctgccaaaggatgctgtacatgagctcatctgcctacaggatactgtcaggatgtgacatgctgataaccctttttttccttttgtattttcatggtctacttttccctcttgctcaaaacatcaaatacggcaccttccgtccaaaatcatctttggcacaccactgctgatggtaacctataaacaaagcaaacaccaaattatactacggggtgtttagatactggggtataaagttttgatgtgtcacatcggatattatatagggtgtcgtatagggtgttcgggcactaataaaaaaactaagtacaatatccgtcagtaaaccgcaagatgaatttattaagcctaattaatccgtcactagcatatatttattgtagcaccatattgttaaatcatggagcgattaaacttaaaagattcgtctctcaaagtagttgtactctgtgcaattagttatgatttagcatatatttaatactttatgtaggtgttcaaacatttgatatgatatggtgtaaaattttagggtgggatctaaatagaccctatatgaccttgggtccgtttgagagcttaatattttgagaagcatttggttggtagctatcttctaagaatctagaatagctaggtttcccagattctggctgccagtttattttctggattctacatctataacttcgtagaatatgtaccaaaagctgatctgttgaataagcttttgattctgagagaagtagcaacaactttaagctccccaaacagacctattggttggttaaaaataaactaaccaacgtaaagaaaaaaaaaactgagagggtactgcactactaaaactatgtatagtagaatcaacatagtagtgttacattatacatgtaaaattcctatgaaattttcatgggtcaaacgaagtgtaagtgttgagaactgccagtgtacatttcaattggtcttattttctctcaggcaacttaattgaacacaaccaaattggcaatcacggatacatattttttttttaagaaaaacatataagatacacagatcattatgcacacacatacatggaagtacaactatgaacacacatgtttcaaataaccagaggttcacgataaattcctgcagatcccattaaatccaaaattatatatgaacacatgttcaaatagctagagactaacggtaaattcttgatctcattgaaccctgttgattcctattaaaagtacagcaatatttgtatacactaggatttagacatcaataaatgaagggtgtgtttagttccacgctaaaattggaagtttgactaaaattagaagtttgaagaaaaaaaattagaagttacagggtgtgtttagtttacgttaaaattggaagtttgattgaaattgaaacgatgtgacggaaaagttggaagtttgtgtgtagaaaagttttgatgtgatggaaaagttgaaaatttaaagaaaaagttgggaactaaaccaggcctgcgtagaaaagttttaatgtgatggaaaagttaaaaatttgaagaaaaatttgtgaactagacaaggccgaagtcatgcacatacaatgtcaccgctatacctcccgtgctttcaccataacaactgggagtatcactttggttgtgttcttaccaaggtttcccaactcatttccctcgtttttcgcaggcacgcttttcaaactgttaaacgatatgttttttttgcaaaaagtttctctacgaaagttgcttaaaaaatcatattgatccatttttgaaaaaaaaaatagctaatactttattaatcgcgtgctaatagactgttccgttttccgtgcgcactgttccagttgggaacatatgctccacttaacacaatggcatgttactagggacaacactagtggttggcccattcgagttcaaacacatgaattaaagttcaccttagagctataaaattaaaatttagtttatttaatcgaattagaacagaccaacttatgcctatccctagatgggggaa

SEQ ID NO: 21420 - DNA, 24460 bp, Oryza sativa
tattcaaatgctaaatttaattaaaactaatttggtattgtgaatgttgctaatttattctataaacttgatcaaatataaaaaaataattataaaaaaagtcaaacaacttataatataaaacgagaatgttcggtgccggtcgcccgacgctccaccaaattatcggacgcactcccccagacgcgcgcgcatgtgctcctgggccccagcgcatgtctctgcctccacttactacgtatctctaccacatactccgttgcaataaatcacccacatattttggaaaccctctattaagggaattcgtttcattttttgttccaccaaaaaatgtttcacctagtgtactcataatgtttcactatgtttagatccaatgttgcagtgaactgaaatattcttttgcaacaaatcacccatatattttggaaaccctttattaagggaattcattttattttttgttctattaaaaatgtttcatctaatgtactcacaatgtttcactatatatagatctaatgttgcagtgaactgaaacattctttcgctatttgctgaaatattatttttatataaggtgaaacaacgcccaatttaaatgtttgaaacatttttgatctacttagtgaaacaattccgatatacttggtggaacatcgttcacatttaaaaataattcgataataagctaaaaaaatttcatcggaatatatccatgtgtggtcttgttttgaaattttaaatgcaacgaatttaatggtacaatcagatcataatttggataaacaatttaagagaaaaattagtttaaagtggttttccacgcatacgtggcgctgacatcatgctgacatcagcgcccgattttcggacgccaagatcgggcgcccgattctaagtctcaatataaaacagagaaaaatattgcattacatagaagcgttgctcacgcgcacgtagatacaacactatacacgcataccatgctaaaaaaagatgaagatcagcgataatacctgacttcataaacaaaagagagaatccattatatgccactccaaattaactggttctcttatatgccacttcaaattgacttctcctttctatgccaccggttcaagtttgtcctcccttttatgccattaccatcgctccaccgccagttgactgttaacttcatagtaagaagacacatttgcccttgagatttagtacacaatcaatgataggtattttagtactaatatagctactggatacaacatatgaaaattgatttttttttcatcacatgcaattttagccatcaccatcacaaataatttttcaatataagcacgaaacatgcagttttccaacaatatttttaatacaaagagcatttttcactggttctgacaaaattttgttcactcaaaaagaatttaaaataaattagttttgatttttttgaaatttacccatttttagttgagagggcatattggtcatttacaaaaaaaaaaaagtaacatttgactaacagtcaactaacgctatagtgctaggagtggcataaaagggtggaaaaacttgaaccaatgacatataagggagaagccaattttaagtggcatataagagaactggccaatttctggtggcatatagggattctctctaaacaaaattatatgaaccaagatttaaactcagttcacatcatcggatcaagtaggcctaggcctgcttaaacaacaggctgggctagacccagaaaacccaaccaaaaagctgcggcctaaccgccaaagcctcgcgctaagacaaaaggagaagcccaagccatccaaacctcggcctagtgttgggccagcattgggccaggcctgggtccggtggcccatgaacaggtctacacaggtttgtccgagcaggcccacggttggtgctagttcggcccatcgaaacaggcccacggtttggtctgttggaaaaagtacaccgaaggtccctcaacttgtcatcgagttatgaattcgtccccaaaccgcaaaaccggatatatataacatctctcaacttacaaaaccgttcactttaggtcatttggtggttttgacctcggttttatctgacgtggcggctgagtcagtgtaggaccaacgtaggccccacatgtcaggctgccacatcacacccccctctctctctttcccctcttctcccttcctcccctctctctcaattttctcctaaatgggcagccggctgacgggtggggagagggtcgtcgggttgaggcgggagaggaggtccggtggtgggcgatgaggcgacggaggtggggctgggcgacgcgacggacgctgcggcggtgggcgacgaggtggcggaggcagggccgggcgacgtgacggtgggcgtcgacgggcgccgtggtgggcgcataggcaaagccggggcggggcgtggcggcggtaggtgcgaagccgggcaccgcggcggttggcacggaggcgggcgtctcggcggtggatgcgaaggcgggcgtctctgcggtggatgttgaggttggcgtctcggcgtcgcaacgatgggtgtggaggtagagcgggcactgtggaggcggcatggctacggggacgatggcttctccgttttcttcatcgagaccaagtgcatgttgacgccgacgtggtcctagcactcctcggtgggttcctcttcgccgctgcaccgacgggcttcgcttcgacccttcgctcctccaccactctcgaccgccgcgtccccgaccttggtggctcacggcgtggccggtggccggcaagggagaagaacggcagcggcgctcggtggtgaagacaggctgaggtcggggagacaagaggtcactgccgccgccgtgctccccctgtcctcttcgatctccccccgtgctcccgccgccgctgctttccccttctcccgcgtcgtcggccgccggacatcctctccatccttgcccagcgaccgtctccccacccgtcggctggctgcccattgaagtgaaaagtgagagaggaaggaggacgaagggagaggaggggagagagagagggggtgtgtggcatcctgacatgcgggtcccacgctgacttagccgccacgttagataaaaccggagccaaaaccaccgaaggacctaaagtgaacggttttataagttgagggacgtgatatatctggttttatggtttggggacgatttcgtagctcgatgacaagttgagggaccttcggtgtactttttccttggtctgttcgtgaagtttcaaaacaggcctgtctccttgttattgagtgcacatcacggcccactaggcctctacggcccataccgatgtgcattgccgagattgtcctcagggctattgtttggctaaccggcgaccgacgacgacgcggcggccgccagcgcgatgacccgagcaaggagggcaagctcgcgaatacgttgaaaaccgcctgaaactcgtggttgagccggcttgaaaccggtaggattcggttgaaatcgataaaactagggcaaaaacaccgatttcgagccgttttcggtgattcgatgggggagggggggggggggggcgcaaaccactaatgttggacttattttatatgggctgaatttgagggcttgtttggtttagtgccctaccaaagtattggtagtgccaaaacttaagcatattttggtagggtagcattttaggtgaatggatttagattgataccaattgaaagccaaaatttatattatacttaagaaagttatagaattatgtcgaattaatcatgggcattaaccattcacttggcttcaaaccaagccattacattcactattcaaactaccaaacagattggtagggctcattttggcatcaatttaaaatggccctgaattcctctctctctcggcctcgatctgtcgctgttgcagactaattaaacgaccaacagatcaagaatgccaatcagaatatagtggcaacgaagatttattaaccatttaatcgcaataacgcgcacggcgatttctctgggaattaatgttattattgttgttgccgtgctattcttttatgctcctgtcgaggtgagtacgtactacgtattgatccatcagaggtccaaggacacatatgcatgcaatgtacatgtacacacacacgcctatctatctatctatctatctatctagctatctatctatctaactaacttttcctaccacataaatgtcaaaataaaaatgtggttcgtgtccacgaacagcgccatgaattgcatgcacacatcccactatttattggcgccaaaaactttactagcactgaatgaaatgctgcttgcaggcactagctacagtagttatagtgcaacagggtcctagtagtagtacacggcccgttccatgttagtacaagttagtattttcgtttatcctaagttaaactttggtaagtttaattaaccacatttgtagaaaaatgtatgtatgagcatctccaacaaaaaataaatgttctatgctgtatataaaagtatatttagtgatagatttaataaaactaatttggtgttgtatagcatgtcactacatttttctataaatttaatcaaatttaagaatgtttaacttaattagtacaaacttataatatgagatagggggaacagcagtagtacgtggcgagggattaaatctgaacagaacagtgtaaggtcgcggctgttctagctagtaattcagtgtactccatgcccattcatggatatatgcgctaaagctgttcatcagcatgaaaacatgcatgcatattctttgcatattaaatgtgtgtttcgatgtttatgcaccaaagcaatatctgcccaatttggaattaatgtagtacaagttccagtttcccgcggaactaaaacttgccatgtggtatgaaatagaatttccctcatctatgtcaattttgagaatttggagtgcatgcatcaattgacagaaaaattcaggcaggcagcagaaatattagagaccacagtagccagacagtctgttaaccaaatcttccatgaaaaataaaatgtgttctaaacatagcctcattataccacactagctagattaattagtagtagattgccagtagaactctaccggcatataactaaaataaaaatcaacgacaaaatgaagtctaatacaatactatctctttggagatatgtccgtactcgtgtcgtgaagtaagtcgtttaggataatgtttaagttaaatcttgagaatataaatcatcactaattcttaaattgttgaattgttgagtttgaaaatataaaaattataagaatagatttatcttaaaaaatactttaacaaaagtataaatatatcactttgcaataaatatttccataaaagtacgttgtagtgcttcggctgactattcaaattgttgaccttcccttaaatttgggaatttggagtgtgtgcatcagttgactgagaatttaattaaccaagggtccatctaatacgttaacacgcaaagcttttgagtttgaaagaacaaaattcaaccatatgggtagcagaaattaagatccaacaaaaaaataaacatacagatcaacacagagcgagagagatgacttgataatagggagtagttacgtacaattaaatcaatataaccagtagcagtagactaaattatgagaaacaataataataagtaaggatgtaatcatacgctcatcactcactagctagcccagtcagagaagaacacaagaggcggcagtaacaaattcagcgtgcaaaaggagatcgacgatcgaggagacaacaagtttcatggatggatatgaatatgatgcagtcgaacacctggtgatgatcgagagatctcgccatggacgaagcgtgacatgctggtcgccgccgccgccgccgccgcgccgcacgaattgatctctttcttgctagctggccgtggtgctggacgccgaggaggacgactccggcgagcagtcccgccactcccatcccccggctgccgccgccgccgccgcggtgtcgcaggcgcagcattgctgcaccaccaccacccggcggtggaagctgcggtggcatccgcacgcggcgcaccggagcgcgccgccggtgccctcctccccctcggcgaggaactcgcggcacccgtccaccgcgtggccgcccatcctcgccgcgtggttccgcctgcactcgccgtacctcaccctcccgcagcaacctcccatcgccgccaccaccgccgccgcaggctgcggcggcggcggctcgcaccgcctcaagattaccatcctcttcatcatctcccgaacaactaacaaccaaagaaattttcgtggcaagatcaatcagtttagctcgaactatctatctatcgatcgagctggaggagaagacgatgagatcatgcacacacacagtgtgcagggagatcgagatttatagccgggatagacgataattatagctcattcgacgttggcgcgactacaccaacgtacctaatagcaatggcaatggcgaggtttgatggcgtgtgtgcatggatggatggatgcataaagctctcacatggcaagagcctttcatacattcacgccctgtggattgggagatcgaccgatggaagacctaagaggggctagctaatgttctggctggccgaattgatggtccagccaattccacctcactgttgcaacacagccaaacatgcaccactactatacccactgtacacttcgttcctctcctcttgcactatacacatgttcctttctttaattcttgggccatatatgcaattaccacacattatattgggttttatgacacatacagacacacctattacatactactactccactagttattattattgaatttactctacatttatgtatatatcatctctactcctcctataggtagctatctcatatctgcaactagctagattttggtatagtactctagcatgcatgcacccatttggtattttctttgggagcgatactccggtgctctctactggtggtatattaagggtaaatcagtaatttactaatacaatgattagggtaacagtgttatatatgttttttttggctagatcaatgtgtggtcatggtattgttcatattccataaaaaaacaaaaaagaagaaataatagtttagtcactactaaataatgattatacttctccgcatatattttttttggataataatggcctccacgtttgtaataactagggtggtagtataaaaatatctgaacccttcaatcaaatgagattaatggttcaaattaatttctactaccaatagatatcaccgtagtgaggctctttctttgattgatttcttggtgtgagaaaaatgaaataatggaccaaccaaagctagggttcatgaggtgaaacttagctagctaacaagagaaggtaggtaggtcaaaaggctaagctaagcctatgagtacatgtgggggcaggagctggtgattgggaatgaaggagaggagagagtacgggagcgccaggctagcgagatactgaaggttggcagctgggttgcattgcattttgcatgcttagctcttggcccttgctccattatcttggctaggttagcttgcttgaccagttcccgatcgatctgcgacgacgatggccggcaccggcacgtagtagctaccaaaccgggccctcactgtgcacgtgttctagcctaactataggccgtgttctatactactcccaggttggatgaaatatattttagtagtatgggcagagcatatccagattcgtaatgttaggatatatatcaacaaaccaaaactcattatattttgggatagtgcaagtatttttttcaacttatcctctcttgtttttccgcgctcatactcatcaaattattaaatggtgtgttttttttctcaaaaagctttgctttttaaaatcttattaatttatttagctaatacttaattaatcatgtgttattcccttgttctgttttgcgtgtttagaaggaaaggtttccaaccttccccaaagaacatagccttctcactgtctacgtctgtttgttggcttatgagccacaatcaaaacttaaattttggaccataatttcagagttgatcagtttggggttttttcattgcatgtagtatattcttgatccagatttgattttaaaccgctaataatacaaatataaaagctttacttataaattattttgtttgcttttcaatcatttatattatcttactcgtagctcaatcaatcatagccttaattagctagcggtgcaattgcattgccggctccactgttgcataggtttcaccctactgttgcagcatgtgcagggttagaggtgaggagggagtacgcagcgatgcacctggttgcaaaaattggtgtgtatacagtcgcaacgtaccgcattgatggagccagaacgcccagattcctggacaaacgttgttgtgtgttttctcttttattagtttttgttcgtgttattattaattagtttcctgctgcttaatttgcttcagtgtatatatagtatgctgtcatggaagaacagggtcgcgagcatgacaggatggagccagcttgatgaatactagtaatcaactgtgtaggtctgtagctagctagctgagatatgagcagtttgtgctgtttctgtgcaatgcaatgtggctgcttgtctcgcttccatccatgtgtgtactgttttgtggtccggtctgcgctttggatgtgcggtggtatatatgtatcttcggtgcaagctagggatatgtgttaatttactgatgttatatactctctccgtattttaatgtatgacgctgttaattttttgacaaacgtttgacctatcgtattattagtttttatgtaattgtcatttattttattgtgacttgatttatcatcaaatgttctttaagcatgatatatataagtatttttatacttatataaaaaatttgaataagacgaatggtcaaatgttggttaaaaaatcaatagcgtcgtacattaaaatccggagagagtacttgttagttggaactagtttagttctctcaactctcaagcagaatgctaaactaaggggaaaaaaagcactgcatagaccgctcatcaccgatgggtcaagattaaattgtacgagatataatggtttgccgaatatgtgataccattgtatgtaatgcatggttttgatccattacgaatatatcctcattcgtagtggctcggttgcacaggttgttactcacgttaaaatttggcaaaaaaaaaaaaaaatccagccccagcccatttccgtagtggtgttgtcgtcaaggctagatccagcacccgtcattgttgttgaggcctgcactgtcatcgtggttggatatcgtcctctccattgtcgccatggctggatccattacccgccattttcaccattgtcgaatccattgtcgctgataaagctcgagcatctgagttgtcatcatcgaggccatgggagcacgacaaaggaataagagctgctcaccgcctcttccaaggtcagatccactatggactatcatcgtcgttgaggccgaatctagaggtggagacggtgaaaaccgtcccgagctccaagatgggcagtcaaggaggccactcgctatgacattggtgcttcgcgggatgagccacctctggatcttgaggcagagtggatccctagcgcaacaatagtaggagtggagcatgagggcatgacaacgtctactctggatggggaagtgaaggcgacgattgatgctggggtcataaaggaagcaacattggccagcgctggggatgaggagggaacgcggtggctacgattgtgttggcatcatggagtccaggtccgacatagtgaagaggagtagtccatcgcactcctcgttatcttagagaggagacgtgtcgacgttggatgtcgcaactacggtatttggacagtatgaggatcgttggtgctaggatatacgtgagactaaggtaaaagagatggggacgaagatttttatacaggttcgggcccctgagtggtcaggtaatagccctacatcctgttggccggagccgatgttgctttttattcaccataatctcaccagtacaatatgtagggtagcctatctaactgttgtcgacatgatggtttgaaggtctgacttgtagtcgacaacagggtagtcttcctcctcgaatccgtgcccggcgagatcagagatagcgctttcatatctcctgacggtatccggagacaccgtaggagaatagccatgcctatccctgaagtcgatattcgacggcgtgtcttggcgtatgtaggcttctatgttgattgtgttgggtgttgatcatgtcgggtgttgatcgtgtcgatcttctgtcgattgtcttgtgtcatggtgggtgtgtcctcttgtcctcctaggggggcttgtatttatacccataggtgtccccttgtccaagtagaactagggaaaccaatatggatacaatccgagtagtccttgtcgtttccatgtagaactctggttgtctttccttatccggaactccctcgaggtcagtttccatataagacatggtatgtggtggatcctgccgagatttagtcaactactattaggtatgtggtatccataaccatgacagtagcccccgacttcaatgcaaatgaacgagttcatattctcagccgcgcgcagacattggagtaactgttatcgagctcatgcgaccgttctcggtgagtttagagaaaacgttggacttcctttgtcggcctcgtgcgggcaccgaaagggtttgtctaagtcaatctctgatgtcgaccgagaaagtacagagcgtacaactaagtctcacgtcttgttgtaatcgagaatttggattgaagtcaagaaattttatctcggcgggtacaccatcttttcattccgtattccttgtcgagatccaccaaccgttctcgagtgatcgagaaggcgtagagtctgcgacggagccttgtcgacattggtcgtactcgccttagttgatcttggtgtagaaccatagagacatagagccctcgtcaatgtcgaatagaattttcctgaaatcaatactcagaaaagaatattagatagaaatagcccccaagcgaatgctcaaagggtgacatgttataatatgtatggtaaactgaaaatgaatcaaatttacccaccaatgttttgtgtaagagtgtcttctcagttcacgactttggtcagtcgtttgagttgtacactctccctagcccccagccttgtcgtcggagaatcgttctcggaggagaaggctcttggacccttgacctgtcttggttgaataagcactgatcctagcccccagccgtgaagttggaaagctcagtttctgattacacggcttggttaatacgcacggcgagaactcttacacgaccagatcttacctggtctttcgtctctgaaggatccgacaaggccttatcggctctgggcgtccccagacgaagatcccttaggttccttggaggccttgtcaggacggcgtaaagggacaacaggataggtttcaacgctaggtgtcgtcgtggtaagggatctctgggtaaaacacttggcgatattgtgtacctgctatcaactttgttgaaatagaggtagtgagagagacgctacgtcgctggtcgacgaccaggcagtagtcgtaacttgaccacttggagtggaaatagtgggagagacgctacgtcgctggtcgaggaccaggcagtagtcgtaactcgaccactagaagtggaaatagtggaagaaacgctacatcgctggtcgaggaccaggcagtagtcgtaactcgaccacttgaagtggaaatagtgggagaaacgctacatcgctggtcgaggaccaggcagtagtcgtaactcgaccacttgaagtggaaagtgggagaaacgctacatcgctggtcaaggaccaggcagtagtcataacttgaccacttaaagtggaaagtgggagaaacgctacatcgctggtcgaggaccagacagtagtcgtaattcgaccacttaaagtggaaagtgggagaaacgctacatcgctggtcgaggaccagacagtagtcgtaactcgaccacttaaaatggaaatagtgggagaaacgccacatcgctggtcgaggaccaggcagtagtcgtaacttgaccactaaaagtggtaatagtgggagaaacaccacatcgctggtcgaggactaggcagtagtcgtaactcgaccactagaagtggaaatagtgggagaaacgctacatcgctggtcgaggaccaggcagtagtcgtaactcgaccacttaaaatggaaagtgggagaaacactacatcactggtcgaggaccaggcaatagtcgtaactcgaccacttaaagttaaggtgcgagagattgctacatactggtgcgagaaccagtgaacgagcagaattatctctcgaacaccaatggaagttgcggtgtgagagattgctgcgtactggtgcgagaaccaatgagcgagcggaattatctctcgaacaccaatggacgctgcggtgtgagagattgctgcgtactggtgcgagaacgagtgagcgagcagaattatttctcgaacaccaatggaagttgcggtgtgagtgattgctgcgtactggtgcgagaaccagtgagcgagcggaattatctctcgaacaccaatggaagtgctagagttggtctattgcaagtatatctcatgtggccagcatgactcacgtacccaacttatagcatatccggatgtccgttcgcaatcatgtcgggtgatcaagccgacgacgttcgcgaggaattatccgttaacaaccttttctcgagtagtccagccatggccggtgctatgagataagtcgtcggtcttcgttggcaggttgggtgcgataactccgcatttgtggagaatgttctcgataatggagtgtactcgaccataacctactcgagtgctcagttgttcctgaaaaatattttctagaaggcaagatatatagcagagaatatcgaatatgtattcaaaaaactgcatggatcttctagtattatcaggatataacgagcagatgtaaatatcatgcattatgtaaaccgtaaacaagcatgatttatacagaagagaacggagcgagccccagcgttggaccgtagttggcctaacatcggggatgcttgcacaacgtatattgtataagaaacatgctctaggtaaacataataaattatagatctgacaatgctgtatgatctgaataggtacgataaattgcatataaaatattacgtacctttgtagatacatgccggatgtatctacgaaattagtagatcaatttgaaaaaccaaattaccttattgcgtactcgttcgacatcatatgatctgacatcttttggtacgccgcgtatcttgaggcttggatgatctcgatagaccaagttgtcgatgacgatgatggttccgatctggtcggaagatgtatttcagttaggttagatctcctcacatccgaagtcaccgagtagcttgttatcggagagtccatctcttaaacccatctcgtcgaaatcctagagcaccaaaatccccctacctggtgcgccactgtcgacgttggatgtcgcaactacggtatttggacagtatggggatcgttggtgctaggatatacgcgagactgaggtaaaagagatggggacgaagatttttatacaggttcaggcccctgagtggtcaggtaatagccctatatcctgttggccggagccgatgttgctttttattcaccataatcacaccagtacaatatgtagggtagcctatctaactgttgtcgacatgacggtctgaaggtctgacttgtagtcgacaacagggtagtcttcctcctcgaatccgtgcccggcgagatcagagatagcgctttcgtatctcatgacggtatccagagacaccgtaggagaatagccatgcttatccctgaagtcgatatccggcggcgtgtcttggcgtatgtaggcttctatgttgattgtgttgggtgttgattgtgttgggtgttgatcatgtcgggtgttgatcgtgtcgatcttctgtcgattgtcttgtgtcatggtgggtgtgtgtccccctgtcctcctaggggggcttgtatttatacccataggtgtccccttgtccaagtagaactagggaaaccaatatagatacaatccgagtaatccttgtcgtttccatgtagaactctggttgtctttccttatccggaactccctcgaggtcagtttccgtataagacatggtatgtggtgcatcctgccgagatttagtcaactactattaggtatgtggtatctataaccatgacaagacggtccaaacagcagcggtgcaggttaggagaaggtagagaagatagtcaaggaggagatctggatggccggcccgatttggtgtctggtgcccggtctagacgtagagagataaggatcgtactagatggatactactatctataattgttgcagaaaaaataacccattatagattacttatgttttctttaacaggttttaaataagtaaccatagcaaataatttgacatatgtaaaaactgcatattaagagtggttgtatatgaccaacaccacatctatataactgctcctttttttagaccattaattatagatacgtagtcattatcgatggtacgtgatggtccctatatatatagatctttaacggtttatttaaacaattgtatgggtataataatttgtgataggtctctttagccgtcatatatgaaccgtcagagtgaaagaatacttacatggcacgtaatatgttactacctcttttgattcacttatcagcacataccttaattgtcgaaaaattaatattctcctgtcccaaaatataacaacttttagctctcaggatttgtctcgaaatataacaacttctccaacaacattctcttcttaaccattcataaccctccaccattcactttttccacctactttcactattcatccaatcacaactcttcaccattcacttttatatatttttttaataaccgcgtctaacgataaaactacttacaacccttcttatattatgggaggagacgtagtaacaaccttctcacctcgatgtgaggcgaatatgaagttcgctccatcgtgtgcattaattgaaaggactacctgcctgtcacctctgcacaaaccgtgtacgcagaactagaatcctccagtaatgagacatcttcagttaattgccatgatttgatcgagcaaggacaattgctgaaatatccagaatagtagcagaagtagagaatccatacaacatgcaatgctttcaattcgatcgtccaaaaaaaaaaaagcattgtagtgcagtactgcacaaagtaaataccacaccactgctacaagcattgcatgcagaggcaggcaggcaggctatagcttgcaagaacggatcgatctgatgagcgatctactacacttatgccctgtatagtttccaaacaacaactttttaccttatcatatcaaatatttggacacatgcatcatagagtattaaatatagacatagaaagaactatttatacatattacatgtaaattatgagataaatctctaaacctaattacgccatgatttatttgacaaagtaatcatttgctaataaagtattgattaggcttaataaattcatctcgcagtttacaagcggaatctataatttgttttgttattagactatatttaatattttaaatatatatttgtatatccgatgtgacacggaaaaccttttcacctctggactagagagggtcttagaccctgtttagatcagacatttaagttcctatcacatcggatgtttggacactaattataaatattaaacgtagactattaataaaactcatccataatcttggactaattcgcgagacgaatctactgagcctaattaatccatgattagcctatgtgatgttacagtaaacattctctaattatggattaattaggcttaaaaaaattatctcgcgaattagttttcatttatataattagctttgtaagtagtctatatttaatactctaaattaaaattagtgtctaaatacagaactaaagttaagtcactgaatccaaacaccaacttaagctacctagctgaaacctaattacgacaacgatatgtacatccatccgttcatcccctgatcgatctggtcccgttccagcactgtaccaggcgtaacgaaacttggctggtttctgcacccagccacgtacacatcgcattctgtgatttgcctgtctctctgcagtgcatcactgtgcccacgcgtcgctcgcgcgcgcaacgtactcctgctctcgctgctcaccgctgatattttaaaaaaaatctaatattatttattctgactatataaggtttaatcgttttggattggattcctaaaacttaatttctattagtgtcattcggtttgtagaattgaagtatatataggaaaatcaaagggaaattctctttcctacaagttgtatagagaaaacatagaaatttttccatccacttataaaacctcttgaaaaaattcctatggattgatgtgtgcaaacattgttatttctttacatttcctattcctatgcatcaaattcatccaaatcaaataagccctaaaagtaacagtatgaaagaatctaagagtttataagatcgagaaaaaaatcactctttaataaactttatgtctcgtgcagaatacaatacgatttcatctttcgtttcatcagaaaaaatggctattcattacatatcatagtccgagatggatgtataaagagaaagggccacattatttccctacaacgtatataataataccaaaatttgaatcttaaaacttaattttagagttaattttaaagtttttttcatcatagtttatttttaaacgttggcatttaagtcattaagaatacgtaggtaaaagtttaatcataaattattttttatcgctaataccgtttaactattatccgtaattggccaacaaatggcagtcaaaactaattggagcatttattttgacaccagagtactataatgatatcaataagttttgatcattttttaacaaagttttaaaatatctgaaataattttgtattactccctccgtcccactcgctaagacgtggtcaaatttggtacagtcttaaaatcataatcatataaaagtaaatttaaatgataatacaatgatatcatttcataaaataaattttaatatatagtaaaatatttattgatcaaatatttaaagagctaaattttaaaatacgtgcgcatcttagtgagtgggacggagagagtatcaaagtttttttcatctttcctctctccttccatccgtttgcaaatattagtcaccggagtaccgttcatctgtacgttttgatcactcatttttctcccagaagttttaaaatataaaaattgatgacatattatatattaaactttgttgtatccaaagcatgaaagtttcatctatcatggtttaaccatttaaaagttactgatggttaatactgaaacagtagaaagcccgtttcggaaaaggagtagaaagttaaaatttgataagtaaatgtaaaacggaggtagtatagtgtatctgaattttctgcatgcatgcagttctggctttgctagctatatatagctgatcgatgctggtccaggccggcttatcaattgtatctcatttcctccggcattaattactgccgtgctgcttaccaccagtacactaacactgtaagtctgtaatataccactgtatatacttcttctgtccgtgtatgtacgtagccatgattcacgtgtatacactccctccattttttaatatatgacgcgttgaccttttaatatatatttaattattcgtcttattaaaaaaaatataattattatttattttattgtgacttgatttattgttaaatgttatttaagtgtgaattaaatatttttaaacttacacaaaaaatttgaataagatgaatgattaaacttttatcaaaaaaagtcaacgatattgcatattaaaaatggaagaaagtaagttttactctgtaaagactgcgaaatattgggatagatagggatgaattaagctgcctgcaagcaagcaagggtacgggagggggatgagcgacgattcaactgaaacagtcgccgctgcagggaaacggccgcgacatggtgggagcgagacgccgtgcgtttcgctgaattctgcgtgcccccggcctgatcgacgtggaaaacactggaaaaagacgcgaaccgcacgagagcagcttagcttttagcctctcgcgccggccgccggccggacgtcgagcgaggcgaaagcgacgacggaatctcagcgcacggccgccaaatagggagaacatccgtatccccatgtaggacgtcggggcgcgcgcgtgtcggcaacggaagaggaatcctctctgacggaattacctatcgtgacgtagtcgctgacatgtgagacccattatttttcccgagtccatatgtcaagcgatcatgtttcttttgagttttgttacgatgcggttttctttttcagttttgtgttagatattaacagtttaattaaaacaaatgcatataacatcatgataagtattttttcctccaagggaaaaagatcgagagagaagttaattgcataatttaaagctacctaaaactgaagagaacatgaaggtggaaaatggatatatacatagcaaaggcctagtttctaagtttgtggtaactctagcagattcatgaagccaaacacaatcacgtgattcacaccacctcagcagccagaccagacgtccgatcgaccagccgacgagaaaagatatctcaatagttccctgcagatctgcaactgctaacttgccgtactatactttcagatgaaatatatatacttataccgtgtttagttccgaactttttttttcaaacttccaattttttcatcacatcaaaactttcttatacgcataaacttctaacttttccgtcaaatgattttaattttaactaaacttctaattttggtatgaagcactgacaggatagcattgacaggataagctgatactggtatcagataaaagatcacaagaaggagagccttttgcctttgctggatttgattcactcgtcgacactggattttgacaaagatagtcgcatctagggatggcaatcgggcgcgacggacacgggtagtacctacccatacccatgtccgtaagattatttgtgcccgtgggtatacccattactacatgacgggtaaggatggttgcccatgcccattgcccgcgggtgtcttatgcccgggggcgtgcccgtttacccgccacaacaaaagcagtggaacaaaaagtctacaagctactaagttcgaatcgaacttaaaacatcaaatattctccgcctcggtgtcgtgtctctcctctggtggcgatagagtaagaggagagaaataataagggaaataaaagggaaaccgtagaaaacaaagaacgtggcttatgtattctagtggattttgctcctagcctacatgtaagttagatttcgcgggtaaacgggcaaagcgggcatgggtagtgattacccatacccatgcccatttacccatcgggcatagcttttgacccaataagatacccatgggtataaaatggagaacaaacccaaccctaatagggtttttacccgcgggtaaacgggcaaacgggcacaattaccatccctagtcgcatcctcgctctgtccaatttcctcacgataacgccaccagaccaccaagcccgtatccaaaggcccaccaatccacgaaattgaagcccatataatggcccacgcgtaggaaaggaatcggcccatcgcggactcgcggcccacagcgggattatctggttgcgttttccaccctcccgcgcgcgctgccggtgacgaaatacgatgatggaaattcccgatcgactgaccatcgttcatataaaaatgatatcgtttcagaccgatggacgattgtttctgtagaaatgatatcgttttcgaccgttttcatgtgtgatggctggcggattcgccggccgccgcgtgataacgtacacggccctcagctcgtgcgtgcgagaggacgcgtgcatgggcgctcatcaatggagaccggtcggtgatcgatatcgccatcatctcatcgatatatcgccacagccaaggcgttcaacgtttaatcgttgcgaacgcgcgtgcgcgcacgcgtgcttcgaccgcatatgtatgcaccacgcgcatgtggcttatgcgccgcatgcatacggcagatgatctcgtgtagtccccatatacgggagtaatttgcattgtcatttactcccttcgtccataaacattggacgccgttgatttttttaaacatttttgaccgttcgtcttataaaaaaatcaagtaattattaattgtttttctatcatttgattcattgttgaacatatttttaggtgtacatatagttttacatatttcacaaaagttttttaaaaaagataaacggtcaaacatatttaaaaatgccaatgacgacaaatatttagggatgggggagtacaagtttagtcttacgcatcatatatatcttattttgggatggaagtagtagctatagctaccgtacatattgcctcttttttctgttgggctagctatctctcgatctcgatcacatcatagttagaatgattttagaattcttgagaagatattgaaaggtactatataagtttagtaccagctcttggaccttcgatactgtaaaatatcaaatttgtattaaaaattttaatatctcttaagacagaacatctcaaagatgctatggtaactaggggtggataggaagcttgtgactagttagctcgctcggcacgtgacaagctcggctcggctcgttgattttcctaacgagccgagctgacattttatagctcgttagagataacaagccagctcgagctggctcgcaagccttaacgagctagctcaacaggccacaggccacaccaccacaggtccacagaccatagcccaccacatggaaggcccactggcccaatagagtgcatcacaaaaccctaaccgctcgtctgttgatccgtgcacacctgcatctaaccgccgcatcggcgccgctcccatcgccatcgcccatcagcgccgctccccgccgccgccaccaacccgcatcgctgccgctgcgggaacgcgaccgcgccaagccgccaccgccgccaatccccatcgccatcgcccatcggcgccgctccccaccgccgccgccgccgccaaccctcatcgccattggctccgccgccgcgataacgcgaccgcgccaagccgctgccaccgcccgccactgccgcaggaatgcgatcgcgccaagccgcctacccgtcaatctccgccaccgccgccccccattctccgcgcggccaccacccgccatctctcccctcagcggctagttcgccagtcgccactctccgccgccgccgcccaccactagctctctgccacactcgtcccatccattgtgactctgtgagcttctcctgtggtcgccggcaagcctcatccccatggtcaccggcaagctcctctccgtggtcgcggtgccggtgaggttgagctcctccctatggtcgccgaatgccaagtaaatgaattcctttctctcttgtccccaaagctcgcgagctaaacgagctggctcgagcttgcagacgagccgagccgagccgagccaggtttctagcttgttaggataacgagtcgagccgagctggctcgttatcttaacgagtcagaccgagccgagccgagccgacatccacctctaatggaaactaaacagatacagatatagaatctatcgactctagagacgaagtcatggagagtaaaaggccaatcaagcactatatgatactttccggaaatgtggttatatattctggtacatttttactgtatatgatacgcccaacaaattaagtgggattccgtaacgggataaatcgtcaataattaattcagctgggggagacaaacgtatcgatctccccaaatgtacataagcgaaataacttcagtaccgtatagtgcatgctttatgagttattctcacgtacgtactccctctatttcaaattgatctacatattttacaggtacaccaagaccaagaaaagctaataactttctcatactatatttactctagcaacaaactcaatgcatgcaccatccccactatttcctaaccaatagcaaatcaagattttgcatgtgagttataaatacttgtgatgcatgcatcaatgttcatttactccaatgcacaaataacgaataaagacttaataaatgaacacaaatatttagatcatttaagaataaccaaaaaaaactatatgtagatcaatttaaaatggagggagtattacgtagtatatatatcctatcgatgatcggcatgcacgcttgccgcaacatgctcgctcgccaatgtacgtacgcgatcgtgtttgagatcttctacaagtacggtgttatatatgtgcggtgtcatatcctggtacttctcgtacccctactactaccactaccggatcattcaatatatatatacacacacacatacacacatatacacacatatacatacatatatacatatatacatatacatatatacatatatatatatatatacatatatatatatacatatacatacatatacatatacatatacgtacatgtatatatatatatatatacatattgggcgtggaagaagaataaacgaagatttcagaagactactcaagaaggaatccagaaggacaccctataaagcataaaggaacaatatagggtgcggtgaatgacagcggtgaatgacatatccctgtgaagaataaaactttcggcaggaaaggcctcaactttagcctgctctcgtgaatccacagtagcgaagagataagtaggaggcacaggcgacgccacccctgacctctataaaaggaggggcctgcccagctgaggagaacacaacaacaaaaaaagacaccattcagagcaaagcttccaagcgcgctctcaccctccattccaccgttcttagtagtagtgactttagcctatcttgcatagtatattgaagcaagaagttgtgttataacgctgtgtaaggtaagaacagcttgcttgtacctaccttcgggtttcccgaaagggaaaaccgtatgtaagcttatctgtttaatatgaagtaattttccttaagtattcctgcacgtttgttttagacaagtgtttatgctaaggaccctataggagaaacctcttcggtttgttctcgtttttagcctgcatcttgcataggcgtctggagaatcggtatccgtagagaagtgttcccttcgggtggaactgcctggggagacgataaactcttagctagaacaagtgtgacttggaatatctttttaagttgcttctaaaaagacagataggtgaggcatacggtgagtaccgagtagaactttacatcatctgaaacaagcttctgaggctgtctaagtaggattcgccaccctgcaaagatcctaaagttaaaatatctctcgaagtgaacagtattgaacagtaaactgaatagtaatcagccgaataaacagtaaactgaatagtagattcttgaaatattgtatattgtctgaagtataggtggtatgagagccagtcatcatagagaaatcaaattcagaagctaatattggaaaggtaattactaccaaagataatctgaatataaggtgtagactaaatcacattgaagaccatagttggcactctaacaatagtcaattaaatttaattgttgatctgatatataatttttatataaattgggataaaaagcaggaagatttagagcgaaggattgaagatttgtttaaagaa

SEQ ID NO: 21421 - DNA, 705 bp, Oryza sativa
gtataaatatattcaccaaggtatgtatataataggaatcaaaggtatgacaagaaagaaattaggaggtaaagttttaataactctgttagataaaaggtgggacacaatagataaagcagcattaggatttttagaaggtgatatgaatgagaatatgttgataacatatatagccccagatctaatgatgcctataaaagaatttatagataaaatgagttttggttttcaaataaagggatacgaagaatttaaaggaacaaatttgctagtaagcatagaatttataggaagattaactaatagaagtgcctccaaatacaaaataaatgtaaatgatgtgattgaaaatatgcactttaagagaataactttcatgagccctttaaaaataagttctgaagaaagggcaggagaagaatggaaaattagtgatttaattgaaagcaaaactttgagtcggcctgaaaattatataagttatcaaaacagtaaaggaaatagcagcattagatttataaattacaaacccagaaccacagatgacttagaaacagaagcatctgatagaaatataatagataatagaagacatagtgtttcagagtttatggaaaaattagatcaagaaagtgagataaaatattacgaaaataaattaaaggaaataaatgaagaatataataactctatgaagagtga

SEQ ID NO: 21422 - DNA, 1075 bp, Oryza sativa
  unsure (1)..(1075): unsure at all n locations
caaaaatacaaaaaagctaaaggaaagaagactccagaaatacccattaaaacgactataaaagaagaagggtattctaaaaaacccacatacaaggaatgcctaacaaaaggagtggatccattagatggggaatatattgattggaaaataatagaaaaatttgaagaagcctccccacaattaaagaacgaattaaaggaagaaatacttaaagaattaaaacaagaaatggatcagaaatttgaacaaataaaaaaggcagtagatgagaaattagaagtttctttttctgatctggacactatggatcttggtggtcatgggcaaccagatgaatagaattctttaagctaaatatgtttttcaatatatattgataatagaatatcaacaatttgggcgtggaagaagaataaacgaagatttcagaagactactcaagaaggaatccagaagaaggaatccagaaggacaccctataaagcataaaggaacaatatagggtgcggtgaatgacatatccctgtgaagattataattttcggcaactttcggcagtgaatgacatatccctgtgaagaataaaactttcggcaggaaaggcctcaactttagcctgctctcgtgaatccacagtagcgaagagataagcaggaggcacaggcgacgccacccctcacctttataaaaggaggggcctgcccagctgaggagaacacaacaacaaaaaaagacaccattcagagcanagcttccaagcgcgctctcaccctccattccaccgttcttagtagtagtgactttagcctaccttgcatagtatattgaagcaagaagttgtgttataacgctgtgtaaggtaagaacagcttgcttgtacctaccttcggatttcccgaaagggaaaaccgtaagtaagcttatctgtttaatatgaagtaattttccttaagtattcctgcacgtttgttatagacaagtgtttatgctaaggaccctataggagaaacatcttcggtttgttctcgtttttagcctgcatcttgcataggcgtctggagaatcggtatcc

SEQ ID NO: 21423 - DNA, 20851 bp, Oryza sativa
ttaacgtcaaattcattatattttagccgtaacaaaaaaaaaacaaaaaatctgacagttttaaggttgcaattttgtcagaattttatcttttttgttattctctatgtagaatgaatttgaagatgcgactttgcacgtagatgcaatactattgaaagtacatgtatgaattttcctagaattttttgtgataatttttagttggtgtacacggtgtacacacgagggcctgtgtgcataggatacgctacctacatatatatacatatacatatatatatacatatacatatatatatatatatacatatatatatatatcatgattagggaaatttggcaagataaaattggaatgaaagtttaagatgttgtttctgcataaaaaatgagaccatacaacatctttttcttgactgtcattatgcaagatttgttggagaatagtacaattctcttttggtttaaaccttccaagtaccatatctaatatatttgatgggtggcttataagagttaataagaagaagtgtaatcttatacttgtaggagcatctgccatatgttaggccctgtggttgagtagaaatgatttagcttttaacaaatcaccatatactccatatatgcaggtaatattcaagataacatattggctccggttttaggcaaagctgcaaaagtgtgaagaggatggtgaacttatgaagtttgtatgccgtaaactcgagacgacggtgatgcaactctttgcaaattatggatggagattcacaaatagacttgaataaatgtgtactacttatcttggtttgccttttattctgttgagtgtgtttgattacatttgaactacactctttgtatgagtgatactttgtaataattggctgtaactctgttgagtcaaggccgggatataaattccattatctaagaaatcatgattagagaattttggaattaattgagctgtacatgaggtatatatatcccatccgcacatctttatgtaattccttcttgcattgtgttttactcctccattttattacacacgcccccccccccccacacacacactaccacgttcactcttctatttaaactatttttttaacttacaagggatgcttcatatagacgaggcatttcccgcgcacccgaaccgccactcaggtacattttttttttaaaaaaaaactaatacgtgtaggtgccagtttattaacaaaactgacattgctgagaatgaagccaagctgactcgacaaaccaagcaggtctatgcacctgctcaccctcacctctactaccttttgctcctttgccaccactgcccctccccctctcctccaccgccgccgccacaacccatactgctttttatatctttcccttttcatttgttgatctaaaacttatgtcgttcatgactatgagctgaagattttctcagcccatccttagctcttactccgatcccgttctcaagttcgagcctactgtccttattgacctcaagccacgccgatattctcgatctcaagcacacagtgctactcgccctcgatcgggtttgagctcgagtagatccggaggggcacgcttaaaggcaacctcgtcccgagcttgagctggccaccgcaacaatgggcaacgcggtgaggtggtggtcccattgaaagggagcccaagtggcatagctagctcatgtggtgtcgattgtcgccaacaaggccaatagtcaacgatggagggtgaggtggcaatgcatacatggctcttgggagccaacgaggatgacgacgatgaacgaattagggtagctatattttcaatttagtaggccaataaacggcccaaatcgttcactggttttcgaagagaaagctaaccacacgtgagcaaccaatttattgtgttcgggcgagaggtgagagagtatgacagctgggccatcattttttaaagaaaattactgacatgattgccacataggcatcacgtgtatgtcacgtaggacaaaactgctccggattggataatgtggtaattcatccagtattaattcatctagttttcaggtttatgggagtaattcgtactcaccctaataattaggactttttctccatcaatacctctttcaatgttgcaattcaacttttcaaaatgatatgctatttcgaggaaaaaaagaactttccaaaaaaaatttaaaaaacaaaattgttaaaatttcccccttcttatagattttattcaaataattaacaatcaaactagagtatattatcatgaccattccctgttctttcttattctctccatatatctccatggtcgaattaatcaataactaatctcggccacacacttgttccttcaattcccacttggggtagctagcttaatccaacccaatcgccatcgacatctcaacatcgccatcaccatgatcactgtcgcaccattatttcatcaacccctgtgtacggggcacgatcgagaaggtagtatcatgcattatcatctctgcatggcttgctggttaagctttttttacccattcgttcgatcctcctctactcctctcacacggtcgcattcgatcccctgcacgtcatcgtcgatagatcgacggcgtccacaatagcggcggcgcgcggccggccaagtcaaaatccgcgagtaaatgttaatcgctctcacggccgtagattcaggccatgtttagtttccacataaaaattttatactatatcacatcgaatatttgagcacctacataaaatattaaatataaactaaaaaattaactaattacacagattgcgactaatttaggagataaatcttttaagcccaattacttcatgatttgataatgtgacgctacagtaaatatttgctaatgatggattaattaggcttaataaattcgtttcgctgtttactgacggattctttaattagctttttcattagtgtccgaacaccccatgcgacaccctatataatagccgatgtgacaccccaaaattttacacccgtgaatctaaacacccctttaacgttaatcgctctcacactactacaatagctatttttgcgtgcgattttttcgcccatctggagcggggtgtctggtaaaatcgcgattttctcgcgcgggtggcgcacctgcacgcaaaaatgggtgcttatgccacccgcatgggaaaataaaaatccaaaaaaaaaaatcaaaaaatggaaaccataaccctagatccgggcaccccatcgccaccgccgcgtcggccaccgccaccgccggatccgagcaggggactaccgccgccgccagattctgggtgtggggagggcggtgccgctcccggctgcctcgcgcgagcgtcgggaggagggggataaggtcgagcggcggcggcggcgccgctcccagccgccgcctcctccttgtcatcgtcggcagcggcccccatctgcctgccgtcgcctccccaccgaccgcccgtcgccaccgagcacgccgctcccggtcgccgcgcacacaccgctcgctgtcgcgtgcacgccgctcccggtcgccgagccctgctgctcccgtccgttgccgccgcgagtccgccgctttcgccaaccaccgctgagagccgcccggaggaggagaaggaggcgcgcggcgccactgcacatgaggagaaggagaaggtgagagagagagaggaaagtgagagaggagaggaaagtgaggagaagaaaaaggggagagagaggagagaaggtaccgggggagagtaagaagaaatttaaaattttttgaataggatgggaggaaacgaaaatagaaaaatagacttattttcgcgtgcggtagattaggaggcccgcacgtgaaaatagacttattttcgcgtgcgggcctgttaagtgacccgcacacgaaaatgattttcatgtgcgggtgacgacctggcttcggtccctctatttttccgtgcggtccaacttacggaccacataaaaataaaatggggtggcgtccagaaaaatcactcatttagtagtgtcatggccgtaagggattcacttgcagtgagtctgtgtgacgaaatgtcgtcgtcgtcatcgcatttaacgccacggcgccaccgtgtgatctcctgtgtctcgcacgtatgacgaccctcttcggccggtgccaggcggcggcggcggcggtggcgactccggtgatcgtcggccgacttgccggacggatggatggatggatgaatggtagaggaaatatcttgcgatgattcttgatcagaaggcgatgatgtgatatgcaggggtgagaagaagatgcattcatgggttagagtaggtccagttgcagggcagggagacaccggagtaatggctatggacgacatgcatggggctgactctttctcctgcaacacagtagtgccatgcaatcatggagcagatcagcagactgatatttttttagttggatatataaaagacaatagacatatactcctagcatatgtttggtttggggactatgtgggatgcgatgaaaccatatctgattttagggatggagtgatccaacttacttgtttgatttatagaatgagctgataccagtttttttagtagaagggatgaggatagggatgggatgaacaatgtttggagacattagcaccacgtctactcccagtgaggaaggagcggcggaaggaggagcggcacgggcgcgagcggcgaccggcagtgcggatggaaggaggagcagcgtgcgagcgagtaggcacgggcgtgagtggtgaacggcggaatgaggagcggcgtgggcgagcgagcacgtgtagggaaggaggagcttcgcaagcgggcggaggatggacgggcgtcgggggaggatggagcgacaccaggggagggagcaggtggaggaggaagaagaagtgcctgtgaagagagcggcgccaggtgagggagggaggaggaggagggacaggtgctggggcagggtgtaggtggaggaggagggacgggcgacccatggcagcgccgcggcgggagctgtatatggggtgaaaagttttggcgtgccacatcggatatacggacacacatttaaagtattaaacgtggactaataataaaataaattacatattccgcctataaattacgtgacgaatttattaagcctaattaatccgtcattagcaaatgtttactgtccactttgtcaaataatgtagcaattcggcggcttaaaagattcgtctcgtaatttacacaccacatgtgtaattagtttttttttatatattaatactccatacatgtatccaaatattcgatgtaactgcgtgaaaagtttttgcgtgggagcgctgacaaaggcacgatgttttaaagacaggacgtcaatcccgttgattctacgtacagtcacgctgcacagatgtaaattaacaaacgcaggcgctgaactgcatacatgacaaacgccgggttgacttccaccggcttaatttcctgttgcatttatgagagtcgatcgatcgatcgatcgaccgaggtgatgatcgtccatcttctccatattggattgccattactgcgttcctagtctcatatatatagaacagattcttgatgagtagctaaggtctcaattataaagcacgcacagttccaaggagagcgaggcgagacgaccggtttccaacttaatttccccattattcatgtatatatgcactagccagcaagctagcagccacgcaacagtatgcatgcaacagtacgattcctcctactcctacaacgattgtacttgtactctctgccagtcttatgtactctctctgtgtaaaataaatcaaccttatacaccgatatgatacatcatactaccgtataaatctaaatataaatttcagatttacggtattagaatataacatatcgtgtacgagattgatttacctaccacttcaatttgatccatgaacatatgatcatctcgctctcgatcgatcgatcgatcgatcaaatgctgctttacagctacacgacacacacacacaaacgcgaagagatcgatgaaaatggaagagctgaccaatgtcaataataagtcatctcacatgtggggagtcgtatagtggtggattaccctactgtgtcgagtaggggaggcgtacgcatttaagccgcacggagctttcccttttctgctcggcactgcaggctgctgcattcaagtcccctacgtatactcccagttcttcacacttcttctgcatgcactcgcgcacacgtacgcacactgctcaatcccctttccttgtctttctagtaggagtagtatactccatacatccataaaaattacgcctatttcacatttaagtttttccaaataaattatttctatttatagtttttatatatttaatacttaaatgaagagataaattaaatgttttattagaacccaaggagtcatctaaatactcattggtagcatgattgtattcactccttaatttcatattccctccgtactcgtaaaggaagtcgttttggacagcgatacggtctctaaaacacaactttgactttcttttctataaaaatatttattaaaaagtgatatatgtatactttcatgaaattatttttcaagataaatctattcatataatttttttattttcaaactgaacaacttgagagttattcatgatttatattcccaaggtttgacttaaacattgtcctaaacgacttcctttataagtatggagggagtaacatccaagatgatttaatttcttcttaatcttggtgtcaatagtaatatgtgtaacttttgtagatggagagagaatatgattacctcaagctacatgctacctctgtttttttaatatatatgacacttataatttttttataaacatttaaccatttttcttatttaactgttttgtaaatataaaaatatttaagtcatatttaacgataaatcaaatcatgataaaataaatatgtattatcaaatgtatcttaaaaaatcaacggcgtcgtatattaaaaaacggagagagtaattaattttgtcttcttggaggttcatgtatatatatgctgatctgatgacaaatgacaatgtactgatgttacatggctcaaaataaataaagggcacacagtgcaaaagcagcaagctagctctccccgcacacaagaacagcactcacagtcacaggcctaaagcatatatgcatctgcaaagaaggtgagaaagaacacagtgttttagttataactacaaccttgcatggtcatgtcattcatgagagctgctgtactgttctttttcatttcattttttttacagcttcaaggaaagaaagaaaggtgcagcaagcaggtgcaaatgcatgcctttgagcaaaataaaaaaagaagaggaaaaggtcaaagctggccagctttaaagatctactactactagtgtgggcatttaaggcttgcctgcatatttccaagggcagtagtagtgtatgacatgcatagacccccttctctcttgttcccttgctctttaatccttccctgatgagcctcagccctgggccgctgaatccatgggactgccagttcagtaccgcgctgtcgcacaccatggcatgcgcgtaggatcagcagttcagcttactacacttttgtttttcttttacaagagaaattctttttaggcttttagcactcttgtaaaactatgtactcccctcctcccggttcaaaataattgtcgttccgagtgacgatacgatctaaaaatactttggtcactattttctatcgtaatatataaatattaataaatgtatgatggaaagtacattttaatgttacctatatatatgggttccatatttttgagcaaatatttcacaagttattcatagccaaagtttatgaataattttctgcaacatgttgtacaccatgatatttgttttttttattacatgatactacttttcacaagcatcatcatttaggactcattttggaatgcaagattcagaaatcatgggaatagaaaaaacatacaagtaggttgtcatgcctcgttgaatcttccagaagttgatccatcgaattttttttcagaaaaatattgtttggtagcactataggaaaaacataggaatttttagagagaagaagagaaacacatgagatcttgcctctttctaaatttgctcaacaattcctatcaaatgacctattccacacatgattacatgaattttaaaggattttgtaatggtcattattttatttccaaattaaagtaccataaagaaatttcttccaacgaattccagtcctctaaaattcctccattttttcttttgctcctcaagtgtttagagtggcccactcgatcactccgatccgagacaatatcccatttgctaaggtggatatatatagtccggtgaaaccgacaagcgaacatgatatgtcaatttggcaattactattaaaatgtttggtagattattatagactccttgaggttccacgagaacccacaatttagcttgcacttgctacattattaaaggatgaaagtagaaaaaccactgcacgcttcatttaattccttattaaattatggcaaaaccaggctttcgagtaacagttccatacaccaaacttatcttatgacattcactgtatcaagatttaagtatacttacatcatatatatatctagtgaaatagacccactcaatgctcaatctctaaagtcaagatcctatcacattttcatcttgctatagtgtttgtgagacacagagaccgcgagtttaatttactattagaaaaagcattttcgtagacttgggtttttttttctaagcgggtatgagcctcggagccaaataaccgcatacgaaaaatataaactagaagtggatcagcgtcggctgcggctcggacgagcggtgggagcggcgtcggctgcggctcggagcggctgaggcggcggatctgacgaggtgcgggagcggcggagacgcctcccctcccctctctcccagatccgaccggaggggagagagggcggtggtgtggtgtcgatcttggacaaggggagctcctcctcccagatctggcggagggaggagctcgggcgccggcagcggcggaggtgcctcccctcccctcccctccctctctcccaaatccaaccggaggagggcggcggcgcaagtgacgctggtgtggcgtcgccatctcgatagggagagggcggcggcggtgctatgttgggcagctggcaacggcggcagcacagacggatggggatttattttatctacgacgtatattttttttaggcaggtggttctactgcctgtaaagatggatttaccgcctatgaaaatgattttcgtaggcgggcttttgcctacagtaggtccttttccccacttggaaaaactattttcggctacctagatggaaaaacgatttttctagtagtgattgctccggccgtcaaatgggcagagatgtatactatgcttgaaggtgttcggtgaattgttataccataaggccaagctttttagtcgctatctttccatttctttcatattttccggcaatatttgtcctttagttcaaaataattattaaatccacgtgaagcggcacgtggacaagtcaactcagcaaaggtcagccatgatgcaacttcccttattgctactactataccttataaatgagtaacagggcttctcaaaattaatctaatgtttaaacctcattttgtgatatctagtttaagattttatgaaatttactctctcttcaaacggaactgattaatttgagcaagcatataatccatcgtacttgatttgacttggatttatgataaaaaaagtccaactctggatgatattactatatcattgttaataagcatgccgacaaagtatgccatcactattttcttgtgcttaacaatgaatgaatggatgaatgcgcatacttctcgaactcctaagctgtatgatttatttgcagtactattttaaatttatttttaactctataatagttcattcatccatttatgtacctagtaccctcgaacaattatcacaaataattcatctatcaaccatttagcagaaaagagattataattaacatggaaacatgtcagctctaagagcaagtttaatagtatagccaactattagctccaattcatctcattcatacaatagttacatagtgcactattaatacatggtcccacctgtcacacatacactgcgtcttgaagtccgtgctacagctggctacaaatttgtagcccgctactcttctctctcctcatttatcttcttaaaatatgtttacagctggcttatagcctgttattgtatatgctctaaagaggtcaaatgtggaaaacacacacacaagaggtgcaattaattaatttattctcaattcgttttcttgactgtgatcttgtttataaccttttcgtctacaagaaagctgatgtgtgatagatagaacaaaaccaattacatgagaaaatataacaaatccaggtctcgtttgagacatgggattgtagcaagaaaacatgcatgcaaaaattatatactcgtcttttcaatttctttagttaggtaaccccaacaaaaacatttattaaattaacttgctttgaagaaaaacggaaattaaagcagcaattaactgttgagactagctatactgaaggacgacctagaaactttgggtgcacaaaaagatgtaggtaggtagcaatatacccttaggtcgatcgatatattattgtattcaagcgatatttataacagagatgtgtactcctccatcgatcaaggctgtgtttagtcctttcaaattttcaaaaattccgtcacatcaaatgtttagatacatacatagagtattaaatatggatgaaaaaacacccaattacatagtttgcatgtaaattgcgagacgaatcttttgagcctaattacgccatggtttgacaatgtggtgctgcagtaaatatttactaatgatagattaattagacttaataaattcgtctcgtagtttacatgcggaatatgtaatttgttttgttattattctacgtttaatattttaaatgtgtgtccgtaaacttaaaaatttttggctggggaactaaacacggcccaagttaacatcaaatgttaactgcagaggcaaaggtgcttaaatgcaatgtcagattctatggccgtgccctccagtggtcgccatcagcatggacaaattaggttaagtgtcctattaattagtcatagcagcgaggcaaagccagttgcaaccctgaggtttgtccaagttgagtattataggggatctgcattagctagtgagagacaagggcatgacacattgccctgcacattaattcgaatccctttctacacatatatatctatacaccatatttatatggatgcatctctatacacaaattgaatttaaatcgaggagggattagtcgcgtatttatggagaaaaaaacaaagtgtttccttcaattggagaggatgaagggtacatttctaatgctactttttgttgctaatctgaggcaacaaactaattaattgatgattactgacatttctaattttccctccataatagtgtcatgcttacaacgagattgtaattatgagattagttttctcttttcccggtttttcaggttagtttttatgtgaaaaaaaaaactgattttcttttttttttggtggggtggtggtttttatatggagaagggaggagaaggacaactcagtttttaaggtaataaaaagatactgacgagtatcaatttgctccttttgtaagttcacttattattcaacatgcaaacattaagagatggtactagcaaatttttcattgttgcaagtatataggagaatattacagtagtagtgtcatgaataaaattcagaaaattaagatacacatgggacatgcatggttagctgagatagagtatatacacatcaagtactcactactcagtacgtactagaagcaagcattagatgcatcacaataccatatgattctcatgaattagtgcgcatcaaatcaatgcgtgagaccacgctatatcaatgtgtacgactcttacatttaagactcgctattattttttgcgattttccatttaatacttgatcatctctagctatagtatcaaacgtatcatatccttgtagaaaattaactgtgaataataccgatgagtacatttcctagtacatttcactcgaagatgtatcatagcactcgtccgtgaattgcaaaaattactcgcaataacccagcttgaagtagtaccactggtaagttaaactctcttgcacctagtattaattaattaattaattacaacaaatcgaacacaaatatatatgtaccaaggatatattataacatttactggtactactgatatatatataagatttatgttattaaagaagatgtacatttctattgtttgccaacctccatttcatgactggctcatctcacaatggatccaagtcatgcatccaccatggattagtatagactactatatagaaacttacaaattaagatgatcagttccaaaccctaacaacgaattaaaactcaaaaagaagaagagagaatataactagatttaactatgctagatcaacaccagctttgtgcttttgatgatctaaatcaccaaggattgattggctttgttcttcaaggctagtcacatttattgtcaccttttttttgtcccctcatttttttttccttttttcacttgcactaaaagaactcactcgggtcccccaatggcaccaccacgtccatgagccccacctcgccgtggcccatgccgtcgtcgagcagccagctctccagcatggagaacgccggcggcggcgacgacgacggcgcgccggcggtctcctcgtccttcgtcttgctggtgaccgtcgagccgtcgggcgtcggcgccgtggcgccgccgctgtggctggcctccccgtacagcaccgacgccgccgacgacctcgacccggaggacggcgtcgtcgtcgtcttgccgccgccgccgccggggcgcatccagccctccaggagccgcgcgatgttctcggcgctggatgcgtacgacgtcgccgcctgcgacgacggcggcgccgtggcgcccgacgacgagtccagcggcttggccggcggcgaggggtccagcgagagcgcgtcgcggagcgcctggcgcgcggtgtggatgtccgtctgcaggcgccgctcccactgccccttcggcgcagccgccctggtcttcacctcgccggcgccacctccctcgccgtagtcgccgccgccgccggtggcgctcatcttcttgagcttcttcttgaggtgcgtgttccagtagttcttgatgtcgttgtccgtcctctccggcaagtaggacgcgatcgccgcccacctaaccaaaaatcaagaaccgccaaaaaaaaaaaacgcaagcgcgcactttaattagggctccaaaaaccaacccatccatcaatcactcaacctcgatcgccaagaatttcatcttccgattcacgaaacgacgtaaattaaaccaaaaaaaaaattacctgttgccgaggagggcctggaggtggacgatgagcttctcctcctggtcggtgaagttcccccgcttgatccccggccggaggtagttggtccaccggagccggcagctcttgctgcaccgcatcagccctgcacacacgcacaaccatcgccggccggtcgatcagaacaccgcccaccgccggcgacaaaaaccaaaggggatcggtggtggtggtggctcaccggtgttggtgggcacggcgcgccagttgcccgggccgtgctcctggacgtaggcgacgagcataggtcctcctccggcgtccacggccccttcttcacctccgccttcacgcagcacggcggcctccccatcaatccccaccacggcaccacctcctccaactccaacgacgatgaacaagaagaagaagaagaagaagaagaagaagaagaagaagatactctccactccactccacttcaccacctccgcctagagaccgacctagcaatcaaggggaggaggaggaaggagaaggtagggaagcaagagagagacaggagtccaaccgagacggcaatggggggggggggggggcggggtcggcggtgagtctccggcggaatatataggcggccccgcggcgtcgcacagctgggtttgggtttgacctactagccgccaaggcgagtgaggtggacgacccaacaacctgctcctgctcgatcgacgagtccacatacacggccacggccacggcgactctactgacctgtgacgtggcagtggagtttgtagtagtagtaactttttttttgtttaggagaggagtaatttatttgctagggacaaaaagaagtgagctcactgggtcattaaggagtaactgaaacgtggttgagtgggcctggtgggctttctgggccggcccgttagaccgggtgggtagaattgttctggttcgggagatatgctctttgtcgtgatttttactatcagactctcctcaaaattaaacaagggactagctacggagttgtcgacagtttttgaggtccaaaactttcaaattttttaactacagaatttatcatcaatggttataaggaaacaatccacactagtacaaaccatgaattttagtgtccaagctgattgaacaacaagaaattggcctacatgtagaatggaaaaaaaactttcaaattcaaaagtaatatgcgctcctaaaaaaattgcaaatcataattttatacaatataactaccctataactatcgtgtaactactctgtaactagtgtgtaagtactatgtaattagggtgtaagtgttatgtaactactctataattaaggtaagtgatatataactagggtgtaagtgatatataataaaaaagagttattactaataagaaggtgcatggcttagcttaacgtgtgcatcatgttcgatgactgccttgcccatgcgatcttttttattctgggtgtatatgttgcacgaatcctagagcgcatctaatggctagaaaatcaaaagttttccaaacaaaaaaactgtcaacagttttttagcaaaaccgattaaacaaaaataaatatattatatgggactatctatataactgttgacagaaaatccctccatccatcttttaaattttagaccatcggatatgctttaagccgtgttgaggcattaaccctatctttcctcctccagttcccctcccatcacacattccgccgccaccactcccatcgctcattcctccatccgatcccccgccgccactgccccaccgcgccgctacccgcctcgccagttggaatagcgtgccggcgagaacccccccccttcttcatcctcgagccgttggcggttagatgcccccgccaccaagccggcccactaccctcctctagccccgcagctccgacgctgccgctgacgcctcgccacccgttcaatccgccgcccaccgccaggctaccgcctcccccggccatccctctagagccgggaaactcctcctgtcggtgatatgggcatgggggtatcaggtttagagggaggaggctgccaccaatgccacatggccctcccccgaggggagtcaggcccgaggtggggtggcggccactccttccctaaagactagtcggaggagactgccctccgatgccacgtggccctcccccgaggggagtcaggcccgaggtaggacggcggccactcctttccagagactggatggaggacgctgccctccaatgccacgtggccctcccccgaggggggttgggcccgaggtagggcgacggccactccctggccgagactagagggagaaggccgctccaggcgccacgtcgctccctcccgaggggggatcgggcccgaggtcgggcagcggctgctccctgccatgactagggtcaggctcccctgaccccctttctaggtcaccacgtacggtgggttaggtgtctgcctccaggtgcccatctacccgcatttatggcgtcccgagcggtcgcgccacgccgcatttaatacagcgtgcagtgcactcaaccggtctgtgaccagtcgaatgaccgatgggactggctagtgagactgtgcgctgctcgtgtgtcaggcagcatgcagcctgacatgtcccatcaaatagtgatggtgagaggttctcatcctcttatcccagccggagtcggtccttccgctctggtcaaagcaaggctcccgtttcacggtgtaataggagcccagaagtcttcacccattaaatggtgattgacaggggcaccccccgtgtcaggcggcaatatttgacaggccccatcatcaagacgacgtgtgcttggctttccaagtcaagagacaagacatgcatttaatgcaaaggttataatgcatttgttggaaccttgaggtataaaaggaggtccaggcctagtgatggagggggggacttccgagcgaactggcgcttgggtctcgcaaccccaagcactggtgttctacattcaatcaatcatgcacaggagtagggtattacgcttcatagcggcccgaacctgtataaacctctttggtctgattgtcttggaggggcctaaccccctcaagaccacacagcttcgctcaccaaatcctcgaatctcacccgctgcccccggccgaactcacaaagggtggcctcacggttccctggtggaggagttcattctccgacacctccccttccccttccccctcccacccacaccccactccgggaccctaaactgtagggtcctctgtcatagtctagtgagtcgctggcaccggagaagaagatcgataggtcgccggagttggaggagaaggtctggagcatgaatctcgaagcttatctagtggctcaaaatctgcaagatttgtggatacaatttatgtctcagaaggttagcaattccgatatattatgatcgtaatgtcactatattgtatcttatatgtaaccataatacaacttgtaagtaacttttaaatatcgtatgataatacactatttccacgaagcggatgtctcatgacgaaatcctctcacatatacgcgcgctgttatttcttccttcctcgcttgcacaaatcttaaagcaaaatctaatgattcaaaaagtatgtgaaagttacgtacaagttatattatattgtaattatatgcaagttacaatgtaattatattacgattatactatatttacatccgtgattttttttaaacatttcgagacaaatatatggtaaaatcgtttttccattaattttgtgaaatttaaagcatgtgaaataaggtttttattcgtgccctgagctactaccttcgtcacaaaataatttcatatctaacatatatgattgccccaaaaggatttcactttaatattcctcttataccaatgtcaataggatagctaactattacctataaaaattaacgttatctctagccgatttaataagagcaagtttaatagtatagtccactactaactccaaatcatttatagccaatgtaatagccaattcatacaatagttgcttactatattattaatacctagtcccacttgtcatacacacattacgtcttggagtctgtgctacaggtggcaacagatctgtagcccttctctctctttttttatctctttaaaatatgtttatagctggtttataacctgctgttgtacctgctctaacccactcgtatggagtaataattaactatcgatatgcactacaacataaatatttcatccacctctttctctcataaagtatgttggagttcgtgctacagctcatcactgcttataaatttgtagtccacttcttttcgtacttatcttcttttgctcccacctcaacagaaatatgatgtgatagctgcttacatcatcggctcctacctaccctcgatccacacatcgatgagtttcgtttctccaatactcttttacttatcaacccataaatagtactcgttttattaatgagttgcaatttaatttgtttcatataccttgttttgaaccggagaccaaatataaagttgttttagacatacatccatccctagaatataaaaagttttaggattagatacaattattaagaaagtaggtaaaattaaatgaagaatgttgtgattggttgagaagttattaaatgaaaaatgttgtgattggttgagaagttaaggtaggtggaaaaattgaaatcgtgaagagttgtgattggttgagaaaaatattttattttaggataaattatgagggttagaagtcgttttattttggaacgaaggaaatatgcacgaatgtggccgaaaccatctgaccacatcgtccaaaagttccacatctacaactaaaactatgacacattttttaattttatttaaaagaaagtttcacaattaaaaaaaatcggaaaaacgacggttgcagttataggtatgactagtgccacaaacattacacacgagttcgctactacctctgtttccgttttaggttggatgactttctagcattgcccacatttatatatatgttaatgaatctagatgtataagctgaaacggaggaagaagcttttaatagaaatttaatggagctaagaatttaccaccagtatgcttagtatatgttggggttacactcgtgggtacgtacgtgtgtgaatgtggcataccgcacacgtgcgtgttgctgcccgtgcaaaaaaattaaagaaagaaagaaagaaagaaagaaagaaagaagaaaactggccgctttcgtcatggctgactcgccgctgttgatcgctctcgtcatcgtcgtcggctacaggaggagcggcgcgccgcagccgcaggaggcggctgccggccggaaaagcaaattccggcggctgcagcgcgtaattaatggccgcggttatatatattgccggttgttttgccccttctctgacgatcgagacgttttcggtcgattgtttttcccgagcccgttgaagaaaaaaaaagtgtacgcatgcatgtgcagttcatctgtgtgcgaatgtgtgatcagtgagtcagtgacatgtattgtagtagtatatacgtgacatctcttcatgtccgcgcgtgccatggtcgacacaatatagccacgtactcattccgtttctaaatatttgacagtgttgacttcttagtaaatatttgaccgtgagtcttattcaaaaacttttgttaaatatttaaaactatacgtatgcataaaagtatatttaacaatgaatcaaatgatataaaaataattaataattacttaaattttttgaataagacgaactgtcatgcatatttaaaaagtcaacgacgtcaaatatttagaaactgagggagtaacttgtaccataagccccattctttaattcgctgtgaaattcgtaccatttatcactactattataaaaattaaaaatgtttttactagtattttgatatatagtctgtatttgagtaggtttttacgttcatttgcttctggaaatatagatccgtgtttgagtcagtttttaaagttgttcgcttttgaaaatataggagtcctataaagaaatctatttaaaaaaaacttagcatggtaacttgaaattgaaacaatcgaactcttacttacagctcatgatttaataaaaaaatttcaagcaaaatctcaaagtaaacttttatcttagctaaaccgtataacaataataagattaaaaatagcttcacatgttttttctaatattagtaaaaatataacttataagttaaacttgtatatatgtacatatccttaacaactaaaaacaaataatgtaaaataaaatatggtgagaaaaaaacacaaaatcaattttaatttttagcttataagtataaatataaacgaaacaataaggctgtatatctatgttacttaaaaaagtggggtcatctttcttctcctcgctatcgtagtttctccatataaaaaccatatctatgaaaaagtactccactcaacaaccgatgtttccacataaaaatcaactcaaaaacctcgtatgaaaaaactaaactctataattttaatctccttagaacacacgaatatggaactagtatatactgaaaatttcctatcatagtccgtgccatcaaacgttattcttggaagttatacggtcctgtttgaaatgtattttttataaactattgaggtgaattgtttacttgattaacgcaaataaattatagtattgtaagaaataaactttacaactttctaggtttattaatcaatgcagcagaattttttttacttgagaaatcgtgtatttagaagcgtgaagcaaataaccattggcaaaaaaaaattaaaaaatgaaaagaactggttctatatataacggatttgctatcaaacattcgacaggaattttgagaaaaaacctatcaaatatcaggtcatcgggt

SEQ ID NO: 21424 - DNA, 1117 bp, Oryza sativa
aaccccagagtccgcacatcctcaaatacaaagcacttccctagttagatgtaggttagacttcccgttcgagaaactctacctttatacctgccctcaatttatgcacgattaatgaatgccacctgggtggaagcgagaggtggaaatggaaggtcttagttcggaggtgggatctctacctgatagttgcattgccattcatgatgatcccctggcattcgtccattcagccattcaccattcacccattcaactggaattttggttgaatgccggaattgtgtccacaaattgtggatggatagttggttggctggctggatggctggctggatggctggctggatggatggtgaatggctggcggcggttcggttgctttgaagcatttgttgctatctaaattccatttaaggtcgtaccttatcgcccagcatcatcttattctctatttgtattccctccatctttcagatacggatgtagccttggatgtgcccgtgcccaatgaagaggaagagcgcaacatgaaacgtaagtacaaaagtaccggacacccacccagatcccaatagaatccgccaaatcctgcgggaaattgtaatcccattcaccagctcctacatttaattaacaagagaactattgtatttatctaacacctggattatctccacctttcatttgatccctatttatagattacgctgcgttgctaacgggccgcacctcctatttcctcaagggtgaggaaatgaagtccatgtacaccacctacaatccgcagaatgtggtggccaccgcccgtttcctgttccacaagaagaatctatactactccttctacacctcatcgcgaatcggtcgtccgcgtgccattcaattcgttgatgatgcgggtgtaatcctggaggagcatcaactggagaccaccttggcgggcactctcagtgtctatcagaatgccacgggcaagatctgcggtgtctggcgacgagttccacgtgattacaagcgcatcctgcgcgacgatcgtctccatgttgtcctcctctggggcaacaaacagcaggccgagttggctctggccggaaaggtggccaaatacacggcc

SEQ ID NO: 21425 - DNA, 732 bp, Oryza sativa
atatgataacctacttagaaacatttttaggtgaatctgctaaggttctatgggaacaatgggttgaaaagaatcctaataattatgaagaattgaaaagagctggtagcaatccgtataatttttcaaatgttatatctaacattattatagctgaagattcggaattaggttatacaactttgcagaatgaaaggttaaaagaaatagaaaaattaacgttaacaagtttgaaaggcataaaagaattctcccaacattatttatataatgctacaactgctaaacaaggatataacaggggaatagttgaacgttatttcaataaattacctgacccactaggaagtatgatatttgaagaatataaaaaggaaactgaaggagctgaaatcaacatctcgcaagccataacttttgtgtttaagcaactaaaaaaaatatgcacgggtatccaagcccaaagatctatgaaacactctgattacaatttttgcaataaaatagttcaaatacccttgacatatggagaagacaagcctagaagtaaaaggatttataaacatcaaaatagaaacaacaataatattagaacaaagaaaaggtatttcttaagaagatcagataatagagcacccttcttacataaaagaaatgtaagaagatataatccaaagaaaacctatgacaaaacatgcagatgttttatatgcaactcgccagatcatttaa

SEQ ID NO: 21426 - DNA, 611 bp, Oryza sativa
ttggcccgagcccgaaacctgacacccgatccccctttaggggtagaagcgacgaaggtgttcgatgttccacgggttaggcagctctgtgccgtcgcccgtggccagccgaacggagcccggccgggggacgccgatcactcgatacggaccctcccacattggtgagagcttgctcaatccagcacgcgtttggacgcggcgtaggacgaggtcgtcgacgcagagtgatcgggcccggacgtggcgtgcctgtgccgtggagagggacctggcggatcgcgaggccgccgttgccatccgggaggcaacgctgactgcgcacgaggccgcctgcgccgaagaggagtccgcgctccgcctccgcgaggacgcgctcaccgagcgggagcgagctctcgaggaggccgaggccgcggcgcaacggctggcggacagcctgtccctccgcgaggcagtgcgggaggagcaggcgcgccgtaatctagaaggtgcccgcgccgagagggccgtgctgaatcagcgggccgctgagctcgaggcgcgggagagggagctggacgcgagggcgcacagcggcgaggcggccgcgggcgaaagcgacttaaccg

SEQ ID NO: 21427 - DNA, 611 bp, Oryza sativa
agcacggagccgtcggggaggacgagcttcttgagcagctcgaagttgtggttacccggcttgtcactgaaatttcagcgagacgaacagatcagatgagatcggcgtcaaaattcagaagtcacacgacgcaattctggctcaagattgcctctgcttcaggcaagccggcgtatgcgcgtgtgccgatggtgatgaccagtcaggatggcggcgatgagccaatgtttgtcacatcggtgacagactgcgcgctggttggcatgccatgaagcaccggcaatcattccagatttccgtccatggagggatcatccaccggcgaccccggcgccgcgtcgtggacgcgcgtcttcttggtgatccggcaccagccggcgccctggcagttgaacacgcccaccacgccggtgcacttgttcacgttccatatcttgagcaagctgcaccaaattccccgctggccacatcacatcaaatcctcacctcacccggcttgaatgctcgatcgccatggcagaacggatgctgctcgcgagcttaccttgcgccgtcgcgggccgggtcgacaaagaggcagtcgcgggtggggcggccggggagccgtgccc

SEQ ID NO: 21428 - DNA, 1377 bp, Oryza sativa
gcccgaagacagcggatagtcacatgcgacgaggtcccggtcaaggaggttgccctgggcgacggcccgtccaagaccacacggatcggtggtcttctggacggcaaataggaagacgcgctcgtctctttcctgcgggcaaacgctgacgtcttcgcatggagaccggcggatatgcccggggtccccagggaggtgattgagcaccgtctcgccgtgcggtcgggcgcaaggccggtccggcagaaagtacggcggcaggccccggaacgtcaagccttcatccgcgaggaggtggcgcgacttctggaggccggattcatccgcgaggtcatccatccggagtggctggcgaacccggtggtcgttcccaaggcgaacggcaagcttcggatgtgcatcgactacaccgaccttaacaaggcatgtcctaaggacccttaccccctgcctcgcatagatcagattgtcgactccacagcggggtgcgaccttttgtgttttctagatgcatactctggttaccatcagattcgcatggctagggaggatgaggaaaaaactgcattcattacccccataggaacttattgttatacgacaatgcccttcgggttaaagaatgcaggtcctacttttcaacgtactactcgaatttctttgggtagccaaataggacgtaatgttgaggcttatgtcgatgacttggttgtaaagacgcgcaaccaagagaccttactctcggatcaagcggaaacttttgagagtctccgctccgcccgcataaaactgaaccccgataagtgcgtgttcggtgtacctgcgggcaagcttctcgggtttttggtctctgcccgaggcatcgaggccaaccccgagaagatacgagctatagagcggatgcgccccccagcaagcttagggatgtgcaatgcgtcaccagttgcatggccgccctaagtcggttcatatcgaggctgggagagaaggcgctacccttatttaagctcctcaaacgctccgggccgtttacttggacggaggaagctgaacgtgccctcactcagttgaaggcgtatctcagctctcccccagttctggtcgccccggagccaaatgaacccttgctactctacttagcggcgaccccgcaagtggttagtgcggcgttggttgtggagcgcgatgaggacaatcctcattccgcgcacccccaccctatgctggcttggcccgggagagagcagggaggagaggcccccgagccgaacggtggcccaaggcccccgacgaccggagttggccctttgcccgcttgtcagacgacgccaggagcccccgacccccaggacggccccgaggccactgtgggaaggc

SEQ ID NO: 21429 - DNA, 1168 bp, Oryza sativa
tcgccagcgctctcggagatagccgggacttcaacggcttcccgaggagctcgagaggacgattaagtcatcctcgagggacctcgcccgaggagcggtggagctcgtactggcaagttaccaagccagggatcccgacttctccccatggacggcgctggacgagttccctcccgggaccgaggacggcgcgcgcgcgcaggtccgggacgccgccgaccatatcgtccacagcttcgagggttcggccccttggctcgcgttcgccctcaattccgacgaggaggacgatgacggcggagtgggcgacaatggcgacgaggctggcgacccgggtgcatcggagtgagcccctaggcccccgccaatctttaaatagtttcttcttttcttcttccgaggccttcgggcccccttcttgtatagactaatttaatctgcaatcaaataaagaggaaaattttttgtgtcaattctatttgttgtgtgtatgagacgaggatggtctgtgccgcggtccttttgtgtcttggcttgaacaagggctcgtgcccaggtcctagtcctcaaatggctcgggtcggggctagtgcctggggagatccacatgtcgagactggccaggccgggagcgtgatgaccgagggttatgggtgacccgattgtgggtttttgccgattcccccccggagttcaccacgccccggggcacggctcggttctgggccccgtttggcgattttagccgacccgagcccccgaggcaggattgaacacgagtgacctatttcaagtcaagatccttcaaaaggaaacaacagcacagatacagcctttaggaaatcgaaaatgcttttattgaaatacagatataagagaaataagaatatgcatatgtggtagtccccggccaaccctgcacgcccgaggggggtgcggggttggcccgagcccgaaacctgacacccgatccccctttaggggtagaagcgacgaaggtgttcgatgttccacgggttaggcagctctgtgccgtcgcccgtggccagccgaacggagcccggccgggggacgccgatcactcgatacggaccctcccacattggtgagagcttgctcaatccagcacgcgtttggacgcggcgtaggacgaggtcgtcgacgcaga

SEQ ID NO: 21430 - DNA, 536 bp, Oryza sativa
ttccttgtccgctcagccaaacttttgaccgcgcggcagtccgcgaggtcgtggagggaggtgttgtgcacggcgcaccacttgccggtcgggcgccccctgctgggagcgccggcctccttctttttgtcgctcgcaggcctcccctttcgggtggcccgcgaagcgccctcgacggcgaggacgtgaccctcgtcgtcggaatgggccgacctctttttcctcctcctatcccgccgccctgaccgagcggcggatccgggggcggccgaagctgccacaccagaaccggtggagttccaggtccaggcctcctccttgcgagccacacggtccgcgagctgaaaaagctctgcggtggtctggggctccttggaggcgatctttttgagcatgcggttgtgccgcacgccccccctgaacgcgtagattaccgcgtgtgcggggatgcatggtatggtgttgcggacttgacaaaaccgctgaatgtacgagcgaagagactcatcgtcccttcgctgtaccgcatgcaagtc

SEQ ID NO: 21431 - DNA, 719 bp, Oryza sativa
ttcgccgcttgcgccctaactccttgtttcctgtgccctaccttcgccacacgcgctcgctcttaaacatctcttcctccggcgtcatggcacggggctccgctttgcttgatggtagcgtgctgccgccttcccgcatcgtgagcgagaggcaggccgggctgccgcgccgcttcatgccggaatctgccaccggccgggagatagttacgctgggcgagggacgcccggcgccatgctacccggggcggtccgtcttcttcctcccttttgcaatggcagggctggttccgccattttcttctttcttcatggatgttctggagttttacgatctccagatggcgcacctcacccccaacgcggtaatgacattggccatcttcgcgcacctgtgcgagatgttcatcggggtgcgcccatcccttcggctgttccggtggttcttcaccgtacagtcggtgtcgccgccgtcggtggttggtggctgctacttccagccgcgggggctggtgttgaaccgctacattccctgcgtcctccgcaagaagtgggatgactggaagagcgactggttctacacccccctcgccgacgaagcgcgcctccgacttccgagccagcccccggcgcaggcctccagctggcgggcgccggtagatctgggagatggctatgacgccgtcctcgaccgcctggcgggcctgcgatccctgggg

SEQ ID NO: 21432 - DNA, 592 bp, Oryza sativa
cattaactatgcagtacttttgcaaaaccctgctatataacttaagatccatgctaaggagtgaaaattagctgaataggattgaaccaaaactatctctctgtttgaaaaatatccccaggattacatgaaattcatcaataaattatccttggtttgttttttgtaaccattctctaacatatgttcttctttcagggcaaagaagatgttttttggtttttccgtttctcttatcctcatcaacctagcttccataatggagcgggctgatgagaatctccttccggcagtttacaaggaagtcagtgctgctttcaacgctggtcctactgatctggggtatcttacgtttctaatgaactttctcaagtcaatagcatctcccttggcaggtgtccttgcacttcaatatgatcgccctgcagttcttgctatagggacagtcttctgggctgtatcaacaggggctgttggtgtcagccagtattttcagcaggttgcattctggagagctgtgaatggtcttggactagccattgtaataccggcacttcaatccttcattgctgatagctacaaagatggtaca

SEQ ID NO: 21433 - DNA, 978 bp, Oryza sativa
ttgaaatcctcaaaggtcagctggccattcttgctcacatccattttatcaaacatgtcctttatgtcagctgcttcctctgcagacaaatgctcagcaatgacctgcaattaagcacaaataagctaactacaagaaaaggagaaaaatccttatgcacatctcgtgtttagaatttaggaagcaaattatatgtgatctctatgtagaagtttttattcaataagaataataatctattttggtgctaacatattataaatgctaccttaagggctttcttctttaacttgttcatcgcagcaaattgctgcagtctagctcggacagcatcaccaagaggaatgtcaggcatctttttagaatcatgtaaccatggatgttctgtacatgcaacgaaaatcagagaaaaacaatgagaaaaaaatgtctgagccatgaaaaatgttaatcatggtgccattaaaaaacattctggataaaaacacagtaaaaaaaagggtacagctagccatttttcggagaacttttctgagattagccctgcatgatggtccctgaataataaatagccctgggctaattttatatcttcttataataatgtgagttcattactcatcaatcacatcatagataatatatagtacagacatatccttcatatattccactaaagtaggagtgagatagcattatgtatgctgctacgcgttaggacaggtgattggcgatgcttaccaagtacttgttctgcagtaagccttgtcatgggatttgggtccaacatccgataaacaagatctttagctggctcagataccctgggccatggttctcttttgaaatctaccacagagcgtataattgcctgcgctactccctgctcggtttctgcatggcaccacaataatatgataagaatggtgttctataacttccccgcaacacatgcagtctagtcaagagaaagaacac

SEQ ID NO: 21434 - DNA, 607 bp, Oryza sativa
ataagagtgaatccttgggtacattactgacctgactttattattccagaaatcatcccaaaacagacaagtctttccatccccaaccttacaggtggacaatcccctgaaaatgtctgcaaattgtagaacatctttccaccaaaaagaccctctagggcgatcagcatgaggaactttgttaatataataagtggaccagatcaagctaacccaaggtattgagagcctattataaaatttgtgcagatttttcattaaaagagcattattatgcagcctcaggttaatgactcctagacctcctctacttttaggttgacaaaccctttcccaaagaaccaaagatttcctgctagaattaatatcagttcctctccataaacaatttcttctagctctatcaatgttttcaattattgactttggaagggaaagagagtacatatagtaagttgggagggaagataaaactgaattgaccatagttaatctatctccataagacagaagagcagaagtagcagacaatcttctctcaaccctatcaactaagggggcaaaatcaattatctttggcctagttgttcccaaaggcagacctaaa

SEQ ID NO: 21435 - DNA, 657 bp, Oryza sativa
acgccgctgtattatggtacgtacaaaactacaaacaattgtaccaataattctggtctagtaaactgtaagcacaccatctgcttccccatcccgccctcttttgggtacatacatatctgccgcctgactgacaaatataatcgctgctggtaagcacaaaaccacaaatgctatctatacaaagccactaagttactgtgtgaaaaaataatgtaacagccagcacacagcaaagaaaaaacgtaagcgtagtttttttctctgtccagtctattgcgtgtcgtcactgatggatccgtccttttgaagcttcagactgaggttactgaacctttgtcttgagtactgcctagatgccttcctccagtcagtgccggccttcatcatgacggcaaactcgtcgtagcttattttcccatcctgagaaaagaataaatgaaaagaaaacattgcattgttgttaggatgaccatatcgacaagttcaatcacacggaatttgaacaggtcatactttgctaatgttactttcaactaacaattgcactagaatcatctccagtaagcctaccccagttgtttgtttgttatgtcatttgttttatgtcgtctaattagactatccttgtccatccggttacaacttattatatga

SEQ ID NO: 21436 - DNA, 1710 bp, Oryza sativa
ggggacagccgcggcggtggcgggggacagcgacggtagcggtgggggatgggcgcggcggcggcgattgaggcgacagggggacgggtgcggcgacggcagcggtagcgggggatagacgcggcggcggcggcagcggcgtcgacgggggacgggcacacggcggcggtggaggcgacgagggacggacgcggcagcaacgggggacgcgaatcgcgtttatgaagaggagctatcccgttgggggacggtatcccgtccctagcattcccgtataattaattcagtattaatttataaaattttgatgaataaatttgttggatttttttaagcaatttaattttcacacgaaacaccgtttagcagtttaaaaaatgtgttaatgaaaaatgatgaatagctaatccaaactactccttccgtttcacaatgtaagactttctagcattgctcacatttatatagatgctaacgaatttagacattattatatatatataaattcattagcatctatataagataatgctataaagtttccattgcgaaatggatgaagtaggtacgaagaacgcagccttcggcccgcatcaccgcggtgaaggcgaagcatgggcttttatcggcctttccaaccgtttcgtcttggaccgtcgtctgcaagccgcgagaccggcccggaaaggtggagggggccacgcacgcgccacgcgcggttcacttcacagttcacacgtcgctcgcgccgtctcagcgtggcagtttcggcgcggcgcggcgcagcgcagcgcggggagagcagcgagcacgggaaaaaaaatggtgggaaaagcagtacagtacagtaggagcgcgaaaccgaggggaaaactcgaaacgtctcccgcgctgctgctcttggatttcatcctcatcttcttcatctccttccttcctcttcccccatcgcgcgctctcgaatccggtgttccgctctccgctcctcggctcgcggcgtctcgattcggagtttggtggaagggggagagagagagagagagagagagaaccctaggcggcggcggcggcggcggcggcgacgacgtcatggagacggagcccttcgatgaggcggagctcctcgcgctcccggcttcccccgtcgcatcgcctccccgccggctcaagcggctgaagaagtcgtcccagatcgccaccgccgcccaccccgtcgtcggatccccacctccaccatctccgccgccgccgccgccgttggacgaggaaaccctagctcagttcccttccccgcccactaacccctccccacctccgccgccgccgctggatgcggatgcggctgcggaagctgctccctcccctgcactgacctctcctcctcccaacccgagctcctcgccgctgccaccgacagataccaccgaggaggaggaggaggaggaggaggatgacgggctggacccgctgttctcggagaccttcggcgccgcggggtgggacccgctggggatgccgaggatggaaggggagggcgacgaggaggagatgctgggtggagggctcatcgaggagctgcgcagggagaagtcggcgaagaagcggctcgacatggacgagggcgaagaaggcggcggcgaaatcgccatggatgccgaggtcaaggggaagcggagcaagaggaggaagaaggatgaggcgcccaaggac

SEQ ID NO: 21437 - DNA, 534 bp, Oryza sativa
cccgggcatgtccgccggtctccaggcgaagacatcggcgtttgcccgcaggaaggagacaagcgcgtcttcctatttgccgtccagaagaccaccgattcgtgtagtcttggacgggccgtcgcccagggcaacctccttgaccgggacctcgtcgcacgtgatcatccgctgcctcggggcggctgggacggaggtgctgagcctctcgttgccaccctcgggcttggacgcggcggcgaggtggttcgcgcactgctccatacatgcaagcgcgactttgaggttgccatggacagagatggggccaccggggcccggcatcttcatctggaggtaggcgtagtggaccgccgccatgaacttcaccaacgcgggcctccccaggaccgcgttgtagggcagactgaggtccgccacatcgaagttcacccgctccgtgcggaagttggcggatccaccgaaggtgaccgggaggtcgatatgacctagcggccaagtgtgccccggcgtcacaccgataatcagctggga

SEQ ID NO: 21438 - DNA, 2292 bp, Oryza sativa
ccacacgtacacgtacttcaccccgtgctccttcttcgcctcctccaccaacgccttcagccccgccgccgacgccgccgtctcgccgccatccgccattgccgtcgtcgtcgtcttctggaacttggtgttctccttgatcccgatcaacctgctcgcgaacctgcaacccatcgatccacacttgttactgcacattgcaaacaggaaacagcatttgctgccaaaatcacgtactgggcgccttcttggacgacggcattgccggcatcctccttgttctcgctgccgatctgctgccacccgtcgtcgatgatcaagaaccgcggcggcgtgccgccttccgccagctgcacaccaaacacatcccaaattcagaccaaaaccaattcaaatttcatcaaatgaaccgaagcgaacctttggaggccttgcttgacgccatcggcggtgacgtcggtgtagaaggcgtcccatgtgcaccacccgaaccagtccaagaacgacggcaactgcatgcgtagcgcacacaccaatcaatcaatcaatcaatcaatcaatcaaattcattcacatcccgccgcgcgacgcaaccgcaacgcaacggaaagcgaaagacagcgccggcgccggcgccggcgcgccgccgcaatggtgtcgctgtcgcgtcaatcaacaccggaagaattagaaaaatatctcacctttttcttctcccggtggtggaacgtctgcagatgcctctccaccaccctgcaatttctcaccgtcgtcgtcagagaaacaatcaaatttcacctggatctcaaccaaattttactactccctccatttcaaattataatttgtttaaacttttttctaagtcaaacttttataaatatgtccgagtctacagaaagatttaccagcacttacaataccaaattaatttcattaaatctaacatcgaataaaattttgattatatgcttgttttgagtttaaaatgctaagatatttttctctaaactttatcaaagcttaatactccctccatttcatgttataagacgttttgattttggttaaagtcaaacgatttcaggtttgactaagtttatagacaaatataataatatttataatgctaaataagtttcattaaatcaataattgaatatattttcataataaatttatcttggattgaaaatgttactactttcttctacaaatttaatcaaatttaaagcagtttgactttgaccaaagtcaaaacgtatttgttctaaacaaagggagtagtatatttgattagaaaaagaattcagtgaaggtgagacacgcacttgacggcttgggtgatggtgtcgaagggattggccccggcgtgcacgtacaccatgtacgtcccctgcgccgtctgcaccgccttgtcacctgctcgccgcggcgtcgcgtcgcagccacacgcatcacatcagaacggagacggagacgacgagaccgtctcgtgcgcaagcaaaagcagcacaggatttgggcagtatggcttaccgctctcgatgcagatctcgagctcgtcgcggtcgttgccctgcagcgccgcccggaactgcccctccagcagcggcagcatcacgacgtacaccgcctcgccgccgccgccgccgtcgcggctctcgaggagcatgaactgtgtctccagcgggacgtcgcggccggacgtgcccatccgctgggtcatccaccatagcttgaaccggaagcagcacatgaacctcaaatccctggtaaaaaaaaattcagccaattcaatcaattttttcttgaaaattttgttaaccccaacagtaaaaaaagagagaagagagcagcataacacaaaacactttgttattaatgaacaaataaaacagtaaacaaatgtctaatcaattttacgaaattgatattcaaattattcttttacgaaatagaaattcgaaatggagcttgaagacgcaattctggctcaagattgcctctgcttcaggcaagccggcgtatgcgcgtgtgccgatggtgatgaccagtcaggatggcggcgatgagccaatgtttgtcacatcggtgacagactgcgcgctggttggcatgccatgaagcaccggcaatcattccagatttccgtccatggagggatcatccaccggcgacggcgaatgaatgcgagttttgagcctcacctgacgtagatcgggcagccgccgatcgcccgcgccgcgccgtggtactccgccgccgggtgcaagctctgcaagttcatga

SEQ ID NO: 21439 - DNA, 1156 bp, Oryza sativa
gattcagcggtgtaaagttttagcatgtcacatcggatattatatagggaatcacatatggtgttcgggtactaataaaaaaataattacagaatacgtcggtaaaccgcgagacgaatatattaagtctaattaatccgtcattagcacatgtttactgtagcactacattgtcacttatagattcgtctcgcaaattagttgtgacggagcgtggggctcctcaccgggagaccgcgcaggcccccctttgccggttcggccgggggccctgggtgagattctaagctcctagtctgtgtgtggaaggttcgcgagaatggaaacacacaagacacgggcgatgtatacaggttcgggccgctgagaagcgtaataccctactcctgtgtttttgtggatctatgtatgaagaagctacaaaatagctggagaaccagagagctcttactctctccctctctgatcgttctggatccgaaaatcaatcctcccccttctaagtgggcaaggtcctccttttatacctcaaggggataccacatgcaccatctctctcttttttgtggggacttatcctctcttttcataaacagacggagacttgtatggttgtcgtccgaatgaccttctgatgggacagcccatacctacctccacttccgccggaagcaggcgcgacgtgggaacatggctgtctgctgacgacatgatcagtgtcagaccggtcacaaatcggtcattcttgtccaccacgcgtcagtttatcaatctgcatgttcgcccctcttcatacaatgtcttgcttgtaatggttaggatgaagcctggtatatatctgaccgggaccaacgtgccatctccaggagctaacacgccggctccggctagggacgagtgcttggaggctctcatcctgacgggatggggcgaggcgtgcgtcagaccgcctgtcgccacctaacccacgatctgatcggtctgtgactggtcacagaccggataaacgagcgcgctgcactgcgttacatgcggcgtgacgcgctcgtccaaaccgcaataaatgtggttaggtgagccccgctatgctcacctaccccatatacgcggcgcaaaacccacaaggggtcggggcgcctcggccctcggggccgag

SEQ ID NO: 21440 - DNA, 541 bp, Oryza sativa
tgtttgctcctttgcagcgacgggctatgggatgttattagcgctaacagggcagcgcagcttgtccttgaggtaactcatcgatcggcttcaacctcatggttattaagtcgtggtgtgctgatcttttatctcatttttcagggtaagcagaagtacagcgagcagaaaacttcagcagataaagtagcacatcatgtgttaagtgaagctaggaaattgcgaaccaaggacaacacatcagtaatatttgtagacctggacactctgagaagtgatccctgatcctgaatccccaattgcttttgtcaggtccggagatcgtcctacctgctgctcgaacagttgaacaacactatttcttttgtttcactggtagttaatatcctttgtcaaagttgagccaggtgctccggtgttgcagaggatgaatgctacagttctccttgtatgcaaatacccagggagccccttgtgcggttatgcctgtaaattgtgagtgaattggttaaaagaaatgtttatgaactttaaattctgg

SEQ ID NO: 21441 - DNA, 506 bp, Oryza sativa
atcccggtcgtgtagacctggagaaactcggcggggttgacgctcccgtcatatttttcggcgatggtgggccggaaccttggggaccaacggacgttccgaaggctcgccacaaaggctctacagccgacaccaccaaccgggggcacggagggctgatccccgcgtccgtgttgatgtgacactccggacgaggaggcgccctccgttgcgtgggcagcacgtcggccattacgccggcgctcgatactgatgcgggcatccggccccccacgcagatcttcctgggtcggaggcgctgacgaaggagtagcggccgaatggcgagcaacagccgccgctcgccgcgccctccgccttgacgacacggagccggtggtagcagcgccagaggtcttggtggcggaggaccacccaccagcacctaggcgctgccgtgccgtcatgaccaagttggccacgtcgtccagccaacgttgggctggagactccgggtcagggacaat

SEQ ID NO: 21442 - DNA, 799 bp, Oryza sativa
tttgctgggcaagggcagcgattttctttgctgtggcttcaggttctagcccagtcctgagagcctcaacaactatagcactgatctcattgctgtacaaattgtcgaaaagcccatctgtgccagcaataataacgtcgccaggagcaactggaaagtggaatgtctacataaccaaatatgagacatcaataatattattgatgataaagaacgtaggagtcattcaacgaagattcaaagatgtttgctcaaaccagacagttcaaaatttcaagaagggtgattactcacctgagcagaactaggaagatcactgccacccccactctctagctgataagtgaaattaaaatcatgctgttgtacaggtgatctgagaacagttcgaccatctctgactatgatgaagccactatctccaaggtttacagcatggataccctgcatgtttaaatacatctgcttcgttattttccagaaatcagaactgtgaacttctagttctgttgaaacattgtgctacactagacagaaagatacatgaaagaattatccagttattgtggtttccgtggatgagatgttctctagaatcatattcatagaatcatagactcaagatgtacattcaagaataacttcaacgtgattttagtgaagaactcagttgcaattttgtgtgcactactgttcaccagtcataaaaatggcaatggaaggggactacactaagcatcagacaaaggaaagctggttaacctgctctttaagagggacgatgcaacagggctgcagg

SEQ ID NO: 21443 - DNA, 622 bp, Oryza sativa
ggatcccctttttgggttgaaaccacatacctcttgtcactgcactatcaaatgcatatcagagcactgcagcatgatcactaaactccctctccccctaacgactgcaaggcgccgcgtcctccaacccacagtgtgggtgatcgcccttcacattccagagcgccctctccccccctataaataccccactgccagcctcatcttcctccacagcatccatcgcaaaatccacctcagctagctacccaagcgcacgcgccaccgcccgcgcgcgagctgagctagcgatcaacaccggtcgaacacctagcgagcatcaccaccatcatcaccatgcaggcgtacatggcggtcgccgccgctccggcgccaccggcctcgctgacgctgctgccgcgcaccaccaccgtcatcagggacagggagcgcttcgacgcggccgtcccggtggcgccgctcgtgctgaggcatggcgccggcgtcaagcacaaggccgtcgtggtgatgggcgccacgggcaccgggaagtcacgcctcgccgtcgacctcgccctgcggttcggcggcgaggtcatcaactccgataagatgcagatacattccgggttggatgtggtga

SEQ ID NO: 21444 - DNA, 694 bp, Oryza sativa
acgtgctgcccacgcaacggagggcgcctcctcgtccggagtgtcacatcaacacggacgcggggatcagccctccgtgcccccggttggtggtgtcggctgtagagcctttgtggcgagccttcggaacgtccgttggtccccaaggttccggcccaccatcgccgaaaaatatgacgggagcgtcaaccccgccgagtttctccaggtctacacgaccgggatcgaggccgccgggggtgacgacagggtcatggcgaatttctttcccatggccctgaagggacaggcacggggttggctaatgaacttgccacccgcgtccatccactcttgggaggatttgtgccaacagttcaccatgaactttcaaggcacatatccgcgcccaggtgaagaagcagacttacatgcagtccagcgaagggatgatgagtcacttcgctcatacattcagcggttctgtcaagtccgcaacaccataccatgcatccctgcacacgcggtgatctacgcgttcagggggggagtgcggcacaaccgcatgctcgaaaaaatcgcctccaaagagccccagactaccgcggagctttttcagctcgcggaccgagtggctcgaaaggaagaggcatggacctggaacccctccggttccggtgtggcagcttcggccgcccccggatccgctgctcgg

SEQ ID NO: 21445 - DNA, 680 bp, Oryza sativa
atcatctccattacttgtaagccgaacaataaagcattgtattcggcttgattatttgtgcaataatattccaaacgaaccgatgcctcataacacatgccattaggtgaaatcaaaactacccctatgccttgaccttctttgcaagaagaaccatcaaaataaatcttccaaggtataacttcaactaagcaaacctctccctcataagcaacatctatatgatggtccactataaaatcacatacaatttggccttttatagttttcaatggttcataagccaaatcatattctatcaaagcatatgcccacttgccaattctcccacttagaattggcctttgcaacatgtgtttaataacatcggcttgacaagtaactatgtatgtactacataacaaataatacatcaatttggtacaagcatagtataagcatagacaaagtctctctataaaaacatacctcgtttcggcatccaaaagacggcggctcaaatatgtaatgatatattccttgccatcttcctcttgcgtcaaaacggcaccaatgactttgtcttcggaggcaatatataaccgaaaaggctttccggctttaggcgctcacacaacgggtggagtagacaagtatcttttcaactcttcaaacgcctcttgattgttttgccccccaag

SEQ ID NO: 21446 - DNA, 628 bp, Oryza sativa
cacggctccccggccgccccacccgcgactgcctctttgtcgacccggcccgcgacggcgcaaggtaagctcgcgagcagcatccgttctgccatggcgatcgagcattcaagccgggtgaggtgaggatttgatgtgatgtggccattggggaatttggtgcagcttgctcaagatatggaacgtgaacaagtgcaccggcgtggtgggcgtgttcaactgccagggcgccggctggtgccggatcaccaagaagacgcgcgtccacgacgcggcgccggggacgctcaccgggtcagtccgcgccgacgacgtcgacgccatcgccgacgtcgccggcacgggctggaccggcgacgccgtcgtgtacgcccacagatcaggtcagtgccctctgccagccacagaacatgtcctcgccgccatcgtcgagctctgacgacgtgccatactgccatgatttttgcttcaggtgagctgatcaggttgcccaagggagcgacgctgccggtgacgctcaaggtgctggagttcgagctgttccatgtctgccccgtcatgacggtggcgccgggcggcggcggcggcggcgttacgttcgcgccgatcggcctctcgacatgttcaa

SEQ ID NO: 21447 - DNA, 774 bp, Oryza sativa
gttgttgggcgcctacgtcttcaccgaccggcttgccttcgtccccgccgatcgatgtcctcgcctgcacggctggcctttatcccgccgttgttgggcgtctacgtcttcaccgaccggcttgccttcgccgccgccgactggtgtttccgcctgcacggctggcctattatgccgccgttgttgggcgtctacgtcttcaccgaccggcttgccttcgtcgccgccgactggtgtccccgcctgcacggctggcctttatgccgccgttgttgggcgtctacgtcttcaccgaccggcttgccttcgccgccgccgactggtgtttccgcttgcacggctggcctttatgccgccgtagttgggcgtctacgtcttcaccgaccggcttgccttcgtcgccgccgactggtgtcctcgcctgcatggctggcctattatgccgccgttgttgggcgcctacgtcttcaccgaccggcttgccttcgccgccgccgactggtgtttccgcctgcacggctggcctttatgccgccgttgttgggcgtctacgtcttcaccgaccggcttgccttcgccgccgccgactggtgtttccgcctgcacggctggcctttatgccgccgttgttgggcgtctacgtcttcaccgaccggcttgccttcgccgccgcctactggtgtttccgcctgcacggctggcctttatgccgccgttgttgggcgtctacgtcttcaccgaccggccgcctcgaccggggatcctctagagtcg

SEQ ID NO: 21448 - DNA, 719 bp, Oryza sativa
caaaaggagagggattagagagagaggaaagagcgtgggagggcgagagcgccggccgaaggcggcggccatggtgccacttgccggcacacgacggggatgggtctccggcggcgaacctcgacggggaaggggcggccgaggtagatctcgaccccgcgaagctaacggcggcgacggcgcgagacggcgacgagcctagcggcggctagcggcggccggagtagcaaaagcggcggcggcgggtggttgcacggcgtggaggcgatggggagctcgggagagatcggcgaaatggggaaaaagcgagagagggggacggcgatgcttaaaaagggggagagggagccggacgtggccgggagcggcgggattcgacggccgacgtgggggagtggggaggagagagaggcgggattcggttttcgaatcccggccatctcgggcgcgggcgcgaacgggagggagaggggaaagggcgcgggagacgcggcgcacgcgcgggcgtggccgacgtggcccgggagagacggaggcgtgggcgcggcggcggtttcggcgcggcggcgcgccgggatcggcgggaggtgggggaaggacccgacaggtgggccccacctgtcggcgaccccgagagaggaggcgggcggcggctgccaggctgggccctcggcctgcggccggcccagcaaggaggagggggaggaaggaggggaatg

SEQ ID NO: 21449 - DNA, 1007 bp, Oryza sativa
tactaagtgcaggccaatcattaatggtaataaatagcaacgctcgtaggttaaattgctcctatttgtccttatcccacacgaggacgccctctttcctgcacaacactttcagatcttcaaccaatggtctaaggtacacatcaatgtcgttaccaggttgtttcaggccttgaataataatcgacattatgatgtactttcgcttcatgcatagccaaagtgggagatagtagatgcacacagtgaccggccaagggctatggccgctgctcatctctccaaacggattcattccttccgtacttaaaccgaacctcacgtttcatgcattctctccgaagtcgttaaatgttctgtcgatatttagccactgcgacccgtcgacggggtgtctcagcatcccgtcttgtttacattcttctacgtgccaccgcatcattctagcatgtgatttatacccaaaaaaccgcttcagccatggtattatagggaaataccacatcaccttagcagaaactctcttcttcaaaggctgtccttcaacatcgcctcgatcatctcgtctaatcttgtatcgtagtgctttgcaaacagggcatgctttcaggttttcgtgcacctcaccgcgatagaggatacaatcgttcggacatgtgtatcttctgaacttccagtcctagagggcagatggccttcatagcttcgtacgttgtttcgggcaattcgttcccctccggaagaatgttctttacgagctccaataactcagaaaatgccttgtcactcataccatttttagccttccattgcaagaattacagcgtggtacccaaatttttgtggccctgctcacaacctgggtacaacgacgttctgtggtccgctaacatgagctctagttattgcacctccttttcactttcgcagtcctcaggtatgtcccgcaacatttgaccaagatcatctgcaccgtcattatcttcaacatctacgtctgcctcgcc

SEQ ID NO: 21450 - DNA, 4305 bp, Oryza sativa
ctttacgagctccaataactcagaaaatgccttgtcactcataccatttttagccttccattgcaagaattacagcgtggtacccaaatttttgtggccctgctcacaacctgggtacaacgacgttctgtggtccgctaacatgagctctagttattgcacctccttttcactttcgcagtcctcaggtatgtcccgcaacatttgaccaagatcatctgcaccgtcattatcttcaacatctacgtctgcctcgcccattgtgttttcttcaaatccctagtacaaagccccgtccggaatgttctcgtcttctacttcatcttcttccattgcaacccctagctctccgtgcaaggttcaacaattgtagctacgcatgaacccccactgaaacaggtgggaatgaatagttcgtgcagtggaatactccttctggttttttcacttatcgcatggacaacatataaaaccgttacgcttgttatcattggccacactcaaaaagtaatgcacgtcgttaataaactctttcgactgccagtccgcgtacatccattgccgatccatctacctgaaatcttaaaaaaaaatccacgaaagacaaactcattaaataatcatacaataatttaaaacatcatccttaaaatcattaaataatcatacaataatttaaactattttccaattaacttagttttcaattattttgtacaaataatcatataataattatacaataattccacaaagtatccattttttcattatttttaaatttccaaacataccttcattgtttttcaatagttgtttatattttttcctttgtcaatgttggcgatatggcatgagacccttcgaccaaacctgccgaaaacatgcgaccgatgaggattcaagcccgagacgtcagggttagtcgaggcgaaccctccccatgtcaaaaactatggagcaaagagcagccaagctagaggcctcctgggcgaattgcgcaaggcgaagagcatatgccgaagggggacgacttcgccgtagcaggttcggccccgggagggccgaagaatctgtcctggcccatcaagcccaagggttaattgggtcgacaataacctgtcggctcgctaagggcccatggaccgcaattacgctatgtacccatgtaaatgtccctttcataagggcaaccatgtaaattcccctgtataactaaagccctagtagtaagacctgtaatgggggctataaatagcccccgtagggccatgtaatagggggatctcaagtaaaaattctcaaattaatacactttacttcttttccatccactgtttagtaaccacgtctttcaacgtatgcggttgtcgtttcgataacagtcaacttttctataacatatttatccaaattattttaacctaattttccctcaacaagttttctctctcatcatttcccacccatataccttgttggagaaaatattgaatacaaacaaagccataaatgtaacatgctaaacacacatcattagataatgaagttgctaaccttctcgattcctccgatttgtatattatcaacaaaaaaatttattaaaaattttggcagcacctccctccctcaaagctccattttgcagcaatgacttgggctggaggaggaagaaaggatatatatagttgggtcaccaaccgggactaaagatctccgggactaaagagatgatctttagtcccggatggggttagttccccagccccccgacaggagtctgacacgccctgtcagagggaaaaccagccctaaagatcacttaatcccgttggagtaataaactgggacaaaaaaacctctttattcccggttcttgtttgaacacctgtatgaagtattaaatataagctaaaaaataactatctgcataggttgcgactaatttgcgaataatttgcgaatgtggtcctacagtaaacatttgctaatgacggattaattaggcttaataaatttatttgctaatgacggattaattgctccatgatttgacaatgtgatcctacagcaattagtttttttttataagtgcccgaacaccctatgcaacactttatataatacccgatgtggcacgacaaaactttacacacccttggatcttaacacccccttagttgggaaaattttttgggtttagttatcacatcggatatacggatacacatttaaagtattaaacgtagtataataacaaaataaattacagattccgccaggaaactgtgatacgaatttattaagcctaattaatccgttattagtaaatgtttaccgtagcaccacattgtcaaatcatggcgcaattatgcttaaaagattcgtctcgcaatttacacgtaatctgtgtaattatttttttattttatatatttaatactctgtacatatgtctaaatattcgatatgacagcgtgaaaatgttttgttttagaactaaacatgctacagacgtcgtagccgagggagtgggatacagccgagatcatgctgcactttctgccggatggaccgtacagcaggaagccacgcttccaacgtcgaagtgctatttcttcccctcccgaaacaacgtacgtgcttgatctcatccttcttggcggggtccatggcgagtgtggaacgaacgtggctgggtgcatgtttccacgggatgtggctccacaggaccacatcgtattaccaccactgccacagttggtgaagagccacctatctctcagctgagccggctcttggttcctggctcgtgcccccgcaggattatgtcgcgcaggtaggggctctgcatgagctcacggtggcgcttgtggaacacgaacaccagcttgtgctttcaattcccgcttgtccttgagctggttccaccacgtgttggcgccggggaagctgtcgatgacctgctggttcttgtccaaccactcataattatattgcgttataagatcgagaatacttgtcttcgggctaccgggcggggggagcaaaaatagggcgctccccccgccccgcctcagtgcgcggtgatgtcgttaggccccaccataatatctgcccccacctgcaacaaatcaaccacatattttggaaaccatctattaaagaaatttggtttattttttgatccacaaaaaatgtttcaccgagtgtactcacaatgtttcactatgtatagatctaatgttgcagtgaactgaaatctttcattgcaacaaaaaaacctacatattttggaaacccctattaagggaattcgttttattttttgttccaccgaaaaatatttcacctattgtacttataatgtttcactatatatagattaaatgttgcagtgaactgaaacaatctttcgctatttgctgaaacattgtttttatataaggtgaaacaacactcgatttaaacgagtgaaacattttcgatctacttagtgaaataatttcgatataccaggtggaacatcgtgtaacatttaaaaataattcaaaaataagctaaaaaaatttttcgtcggaatatatccatgtgtggtcttgttttgaagatttaattgcaatgaatttaatggtgcaattggatcataatttggataagtaatttaagagaaaaaacagttgaaaggagtttttgcacgtaaatcgggcgctgacgtcaccgaatttctcgaaatgatcgggcgcccgagccatacaggttcccttataagatgttgtaacaccctgaaaattcgaccgataaaaccaaaactctaaaaatacggattttcaaaaactttttaaatcaattgcatcatgctgatcttattcgcctatttttggatttgatctcgaagtttattaatcgtgagtaaagaatagttaattagaaataaaccttaaaaataaattggtaaaataaatataaattaaaataaagattaggtgtggatagaagtaaataaaatattgtcgcgaccatatttggatcaattaaatttaaatacgatggaataataattaaccctaattaaaaaacttcaaataaattatataaataataataataataataataaatgtgtgatattaatctagggtgagttcattagttgagataacacaattattgagtaaaatgcatatatgcaaaaattaggaattgtggaattaaatttatatgggaaatacacaaaaatcggtttaatagaaaaaaccactgttcattggccgccacacgtgttcgacgatgtcccctagcctt

SEQ ID NO: 21451 - DNA, 9199 bp, Oryza sativa
actgttttcgcattcaattcctgtttataaatgccagtatttatgcaaatgaacctgcttagctatcccttgttaaatccctgcatcatacctctattccggtatgacttgctgagtacagtgggtagtactcagtcttgctctacttttcccccccaacctcagagctcgagtatgtgtccgatggcgggttctccgaggagtaggcttcgtccgtgccgtcgaggatgcctgtggagtggtgttcccgctgcagttcaagtcaaggcttagctccagttatcttttgttttccgctgcatttctgtaagacctttataatgtttgtaagacgtggatctgtatgtcaacattgtcgtttgtgtaccccggctggtcctggacgggggttttaatacacattctgcttggaattctattcgggaatttctgggcgtgacaaaaatctatcctcgaaattgtgcaaagaataattaaaattcaatgtgaaagcctccaacaattaaaatgtgcaaagataaaagtcaaatgaggcttggaggatttttgtatatttcctaaaagcctaaaatgcttaaacaaattttagtggaattttcagagcacaaataataattgaaaagaaatgaacaaagttaaaaaggtttataaaaagaaaatcctaaaagaagttctttttcccccccttccctcttgggccggctcggcccacttctccctctctctctctctctcctcccccgcggcccatcggcctccccgcgcgcgcgcgccgctgacaggcgggcccgcccgccactctcgctgacgggtggggcccacctgtcatcgccttcctcccgccgcgcccgccgccgcgcccgtgccctagcgccgccgccgccgcggattgcgccgcatcccgccgtccccgcgcgcattaaagagaggggaatcactccccgtgattccctctcccgtttcccccgttttcccctctctctctccctcggattcgtccgatttccttcccgcattcatcgccggcgcatctatggcggccgaaatctccgcggtcggtttccttcctccccggccgccttctctccctcccgacgctataaaaccgttgcccgagctccgctcttccgtttccgccgctcgccgctcgctctcgccgtcggattcgtgctcgcgccgtgctccgctctctccgccatcgccgccgagctccgttccgccgccgccgccgctccggacttcctccttactcggcgacacctccgtccgcttcgccgtgttgccgccgaccccgtccgccgctccgctccgtccgccgaccgtcggagcgccgtcgccatcgtcatcccgagccgcgccgccgctttcctccactccggccgccgttctcgtcgtcgtcgttgtcccggggtgagccgaagaccgccgttcgctttcccccttctctccgctctctcgggcgccgctccgccgcgccggtggtcgccggcggtgaccatcggggcgcgggcgcgccgctcccgtcggccgcgccggcgaggccgccctcgggcgcgccctcgcggctgccaagtgggcccggccgtcagccgcccgcgcccgcgggtgcggctgacgcgcgggacccacggtgccgaccgccgacagccgtgtgcgcccggtccaccgtggaccgagcggctgacgcgtggccccacttgcccgtggacccggtccgcgcgcccccttccttcggcgacgcaataaatgggttttttttaattgaaaattaaatgaagaaattcgcaaatatccatttaaagagcatataaacttcaaatggccatatcttggccatttgaactcggaattggaccgttcaagtctctaatttttccttaagatgtaaagaacccatttttgtgctttgtttctgctgttatgtggagttatttagtgttaaagcctttttcttttccgttggtcgtgtagacgctgcagcttcggaagatccgctcttcgtggaagtcgaagccgtcgattgggaaaacgagcaaggcaagacacatcatcttgatcatattgaatcccagtttataaaattatgttgatttaaattatggcattatcgctttatttaaattcccgcgttatcactgttttatttagccatgcctatttacctttgttatgaccatattattattgttattgttattattactaccttgttcaccctagacaaacaaaacctcaactagtggacactctactcatggtatccctagtataattttaggtagatgcttcgcaatttaattaggtaaccttaggtggttttacaactttagacttgggaattatttcatatcacctggatactctggaattgttggattattgtggaattggcttcacaccgccccctctattcaaaatcccctaaaatggttttaggctgggctcggggtgcatggttttgatagtagcacctcggccgtttaaggaccggtcttcgggcctctgttgcaaagcactaccgtacttccacatgtctaatgggtaaggcttagtttgtggctcagtctagtcataaacaaaagtacacggattggagatggatgaagtcgggggtcgatggacattctccagggcaaatgaaggctacacgagctgcggcccggtagtcgagatgtcatacggcagagggttggtgccctgctgctaggggctcagtcttgcctgcctgtcccgggggttccggccgtaggcaggattgggtcggtactcttgtctaaggctaggatgggttggaaactatgtcatgtctttcgtctgtataccgtggtggtatgtggcacgtggttgcacgtgagaaagatgtgtcttgtgggtaaagttgtacacctctgatcagagtataatctattcgaatagccgagccctcggttatgggcaagccgagcaatgtacccaagttagtgttttaattcttaaaacttgcttaacaactaaaatgtggaatggttggcctgggttggcttaggacgagctgggacccagggtcgggttgccagttcggtctgaatcatcgtaggccttgggttaaggcaggttcgtgtgggttcacggccttgattaacaactttgcatagttctaagatcgtgtttacaaaatagccctgagcaactaaatgtctttaaatgctgtttactgcaaccctaaccctttatgttataattcccttgtactcccttgcatttattctgcatttgtgggtgtgtcttgttgagtacggtggttgtactcagtcttgctcaatttttcccaagcccagatgaggagttcctggaagatgaaggcttcggtgtctagctcgtgcctgccgtcaagcgcctgtggtcgtcgccctagtcttccgctgttcctcgtttgtcttcgtgtgttgggccttcgctgcccgtgtaataattttatatacgcttccgcttgttaaactctgaattgtatcaacttttggtgtaccttgcctcctgggacaaggattaatgcacgcacgtaaggaatgcccgttgggttatttccggtcgtgacagtgagtaaaccaaatctattcgaatagccgtgctcgcggttattgagcaccgggacatgtattacacttggctagactctgaattcttaacttgtgtgggatgggttatcgcatgatgaatttttatgctgttggagtcacttcctgagatgggggaaagtggacgtcctcagaaaaccataacgactcaatggcgggaagctatccttgggatcacaatggatggtggacataaccgtcattgtttaaatacaaacactggtactaaaatttgatcagttgatgctaggtcttaggcttgtgaaaagaattacaaaattggctttgcgcaaaagaaccatagccatcctttgaaatacccctttcatatgtattgttgctgtggtggcttgcggagtacggttggtactcacccttgcaaatataaaattaatcacaaacgggagatgaagctatggaggatccctatgcctactaccaggagagagatgaagacgacggtgcccaataggtcttagtacggtcgttgcctgtggcaatggcataccgctgcttaaattcccctgccttatctaaactctgcttttggttgtattccggaccgctcggtccaataatttaagacaatgcctgcgggctcatgttgtaataattcgtactagactctcgtgtatgagcatttggtattaaactctcgtgtatgagcatttggtattccggctatgaactcgtgtgtaccagactacttgatccagggaaatggtactgtttacacgattgattcctgttataaaaacgggggtctacagatgtgcaccaataaaacacaattttcaattatggtaacaacatgttgtgtgtcttctacctaactcattgatatggttgtaaaagatatgtcccataatcgaattattaagctgagcatctactcatggatccatactcgaaaggctcataaattgagtttaattaagataatgttctggacaatacatgtgtaattaaagtattaaataagatcatggataaagggttgttaaatttatcaatcaacaaccaccagtttccttcccaatcaagaaagaaaaaaaaagagataagatcttgtttttgtgtgatcggtgcaaaacataattcaaaactaatcaagccccaccagtgtcgttgtataagaaagatgagaagaggcaactgatcgagtttgaactctctctctaaccctaagccctaaatcaatcgccggatcgatttgacactgaaaggggttcatgaggtttctctttgtttccttttcatcaatagaaaatcagtacagagaagaagaagaagaagaaggagaaaaagcaaaaggacgaacaacaaaccaaataccggcttcaatggcttcacaaataaggtcagttagatcaattttcgcattaaacaaaggtgatcatgtttaggctaagatcttaagtaattaagtaagattaaactccaactacattttgttaattaggtgttacaataaaataacaatattacaaaagcgtccgtcaatgcagtttttttacaaaataaggttgagaacacaaattctagaacgtgaagtataaggtacataagtagttttacactgagtagttatgtatgactcgccagtttatttatcacacaccacacttgtgcgtctcctaacacacgcaaattaaaaaggatggagacctgcagtacatattactggtaagtggtaattaaagtgggtttatttaggctatgactctgcagagtttaaccgactaaacaaacacgaaaatgcattgtaacagaaaaacacagaaagatgcagctagctagcttgctaggcaattccccaccacacaagagccagcatcgatcccactcaacatatattccccggtgtagctctcttctgccttagattataccttgatggcctgtcggtaggactcggcctcgggagaggcgcgttccagattccagtttggccttcttcagcttttgtattaatcctgtcaagcatttgttcgtgttcctcttcctcttgccctgaggcatgaggttatgggcaacatccgccggcgtcatatcagtctcgtcgagcagtcgttggattttggtgaacaatgggtgctcggtgatgtctaggtagttgttggcgagcaccttgaaggcctcaaaccggcagtaggacatctcgatgtgcttgtccatcctcccccggcggatcagtcccggatcgagcttatcaacgtggttggttgtgagcacgatgatccgctcaccgccacatgctgaccacagcccatcaataaagttgagcagccccgacagcgttattttctttctttcatagtaccactggaagtctgtgctcatgcgtttatcctccaattccatcgcatgaatgtcctcaatgacgatgatggattgctctgttgtctggaggaagaggttccgcaggtcggtgttgttcgtgacggtcgttaggtcgaggtcatagacgtcatatttgagaaagttggccattgctgagatcgtgctggacttgcctgttccggacggaccgtatagcaggtatcctcgcttccacgccttgccgaccttggagtggtactcctttcccttctggaacatcttgagatcttctatgagctcatccttcttgccggggtccatggcgagcgtgtcgaacgtcgccgggtgcttccacgggacgtgggtccacgtgctcatatggttctcgtggtgggtgtacagtcgcctctgcctgttcttggcggtgagcgcgcgcccttgctggaggatttcagggagatatgagtcttgcacgagctgacggtggcgcttgtgaaataccagcatgtagttgcgccgttggatcttacgtccatacaaggaatagtcatcggaagccttggacagtttccaccacatgcgggtgccgcggaagctgtcgacgacctcctgcttctcgtccaaactgaactgggtgtcgccgttgtcgccgagcttggcattgagcttgtgggccccttccatgcatttgctgcccaggtacagctcgttccgacccaacttcgtctcgttgtcgtcgatataatcggagatggtgttctgctcgtagggattgaagtaggcaacactggtggagaaaccatctttcgtcggtcggccgatttccacaataatcccggatgcaataaaaactggggctaaagatgatctttagtcccggttcaaaagggtaacgggcatatttgatctttagtcccggtttgtgttaccaaccgggactaaagatcatctttagtcccggttcgaatgctgtcaggtcatgtcaggccccaccgggatctttagtcccggttggtataccaaccgtaactttagtcccggttggtataccaaccggggctaaagatcccggtgatctttagccccggttggtgctaccaaccgggactaaagtcccacccctatatatatgtcttcttcctcctccagctgcccgagcaagcttcaaaatttcttcaaaaaagaggggaggttatgccaaaatttctattgaatttattttggtgattacatacaaatcggaggtgcctaaaaggtttgcaacttcatcctccaatgtttttttttgtcatactacatttgcacctatgttttgcacactttttttgtctccaaaatttagttgtaagttgatgagagagaaaatgtgtgtggggaagaaagaatatatagaaatttagttcatttgctaaacaaggttttataaaatagttgagaaggaaaactctagtgaaagttaatcttaaataatagaaaacaaactaaaatgaaaattaaaagaagtaaaacacattaaaattagtttaaaactttacaaatagtttttaagaattatttggtgtaatattttatgatttttgtatgaataaagatatcttataattattgtatgactgtcattattataagaataattatttgtgtacggtttttttgactcatgtagatggatcggcaatggatgtacgctgaccggcggtccaaagagtttattgacggcgtgcattattttttgagagtggccgaagctaacaggcaaaggggttttatttgttgtccatgcaataagtgtaagaatcagaaggagtattctgcatccaggactattcatttccacttgtttgagtcggggttcatgccaagctataattgttggacatcccacggagagcaaggtgttgaaatggaagaagatgaagtggaagacgacaatattccggactttgctcagtatgttggatttgaagcaaatcaaacgggcaaggaggaaatagctgctgatggtaacgatgttgcggatgatcttggtcagatgttgcaggacgccagggaggactgcgaaagtgaaaaggaggcccataaattggacaagatgttggaggaccacagaacttcgttgtacccaggttgcgagcaggggcacaaaaagttggataccactctggagttgttgcaatggaaggcaaaaaatggggttagtgacaaggcatttggcgatttattgaaactcgtcaagaacattcttccggggggaaacaaattgcccgagacaacgtacgaggctaagaagatagtctgcccgttaggacaggaagttcataagattcacgcatgtccgaacgattgtatcctatatcgcggtgaggagtatgagaacctagaagcatgccctgtttgcaaagcactacgatacaagattagacgggacgatccaggagaagttgacgggcagctaacaaagaagagaattcctgctaaggtgatgtggtatttccctataataccacggctaaggcgtttgttcaggaacaaggggaatgctagaatgttgcgatggcacgctgaagagcgtcaacaggacgggatgctgagacaccccgccgatggttcgcagtggcgaaacatcgacagaaaatttaaagaatttggaaaggacgcatgaaacatacggtttggtttgagtacgtgtcgcgaccgggaaaattgccttttcccgaacgctagtgtattaatccccgtcccaggaaaagccggggtacaccacacaaacatgatataaaagacacatttttattatatcgataatatttacattattacaaaggcgcttcaggcctggcaatcaaaaataaacagcagcggactagcgggcctacggtttggtttgtcgatgtttcgacagaaaatttaaagaatttggaaaggacgcacgaaacatacggtttggtttgagtacgtgtcgcgaccgggaaaattgccttttcccgaacgctagtgtattaatccccgtcccaggaaaagccggggtacaccacacaaacatgatataaaagacacatttttattatatcgataatatttacattattacaaaggcgcttcaggcctggcaatcaaaaataaacagcagcggactagcgggcctacggctccatcttcacaggcgctcaactggggtataagccaggactccacctaagacatcttctccaacgcttctcttactgaagaggggaaagattgagcaagaatgagtacaacca

SEQ ID NO: 21452 - DNA, 5654 bp, Oryza sativa
ccgcttgccagaacgccgctctcctcgccatcggcactcttcaccagcgctacccggacgagttgcagcactcgccctaccgctaccaccctcgtcgcggaggagcccgcgactacgccaccttccgagacgccagctcggaggatgacgctaccgtcgtgcatctggcacgcatggtggaggcgtacgacgcggctcgtatcgacttccatcagatggtgcgccgtggcatggtggagaacaacctgaagatcctggagctgcgtcaggagaacctgcagctcaagaaggacctcgacgcgttggaggcgcagctgcaccagctcaagatcgcccagggagagatcagccgtcccaagcgtcgccgcgtctgccgcagccagaagatcaccgcccgcaagagcacctccaggcccgagcttgttcgtcagtccctggcgtggacttgcttcgtcgagacccctcgtgccgagcctgcgcccgtggttccccaggagggggaagcctccggcgttggtagctcggagggtgcgctgttgctcaccttccgtcctggcccgtcgcagcggtagacgagcagttagtaggcttgcgcgtgtgtttttcctcgtttgtctttttgagttgtgtggggcatggttacaccggtgtgtggtgtatctatgtcggagcctgtcttattttatttgcctaagcaacttgaacattaatgaaccaatttaatagcagtgataaatttaagaataatggtagtcgtgggtggttagttttaatcgtcagctccttctctgtttgctggttccgtgtggggttttcagatggtgacgaccaggagaaatgttaacaccggtgaaggcaaccaacccgaaggcagcaaccccaaccaccaaggcaattcaccttcgtcaccaccgtcagacaccaacgccattctcacccaaatcctcgcccagcaacccaacatgatgaccgctttcctccaccacctccaaaacccgccacaacagaatgctccaccaccacccccacaacactctaaactcgccgagttcctccgcatccgcccacctaccttctccagctccaacaaccccgtggatgctttggattggttgcatgccgtggggaagaagttagacacggtgcagtgcagcgatgaggagaaagtcgtcttcgccgcccatcagctgcagggacccgcatctctatggtgggaccatttccaggctacgcagccagaggggcaaccgattacttgggctcgcttcaccgccgctttccggagaacccatgtgcccgccggagtcgtggctctcaagaagagggaattccgggagttgaagcaaggcaaccgctccgtgatggagtatttgcatgagttcaacaatctagcccgttatgccccggaggatgtgcgggaagacgaggagaagcaggagaagttcttggcaggaatggaccctgagctgtccgttcgtctagtctctggggactatcctgattttcaacgactggtggacaagagcatccgcttggaagccaagcacaaggagctggaatcgcacaagcgccgcttggcgaatttccgcaatcaacagggtgctaaccagagggtccgctacaccaatccctacccagggggatcctcctcgcagcagcagcagcagcagcaacctcgcccagcgccccgacctcaattcgtggtgcgcgtcccacagccacagcagcagcagaatcagcaagggactcgtgcaccccgtcctcctacgccagctgtgcagcccgttcaaggccgcagggacgctcaaggtcagcagcgtctgtgcttcaactgcttcgagcccgggcactttgcggataaatgcccgaagccaaggcgtcagcaaggccaagcacctccccgctccaacaacggcgggaaggatgtcattcggggtcgtgtgaatcacgtgacggccgaggacgtgctgacaactccagacgtcatcgttggtacgttcctcgttcattccatccctgctacaattttgttcgactctggagcttcccactcgtttatatctgtgccattcgtggggagaaatcagttgggggtagaaaggcttagaaaccctctgctcatcaccacccctggaggggttatgacagcaaagtattatagccctgccgttcctatagaaattcaggggattccttttccctcggatctgattcttctagacacaaagaacttggatgtgatccttgggatgaattggttggcccaattccaaggggtagtggattgcgcgaggcgcactgtcactctgtaccgaggaccggaacaaccggttgttttctttgcaccctcaacctctgtcagaagttcggaacttcatcagatagaactgtcagaaatccccatagtcagagagttcggagacgtgtttccggaagaactacctggtatgccgcccaagcgagagattgagttccgaatagatcttgctccaggaaccactcctctgtacaagcgaccctaccgtatggcagcaaatgagctggccgaagttaagaaacagttggaagagttgaaagaaaaggggtacatacgtccgagtacttccccatagggtgctcctgtgatttttgtagagaagaaagacaagacgaagaggatgtgcgtcgactacagagctctcaatgaagtcaccataaaaaacaagtaccctcttccccgaatagatgatctgttcgatcagcttaaaggtgccactgtattctccaagattgatcttcgttccggatatcaccagttacgtattcgtgaagaagatattccgaagcccgcattcaccacgcgatacgggttatatgaattcacggtgatgtcgttcggcttaaccaatgctcctgccttcttcatgaacttgatgaacaaagtgttcatggaatacttggataagttcgttgtggttttcatcgatgacattctgatatactcacaatcagaggaagaccatcagcaccatctccgtctggtgttgggaaagttgcgggaacatcaattgtatgccaagcttagcaagtgtgagttctggttgtccgaagtcaaattcttggggcacgtgatatctgctaaaggagttgctgtggaccccgaaacagtgaccgccgtcaccgattggaagcaacccaagacagtcactcagattcgcagtttcttgggtttggcaggatattaccggagattcatcgagaacttctccaaaatcgctcgacccatgacacagttgttgaagaaagaagagaaatttgtgtggagcccgcagtgcgagaaggcgttccaaactctcaaggaaaagctggtttcctcgccagtgttaatcttgccggatactcgcaaggatttcatggtgtattgtgatgcttcgcgccaaggattggggtgcgtactcatgcaggacggtcatgtggtagcctatgcttcacgtcagctacgtcctcatgaaggcaactaccctacacatgacttggagttagcagcggtggttcatgctctaaaaatctggcggcactatctcattgggaaccgctgtgaaatatatactgatcataagagtttgaaatacatcttcactcagtcagatctgaaccttcggcaaaggagatggttagaactcatcaaggattatgatgtgggaattcactatcatcctggtaaggctaacgtggttgccgacgctctaagtcggaagagccattgcaatactcttaacgtccgtagcattccgcccgagcttaatcaacagatggaagccctgaacctaagcatagttggtcgcggattcttggctgcgttggaagccaagcctaccttgctcgatcaaatccgcgaggctcagaagaatgatccggacatgcatggactcctcaagaatatgaaacagggtaaagccgctggtttcacagaggatgaacacggaaccctatggaacggaaagcgggtatgcgttccagatacccgagaacttaaacagctgatacttcaggaagctcacgaaagtccttattccattcacccgggcagtaccaagatgtacttagacttgaaggagaaatactggtgggttagcatgaagcgggaaattgcagaatttgtggctctatgtgatgtgtgccagcgtgtcaaggcagaacaccaacgaccggccggacttctccaacctctccaagtgccggaatggaaatgggatgaaattgggatggatttcatcaccggtcttccaaaaacccaaggtggatatgactctatatgggtaatagtggatcgattaaccaaggtagctcgattcattcctgtgaagaccacctatggagggaataaactagcggaactctacttcgctaggatcgtgagtctccatggtattcccaagaaaatcgtatctgataggggaagccaattcacctctcgcttttggaagaagctccaagaagagctgggtacccgattgaatttcagcaccgcctatcacccgcagacagatggacagaccgagcgtctaaatcagatcctagaagatatgctccgcgcatgtgtcctagatttcgggaagacttgggataagagtctcccctatgccgagttctcctacaataacagctatcaagccagcatacaaatggcaccatatgaagcgttgtacgggcgcaaatgccggacaccgctattgtgggaccaagttggagaaagtcaagtgttcgggactgatatcctgagagaagctgaagctaaagtcagaatcattcgggataatctaaaggtggcacagtcccggcagaaaagttatgcggataaccgtcgccgtgacctggaattcgcagtggatgactttgtgtatcttcgggtcacgccattgcgaggtgtacacaggtttcagacgaaagggaagctcgcacctcggaatgtgggtccctttcgtatcactgctcgacgcggagaagtcgcctaccagctggagttgcccgcctccttgggtaacgtgcatgatgtgttccatgtgtcgcaactcaagaaaagtctccgagtgccatccgagcaggccaactcagagcaaattgaagttcgcgaagacctgacctatgtggagaggccagtgaaaatcctggacaccatggagcgcaggaccaggaaccgagtaatccgtttttgcaaggtccagtggagcaaccacgccgaagaagaagctacttgggagcgcgaagacgaactgaaggcagcccatcccgatctcttcgccagttcttccgaatctcggggtcgagattccgtttaaggggggtaggtttgtcgcgtcccaaaacgactctaaaattgtcacaccccgaagttttcctcccaagccaaattgtaaattacaaatgaccccaagaaaatgcagaggaaatcaggataaaaccctaagaaaacaatgcaaacaataatcgggtttgacatgtggaatttttcttgaattctacatgtcgaaattcattaacaggatttttagtggaattttcagagctctagaaataattttaaccaattaaaaatcactaaagtgcaatttttaattccagggaaaatccttttcctttttctttttcttttccctccctttttcctcctttct

SEQ ID NO: 21453 - DNA, 6430 bp, Oryza sativa
gtaaatcaagaaaaatgtgtagaatccattaaaaatggttttgttctctgtttcagtagtcttatagcctgtttgcaatgtttgctttgtatgtcgctagattccgatccctccgacgctccggtgtacttcgagatagtcgccgaggtccctccagcagcagagcaaggcaagtcatgcctgtcacttgaacatgttgatcctatattgcaaatgctctactgttttctttcaaatattgcattgttttataatatcactatgggatggatacctattgttacagccatgcttttggatatcatgctcctttgttagcttgggttataacatgattagactttggactaggaattgcttagccatgcttagttcaactagcacacattggggatctcatttaaaacctagactataggtttatatgataatgttggtttaataccaccgctctggtgttggttaaataaaatgaaccacatggtgggctgtgggtgcatggttttgctagtcgcacccatggcagttaaggaccggttcgcgggatgccctggaagaatttatcgtacttaccacaagccagcgtgggcaacggctgggcttgtagtgtagctttcctctagtcgacgcatccaggcaagggtgggcgtgatggagcggggcgggccctgcgacggcctctgtcgcttccggattcacctaggcacgagaggggactgcccgtcgcccgctggggacgggggtgaaacctgaggtgtggtgtgcttggctagagggggttatgcgaagggtcctgtcacggcctctttccggtatgtcgtggtggcatgtcggcgcacggaaacgtgtcgtggggctgtgtcttgtgggtacagttgtacacctctgatcagagtaaaactattcgaatagccgtgcccgcggttatgggcggtcaaccagattcaccgtgattagtctcaccctagtgtaatctgttgaatttggatagtttaggtggatggttgggcctgtcgcaacgtgggttagcgttggacagcggatgtttaatactgcttaattattacaactgttttcgcattcaattcctgtttataaatgccagtatttatgcaaatgaacctgcttagctatcccttgttaaatccctgcatcatacctctattccggtatgacttgctgagtacagtgggtagtactcagtcttgctctacttttcccccccaacctcagagctcgagtatgtgtccgatggcgggttctccgaggagtaggcttcgtccgtgccgtcgaggatgcctgtggagtggtgttcccgctgcagttcaagtcaaggcttagctccagttatcttttgttttccgctgcatttctgtaagacctttataatgtttgtaagacgtggatctgtatgtcaacattgtcgtttgtgtaccccggctggtcctggacgggggttttaatacacattctgcttggaattctattcgggaatttctgggcgtgacaagttggtatcagagccgaccttgaccgtaggacaagccaaatggaaagacctaagagccctctgaatccttttcattgcatatgttctttgcaattggattttgttccgggaaaatggggatctgttcttatggttcaagggaaaaatcttggtcgctcgtttaaagtgagtttttcaaaacgagtcagtctagggttttagtaaaattattgggatttattcgtcagtcagttgggatttgatgggtgaaatgcactcggtcctagctcggtatcatgggttgcaaggtatttatgctttgttcgttattattaatatgtatctaatttctcattattttatcgttatgtgagtctgtcttatttattcgcgctcatgtaaaatgatctatgcataaaattttgctcttatttgattcctttatttgagtctttattgctttatttaaatttggatttgagcatgcattgatcctactcctttgtcttctctagatggccggtcacccacccaaccaccgcggagaaggcatgattgatttcgtggcagagttggcacgcatgaccctggtggtgggctaccccgacgcgccggagtacacgacgattccgccgctcagtggcgagcttcctcaccgtgtccgcttggaggtccatggttacgtggggacttgcctcgctaacatggcggtcgaggcatctggaggcacagcagatcacgcctgtcaggaggcagcctacttgatgatggccagactacgggagcgccacgactacatcttccacgacacggcgtaccgctaccacccccgtcgagcccatggtgatggcgtcagctccttccgtccgacagctggcgagaacgacaccaccttcggtcacatgtgtgctgtgatgaggggattggaccggatgcactcggacctgcacaaggcgaccaaggccttgaatgatgggaagctcatgaggatcgtcgctctgaaggacgagatagcgcgcctgaagaaggagaatgctcagttgaagggtcttccagcaccaggaggagtccggatccgcactacgccccgtaagaggacgactgcacccgtgcgcatccagcttgcgcccaggaacccaccttcaccagcagctcccgcagcacctccagttccgcccgcagctccggcagttcccgcagttcctccagctccagctccagctcccgcgttcactctctccttcgctccagcatcagccgccagaggtccagccagtggtaccggaggttggttgtccgctactcccagtggcagcggcgagactgatctgtcaggctccaggagtcgttcagagggaccaggtgacgagcaggaggacgctttcgactccaccgaccgcaggagccgttccgagcattaggctcgttttcccattagtttatcgattgtctagtttctgcttgttagtttgtgtgtttaggttgcttgtttggggtcagtcgacggtcgatatcatgtgcctatgatatggctgtcttaataaggatttttgtttgctctttttaagtgttttaattcagatcagaacaattgcagttttaattcctatataataaagcttagttcttgagcatctgtttttctccttttccccccgtctgcttttccctccagatggtctacaccaggactggcaaccgcacgacaggcgagggcagcaacggcgaagaacgcgtggatggtgtgcaccccaacagtgattctggcaatggtccgccaccacttcccgagaatccgacgcttgcccaagttatggcacaccagactcagatgatggcagccatgatgcagcagatgcaacagcagcaccagcagatgcaccagaggatgatgcagcacgccgaacagcagcaccagcagtttggtccccctccccctcagtccaagttgccggagtttctacgtgtcaggccacccaccttctccagcaccaccaaccccatggaggcaaatgactggatccatgcgatagagaagaagctgaatctcctgcagtgcaatgaacaggagaaggtcgctttcgccacacaccagcttcagggtcctgcgtcagcttggtgggacaaccacatggccacccgcccaccgggtactgaagttacatgggcagagttctgccgtagcttcaggaaggcacaggtgccagacggggtcgtggcacaaaagaagagggaattccgggcgctccatcagggcaacaggactgtgacagagtacctccatgagttcaatcgcctcgcgcgatatgcaccagaggatgtccgcaccgacgccgagaagcaggagaagttcatggcgggtctggatgacgagctgaccaaccaactgatatctggggactacgccgactttgagaggctggttgacaaggcaatccgtcaggaggatcagcgcaacaaaatggacaggaaaagaaaggcggcgcagttccggtccaaccaaggtagtcagcaccgaccgcgcctcactcccggacagcagggtggacctaccaccatgattgttcgtcaacaccgcccattcaaccccagcaacttccaccagggcactagtggcagtcagaaccaccatggaagtcagcccaaccgcggtacagctccacgcccaccgatggcaccggcacagtcaggccagcccgcacaagccaagaaggagacgggagcaaaaccagggtcctgcttcaactgtggcgagcttggccacttcgctgacaaatgcccgaagcccaggcgtgccggaccaaggtttatccaggctcgtgtcaaccacgcatctgcggaggaggcacaagcagcaccagaggtcgtactgggtacgtttcctgttaactcaatccctgcaacagtactttttgattctggtgcaacgcattctttcatctccaagaaatttgtcgggatgcatgggttaataagagaggaacttagcacaccgatgcgggttcataccccagggaatagctccacttcggttcaattcagcccttctataacaatagaaattcaaaggtcaccgtttctagccaacctcattcttctcgaatccaaagacctagatgtcattcttgggatggattggctgaccaagtttaagggggtcattgattgtgcgaatcgcacagtcaccctgaccaatgagaaaggagaaaccgtggtgtacaaatctctagtctcgccaaagaaaggagcctcgttgaatcagattgagacggaaatcccaatggacgccgaagagaagaacttgagaaaattggaggacatacccatagtctgcgagtatccagaggtgttccccgaagacctcaccaccatgccacccaagagggagattgaattccggattgatttggcaccaggaaccgctccaatctataagagaccgtacagaatggcggccaacgaattagcggaggtcaagaagcaagttgatgaacagctgcagaaagggtacatacgaccaagcacttcaccttggggcgctccggtcatttttgtggagaaaaaggataagacaaagaggatgtgcgtcgattatcgcgcacttaacgaggtcacaatcaagaataaatatcctttgccgcgaatcgacgatttatttgatcaactgaaaggagctaaagtgttctctaagatagacctgcgatcaggctaccaccagttgagaatccgggaagaggatattccgaagacggccttcaccactcggtacgggctatatgagtgcacggttatgtccttcggacttactaacgcacccgcattctttatgaatctgatgaacaaagtgttcatggaatttctggacaagtttgttgtggtattcatcgacgacattcttatctattcaaagtccgaggaagaacatgaacaacatctccgtctagtactcgagaagttgaaggagcaccagctatacgccaagttcagcaagtgtgacttctggttgacggaagttaaatttctgggccatgtcattacagctcagggtgtagcagttgatccatcgaacgtggagtcagttaccaagtggaccccaccgaagacagtgtcgcagattcgaagttttctaggactggctggttattaccgtcgtttcatcgaaaacttctcaagaatcgcccgacccatgactcagttgcttaagaaagacgagaagtttaaatggacagctgagtgcgacaagagctttgaggagctcaaaaggaaattagtatccgcaccggttttgatcctgcccgaccagacgaaagacttccaagtctattgcgatgcatcccgtcacggacttggatgtgtcctaatgcaagagggcagagtggttgcatatgcctcgcggcagttgcgtccacacgaaggaaattatccaactcatgacttggaattggcagcagtggtccatgctttgaagatctggaggcactatctgatcggcaaccgctgcgaagtatatacggaccataaaagtctgaaatacatcttcacccaaccagacctaaaccttcgacaacgaagatggttggaactaatcaaagactatgacatgagtattcactaccacccgggtaaagccaatgtggtggcagacgcattaagccggaaaagttactgcactgctctatgcatcgagggcatgtgtgaggaattgcgacaggagcttgaacatctcaacatgggaattgttgaacacgggttcgtagccgctctggaggcacggcctacgctcgtggatcaagttagagccgctcaagtaaatgatccggaaatagcagaactgaaaaagaacatgagagtcggaaaggctcgggatttccttgaggatgagcatggcacaatctggatgggagaaagattgtgtgtaccggacgacaaggaattgaagga

SEQ ID NO: 21454 - DNA, 1876 bp, Oryza sativa
actactatgcataaagctagtatatgtaaagtttatacagataaagttacatgtatgaaatagaattgtttatgttggattttagtctaaatgagaaaggaaaaggctgggatatgctagtgggcccatgaaaattttgcatatacgtggactatgttgtgggctggagtagagttttgtgagcaggttcagatacgcacggaagaaataggtagcgtccacgcgtttgctcgacacgagcagtcgcgtactagactcaccccaatctgggccaggagcctcataactcggatatatatgatggggctgttcactctaacgaaaaaaaaccttactaaattttagcaggattttttatatagttaccaaaatttgacaacaaactaaatgtagctaatttttttttttataactttaccaaaacttggtaaagttgaaaatgacatcaaagtaaacgggcccgatgtctctagctggcctacatgactcggcgggctattaggattaggctaacaacgtgctatgcggcgacctatcacgccaaagtcccaagcacgagcgtggcctatgtacggcctgaaatcgggctgtgcctgaccaccgccttggaccaggctaggaaagcatggcccaattcctagcatccggcaaacagccaaacaggaaactttgggcttcttcctcctagtcagcaaccattattctagatgctttgacatggtcacatggggaaattttttatatttatctgtatctctgtctttatgctaatggccactaactgaaatcaaaacctaaagctcaaacctcacgcttctatatcatcattagttgtaagacgatggatcagtgcattatatcacttctgagctgataaggaataagttcacttgtggtcccttaacttgtcaacgaatccgattttcgtccttcaaccggaaaaccagatacaatgggtccctcaactatcaaaccggtgcaaagcaggtccctcagcggttttgatggtggttttggctaatgtggcgcctacgtggccggtttgacttggtcctcgtcctacgtggcgctgaccgggcactggaaggaaaatataaaactaaaaaataaaaacaaaatgtggggcccacatgtcagtcagacaaaaagaaaaaagtgaacccaccgttagtgggtcccaccatcctctctatccacggacgattggactacgggagactgggagagggagcgaccaacgcctcttctctctccctccagcatccttcctcgccggccggcgagcgcgcacggagagggaaaaaggccccgcccggcgagtggggcgaagacgacagctggcccccgcttgctgcgcgcctcttcggcgggctgcgcccgcccgtcgccgtcgagccccagtgccccacccacggcgccccgccattgccggccaccctgcgtgtcccccgttcgacccatgcagcgaggcgcgccgcatatgaccttgaagatctctctctcatgcacagcacagtgcacacacgatctcaccacactagtactagctactttgagagtgtagtaggataagccagcaagggatctggtatggcaacgtgtttccggtgaccagaagcctctcggccaagcccatcgcgccgcgggacgcggcgacttgcagtcggcgcgcgtagaacctcgtgttgggaaagacggtcaagggcggcccggcctccgccatggagtccgcggcgagtcgtaacgaggagatgggcgtcatcgcacatgaccagtccttggacgccaccgccgagcatggcgtcaaagtctccaataccctcgtcatcggcggcagccgaatcgtcaatgagttcgtcgccggccaggtaatcac

SEQ ID NO: 21455 - DNA, 730 bp, Oryza sativa
acgaggggcgcggctattcgaatagattatactctgatcagaggtggtacatctttacccacaagacacatcttcctcacgtgtaaccacgtgccacataccaccacggtatacggacggaagacgtgacatagtttccaacccatcctagccatagacaagagtaccgacccaatcccacctacggccggaacctccgggacaggcaggcaggactgagcccctagcagcagggcaccaaccctgtgccatgacatctcgactaccgggccgcagctcgtgtagccttcatttgccctggagaatgtccatcgacccccgacttcatccacctccatccgtgtacttttgtttataaccagactgagccacaaactaagccttacccactagacatgtggaagtacggtagtgctttgcaacagaggcccgagcttaatccttatagtggccggggtgctacttcccacaactggcatgcacccaaaccccaccgaaaacaggttttaggggttttgaaagaggaagagaggtgtatgtccaattccaccataaaccaacaattccatagtgtccgaatgatatgagacttcccaaagtctaaagttataaaaccacctaatgttgcctaattaaccagcgaagcatctacctaagttcatactagtggaaccatcaatagagtacccactagttggggttttgtttattatagggtgaacaaggaaat

SEQ ID NO: 21456 - DNA, 3583 bp, Oryza sativa
ttcgtcaagtcagctgaaagggaggctgaagcgaggttgaagacgaagcagttcgcgatttggctggattcgaagaacagtctacaaccacgagtccacgagcgcagtctttaaattttggcccggccaactcctagttaaggcccactcggctcagccactcccccaaccagcctctccccctcctggcctccacgattcgtcgattccctaatcccactgccgccggccacctcctcttcctctctcctaaatccatagccctaggcggctaggcacggcggcgggcgcggtgtgggcgatgagcaggcggcggtgtccggcgaggtcgagcggcaagcaggcggtggctttcgacgagctagtggcgctacggcgaggggcaagactggaggccggccagccggccagccggcgccgcgcgcggcagtccaggcgtccagcgccgtcgcgccacagcgaagatcaggaggtggcgagcctctctccggcgagggtgcaagcaggggtgcaaggcggcaaggcaggcaggaaacgccactgtgccgctgacccgctgtgggctgtggctggcagtggcattgtggcaacgacgcagcttattgatggtctgattgaagatttgaagttagaaattggtaaactactaacctctaatctctatctctatctctatctctatctctactacttatatataaaaaaataagaataagagatgtttccttcgtccatcaatataaaaaaacagcggaaaaaaataaaaaatccgattccctggcggaaaaaaatgcgattcccacataaaacgggaaaaaaaaacgtagattgaaaaaatatatccgattcccacctaaacgaaaaaaaaatccgtttcctgcccaaaaagaaaccaagaaacgtagatccaattcccacagcggaaaaaaaaatccgattcctccaaagtgaaaaacaaaaataaatccgtaaaaataaaaaaatccaaaaaacatgtagaaatgtccgactctataagaaagtagcgaaaaaactgttcgtaaaaaaacgcaggagaaaaaaaaagggcggaaaaaagcacggcaaaaaagtctaatttttattcgcagtgttagtagaccgtatttatctcttctctatctctaatttaatctaatctaactatttaaaaaaagaagtttccatcatatattaaaaaagaaaaatgcacgagaaaaaagtttaaaaaattgaaatgttagaaaaaggtgcaaaagaaaacgcgctagaacaaaaggttttcgtagtccaaaaaaaacatgccagaaaaaatattttcatcgtctgtaaaaaaagcaaaaaaaaaagcatatgaggaaaaaactgtaagaaaaaaggtaaattgatgcacgcttggtcgtatcggatccatcgattttttccatctcatacacagcttttgtttcgccatctattcttctgtattggataccctgcacatctctgtaggcaattatcagactatttttatgaacaaaagctactattcttgataacatattatatggaaataatattagaaaataaacatattttaattgttatttagagaatagtgcacagtgactctattttgtgtagttttgtatagacttgaccatgtgaggcagtctaggatttgattggttgcaagaatgggattaaatgttgtcatatgaataatctaattattttaggtaaagcaaatatcggtaaggttgccatcattgaggttgggccattacgtttaagatgttccaattttctaattttttgtttgtcatcaacatggttatacatgtaaaacgtatattatcattagttttttcacccgttgcaacgcacgggtatgtttgctagtataaataaaattgtgtcttgatagttcaagttcagtgaggttgtgaacttgtgattgaaacttataattgttctctatacatttttattttttaagattatcaacatgtcaaaaagaacactgctcacttattattatggttcaacagtggcgaaaacagcgtggggacggggaaggtctttataccccctatcccctaatggaccattagagcctccataataccccgaaaattctaatccacatatcagaatgcccaaaaggctgagaagcccaaaaaaaaaaatccccacccaaccctaaatctccatcagtcgctcttgccgtagaggcgcaaagagaggcgtagacgcggagcagcaaggaagtaggggcggcaccgcgggcggcggcgtgcagctagcagacaagcacgagtgcacgacgttccaggcagagtgcggcaaggcactttggtttagccccattataattttatcctggctctgcccctgatggggagtgccccgccacgctgctgcctcggtgtatggaggagaggagagtagaaggaagaagtggagagcaagagagaaggaaggagagaaggaaggagaagagagaggaagaagagggagaggagcctacgtggactgggtgcgttcactggtggagaaaccctttgtagtcccggttggtaccccccttttagtcccggtttccaaaccggaagtcgccatcgggggattaaagtcgcctatctttagtcccgggtgaaataaccgggactaaagatcgagctgacctttttttttttttgcatggccctgttgctgcatggtttatatatatatatatatatatatatatatatatatatatatataaaccatgcatatatatgtttcaatacatatatatgcatacatatatatatatatgtatatatatatattatattatattatatgtatatacatgcataatatatatgtatttatacatatatatgttatgcaaatgcatatgtatatagatatatatatgaccaaaatatatttacattatagaaaatgtgtacacatgcatatagaaacatatgtagtcatgtattaattacaatccattatatgttctagctagctacgatttcgacgtagtagtagtcgctgctagctcagaagctaaggaccggtgaattgtgtttctgtcgtagtagaattcacccttgggatcaaggatttcttcgttgatgaatcccatgagttgttcttgaaccgctgcgataaattccttgtgtgtggtcaggttatccctcatgcgaataaactatatgaatgtatgaaattgattattaattaaacaagaaatcgttacgtaatgaaattttgaatttatttgtacgtacatcgagctctcttgtggtgatgatttggtctgcaaggcagtggcaatactcacacacgtagtagccgcacaagttagttccctgcttttgctttgcgcactacaaataaatgacaaattaacggcgtgagatctaattaatatacagttgtatgtattaatttgaatcggagaaatataaatgtagagcatgtgtactcacaggaaatttgaacttccgcctaagtctttctctccatttgccgcggaccaaatgacggaaccgataccaagccctacatggagtttaaagctatgattcgtagtagcaattaacat

SEQ ID NO: 21457 - DNA, 1499 bp, Oryza sativa
agactcttttttatccattgagtcacatacgttgacggtgcaggccgacaggtcgaagagtaaaagcacccagtggaatctgcaatgtgcgtgggatgcattacatatgaaacacttagcaagttcgtacgggaatgaaatttggtatgtaggaagacagtaaaattgaactaactctgtgttgtacggcaacagtatgaacgtcttgtaatgctgcgccttcaggagatggacgagattgtcctctatttcttgtggatattggtcgagcattgcgacgtttactctccgagggtcgatgaatccagtatcgaaaaccctccgccgtcgggccctttgaatctccattctacaacgataaaagggagtattttattttatatagtctacttatatacaaggacctaattaattaaaggagacgtatagtaagaaatctaactgaacgatatacttacaaaatccagcaactcataatagagacgtcgagggcgtccagctggtatagttcgtagattcccctgaaattgatccagagaatgtcatctccttgcaagaagtccgtgtccctgatcctcgctccgatcatctctctaccggtggcgctcatctccatgtacagctgatggaacttgtacatttgtgtgggtagggactgcagcagctcaggcttgacaagcggtttaccgagttcgtacatgtatttcacttccgccttttcgattggtgcgactcctagcaattggtccgtagttagaccggtgtcagtaataaattgttctatcgtcatttctttaccggtcaccaatggctcgatctcctggtttggttgctctccaagctgagggactggtttggactttccagaagatgctttcttcagcgttcgctcatagtccgatagcttgatggcctccttgacagatgcagacatacccctgaagaagttcctgacactggggtctataggaatcttcttttctggacttcgaggcttgaattgtctcttgacttctgatgcaacgtaagcgtcaagctcctcttgcgtgcaatcgtaccccgggtccttgttcttggcggcgtcaactttcgccttcttcgttgcccttgtgtgggcaggcgatggagctgggggggccttgactttgaaggtgccggaagaggagcttgcggaggagtaggtgtaggagcccgaggaggagtcggtgcaggatcctgaggaggagtcggtgctggagcctgaggtggagacggtgctggcggagcatgaggaggagacggtgcaggatcctgaggaggagatggcggagccggaggagatggtgcacgagacgccgcttgtcgcccagggaggatgatgtaccgcctgcgccatagaataatggcatggcttgtgtctcgtagatgcgtctcgccgtctcctacagggtaatccagctcgaggtcctcgtatgcgccttcgaccaactcaacttcgaccttcgagtatcctgctggaa

SEQ ID NO: 21458 - DNA, 2006 bp, Oryza sativa
gtgttcgtcccgaatcaccccgttaatttgtcagctcggccctatctctgtctggtcggaacgtgccctgggaggaggcttccactgcatctgttagtcgtcgcgcagcctctcgtatctgatcgccgaagactagtgagccatcagctgggttgagcgttccaccgtgagcatagtaccagaacttcgatcgttccggccaattgggtgttgccggttcgatacccctctcaatcaagcaagcctccatctcctcccagttcggcatcgcgacgctatagcctcctgaccccaagtggtgatggtacttcttcttggcggcattttctttgtttctttccatcatcgcctgcccttgttcacctgtcttatatgcaacgaactcgtcccagtgatcccttagctttgggaatgtgtcgaagttcggtgtctgccccttcagtatatacttctggtacagatctcccttgaagctctgaaactgttctgccattttcttcagagtccaccttttcactttgtcctctgtacccgcaggaagggtgaatgtctcgagcattgtggtccacagcatctctttctctgaatctgggacaaagctctcatgatctccgcgtgcccttgttcttcgccagtacaccgtactgacaggcacgttatcccgcacaacccaaccgctgtgacgtacatagttcttggcggcttcggccggggcactaggacgtccatcttcttccacttccgttatgatgtgccgaccctcaagcttcttcgctgcacctcgttgcccgcgtgccctcttctgtccaacggagggttgactaccactagcctcctcctcctggttcccctccatatccctttccacgtgcccctgctggttcccctccgcatccctctccacgttcccttcctcgttcaagtactggtttggatcctcgttcccctcttcttcattccagtactggctgcttccctccgcgattgtatcgtacaatatctgttcctcatcgcggtcagccatctgttgatacaagaaacatctgctaagtcacgagacatttatgttttaacaatctaagtcatgtatgctaagtgtaaatgtcgtacattagaaccctacacaaccttacgtgctaagtctaattacaaatcgtgatataagctaagtctaggtgacgtatattatacaaccctagctagtaaataattatatactaagtctaattacaaataaaataatcttatattaaaactcaaataatatgacatgctaagactaaaatagtcatgtatatgctaagtgtttcgtgcgtatatgctaagtctaattaagactacaatagtcaattgctacttgtcgcaccaattccgtagtcaataattacatactaagtctaattacaaataaagtaatcttatattaaaactcaaataatattacatgctaagactaaaatagtcatgtatgctaagtgtttcgtgcgtatatgctaagtctaattaagactaaatagtcaattgctaggagtcgcaccaattccgtagtcaataatgtcatactaagtctaatttgcaataaaataatcttatattaaaactcaaataatattagaacactacacaatcttatatgataagtctaattacaggtctaataatcttaattaattgcattacaaatataacaatcatttatattattacgtcacttgcctgctccaattccttctagggctagctcttccactcaggcttgacggacgactccgacaacacgtcttttctgcaagatacaaaaagatgtattaggataaatgcgaagtaacatatatatatatacatatatatatatatatatatatattgcatttcacgttaacgttcgtcctcgttcgttcgctcgttctcgttcacgttcgttcgcttgttctcattcacgttcgttccctcgttctcgcttgtcttcgttcgatcgttctcgttctcgctctcgttcgttcgat

SEQ ID NO: 21459 - DNA, 3621 bp, Oryza sativa
ggcgaattcgagctcggtacccctaaagatatctttagtcccggttgttctcaacaaccgggagtaaatatcttttcccgctatttcgaaattctttttaaacccggttagggttaagaaccgggactaaagattatagcactgcatatgattttcgcttacatatgtgtttataaaatagaagttaatgcattaacattatttaaagtacaaagattaatgataattacttcgaaaaattatttttgtctgtaataaattaagtggataaatcgtaataagcaaatatatgacttataattaataaaaattccatatatatatatatacttagcatatatatgaatgatattattatattggtaaaaactctaattaagatatgtatgtacatactgcatgatttaaaattaataaaaattgtaatcatcatatatacttagcgtaggaattatattaaattaaatgctaaaaactctaattaacatatgtaaatgccacatgcatgatttaaaccttttaaaaattcgaatagtcatatataagtagcatatgaaagatagtaaattaaattgtgaaaaactctaatatatgaatgatagttttaaaaatatattaaatttaatacttttaaaaattctccagtcaattataattagcatatgaatgatagtaaattaaatgttaaaaactctaattaacatatgaaattgccacttgcgtgatttaaaacttttaaaaatcctctagtcaattataattagcatatgaatgctagtaaattaaatgttaaaaactctaattaacatacatatgaaattgccacctgtgtgatttaaaacttttaaaaattgtaagtatcacatataactagcatatacatgatttaaacttgttgaaacctctaataatcgtgcgtaattaacatatgccatacatcaattgatttatatggataatcaatacatccaaaatagtttacatcgtgtacacaataattacggcattacatcggcggtgacggttgaccgcacgtactttctcctcactattgttccctccttgtgatcgctgcgtgagtaaggggtgtcttcatttgataggaggatgctagggtcaatcgtcaccgtgaaagggggttgcccatccaactgatcgtaatcctcgtcagtcttgtcctcaactctgacgatttttcttttgcctgcgagaaccacttgacgcttaggctcatcaggccctctgcccttctttcctttgctagacatgtccttcacgaaaaagacttgcgttacatcattggcaaggacaaaaggttcgtccgagtatccaaccttgttaaggtcaacagttgtcatcccactgtcatcaatcattacgcctccaccagtcaacctaacccattggcaccggaacagaggaaccttgaaaggaccatagtcaagttcccatatgtcctcgatggcaccgtaatacgtggcagttgttccatcgtgtcccatggcatcgacacgaacagcgctgttttggttcgtgctcttcatgtcttgggctcttgtgtagaatgtgtacccattgatctcatatcccaggaatgtcgcgatcgacccagacggtcccctcgccaggaaggcaagttgttggttgattgactcgttacccatgagatattgtcgtagccacgcggggaaagtatcaatgtgatgccgtgtaatccatgcatcggacataccgatgttcctagcgcgaactagagccaagtgctcctcgatgtaaggagctaccaatgaagagtgttgcagaacagtgaaatgggctttacggaataaattgttgtctaccgtcattattgctttccttccgagagttccctttccccgtagtctcccttcatggcgtgattcaggtaccccgattgggcgaaggtcttcgataaattctacgcaaaattcgatgacctcctctgttccataacccttggcgatgcttgcctctggacgagcacggttacgaacatacttcttcagaacgcccatgtacctctcgaaaggaaacatgttgtgtaggtacataggcccgagaatacagatctctttcacaaggtgacaaagcagatgcgtcattatattgaaaaatgaaggtggaaatatcaactcaaaactgacgagacattgcaccacttcattctgaagggcttctaatctatccggatcgatgaccttctgcgaaattgcgttcatgaatgcacatagctttgttattgttgcccggacattgtctggaaggataccccttattacaactggtagcagatgtgtcatcaacacgtgacagtcatgagactttaggtttgtgaacttcttctccttcgtgcttattattcgcttgatattcgtggagtatccagacggatattcgtggagtatccagacggtacctttatgctctccaagcattcaaacatactttccttctctgccttgctaagagtgtagctggctggactcaagtaatggcttcctttctcctttggttccgggtgaaggtcgccgcgttgttccatatgcttcagatcattacgtgcttccagtgtatctttcgactttccgtatacacctaggaagccaagaaggtttacgcaaaggttcttagtgaggtgcattacgtcgattgcgtggcgtacgtccaagaattcccaatatggtaactcccaaaatatagagttctttttccacatcgccgcgtgaccatcttcgctctctatatgctggcttccaggcccttttccgaacactactttaagatctttaaccatagcaaacactgttttcccgctgcgatgtttaggcttcgtacggtggtcggccttatgttcgaagtgcttgcctttcttccgtaccgggtggtttgctgcaaggaatcgacgatgacccatgtatacaaccttcctacagtgcttaagatacgtactttctgtttcatccatacagtgagtgcaagccttgtaccccttgttggactgtccggataggttgctaagtgcaggccaatcgttgatggttacgaacagcagcgctcgtaggttaaactcctcctgtttgtcctcgtcccacacggggacaccttccttcttccacaactgtttaagatcttcgaccagtggtcttaggtacacgtcgatgtcgttaccaggttgcttggggccttgaataataatcggcatcattatgtacttcctcttcatgcatagccagggggggaggttgtagatacacatcgtaacgggccaagtgctatggccgctgctcatctctccaaaaggattcatgccatccgtactgtcacgtcctgataaattcatcccgaaataaaaatcattttctaaaaggaataatagaattaattaaaattcggaaagaaattggcaaacactaaaatacgtacaagaaaaattcgaatgtggcccggagaatttttgttaaattctccttggtctaaaaagagccctcaaattttacttgaattttcagagcaccggaaataattattaagcaacaaaaacaattatcaaagtttattaaaaagaaaaacctaaaaaataatcctcttctctttgggcca

SEQ ID NO: 21460 - DNA, 6751 bp, Oryza sativa
gaattcgagctcggtaccctagtgggtactctatttatggttccactagtatgaacttaggtagatgcttcgctggttaattaggcaacattaggtggttttataactttagactttgggaagtctcatatcattcggacactatggaattgttggtttatggtggaattggacatacacctctcttcctctttcaaaacccctaaaacctgttttcggtggggtttgggtgcatgccagttgtgggaagtagcaccccggccactataaggattaagctcgggcctctgttgcaaagcactaccgtacttccacatgtcttgtgggtaaggcttagtttgtggctcagtctggttataaacaaaagtacacggatggaggtggatgaagtcgggggtcgatggacattctccagggcaaatgaaggctacacgagctgcggcccggtagtcgagatgtcatggcacagggttggtgccctgctgctaggggctcagtcctgcctgcctgtcccggaggttccggccgtaggtgggattgggtcggtactcttgtctatggctaggatgggttggaaactatgtcacgtcttccgtccgtataccgtggtggtatgtggcacgtggttacacgtgaggaagatgtgtcttgtgggtaaagatgtacacctctgatcagagtataatctattcgaatagccgcgccctcggttatgggcaagccgagcaatgtacccaagtcagtgttctaattcttaaaatttgcttaacaactaaaatgtggaatggttggcctgggttggcttgggacgagctgggacccagggtcgggttgccagttcggtctgaatcatcgtaggccttgggttaaggcaggttcgtgtgggttcacggccttgattaataatactgtgtagctctaggattgtctttataaaatggctttgggcaactaagtgacttttaaatgctgtttactgcaaaacttaacccctatattattatccccttgtactcccttgcattaattatgcatctgccggtgtggcttgctgagtactgtggttgtactcattcttgctcaatctttcccctcttcagtaagagaagcgttggagaagatgtcttaggtggagtcctggcttataccccagttgagcgcctgtgaagatggagccgtaggcccgctagtccgctgctgtttatttttgattgccaggcctgaagcgcctttgtaataatgtaaatattatcgatataataaaaatatgtcttttatatcatgtttgtgtggtgtaccccggcttttcctgggacggggattaatacactagcgttcgggaaaaggcaattttcccggtcgcgacaagctggtatcagagccatctcgactgtaggataagccaagtggataaaacctaaggacatattttataaatgaaactatttgcgaaagttccttttcctcctttcccgtgtgctatttgcaaaatgtttactctttcttccgtcttcaaatttcaactagtactagatggttagttttgcgagagaagaagatgtcgccaattgtctgccgaagctccggaaggctgcaggattcgctagcgaagtggaggaagcagtgaagccagctgtgaagccgaagctaagatcttggagaacctgtcgctgaacctaagccaccctctagggtagagtcgttagtcgtgtgttccttgcttgtgtgtgtagtgcgtggtttgcatcggtgggttgtgatgtgaccatgctaggttgtttgtttaatcaacttgcagaataagcaaaacaaacaacacatcaacaaaaagagttagttcctttaaggtcttgtccctagctctggtctattctttccttgtatgcttcctctctcaacccctaccttgtgacagatggataacactggtaacaaaggctatgggaatgatggatccgatgactcaagaacccaagccaatgggaatgagaaaagcatcaacgaaacctcaccagagctaatccaaattgtggttaaccaaaccaacatgttggcaacagcctttcaactattacagaattggaacaacccagcaggggcaaccaacgttcaagtacctacagtccagcaacagtgcaagttatcagaatttctcaaaactgagcctccaacctttgccattgccgtcgatcctatggaagccagtgattggttgcgcacaatcgagaagaagctagggttgattcagtgcaccgaccaggagcgggttggcttcgcaactcatcagctggttggaccggcttcagaatagtgggaagtgaaccaaatgtaaagaaagtgaatccgagttgcttgttcatgagagctattcccagttatgaaccaagtgatatgttcgaagatagtctatggaggtcagattaaaatcgcatctaacaacgaagcttcagatttggcaggataacgatcagaccataacaagtccagcagcaaagtcatttggggagacgtcaaagcatgtcaagtgggataagttggttctttttagaaacataattcaaaggcaaagttaccgacccttgcatcgaatagcagaagtagctagcacctggagagcaggaaagctaatatgaggcagttggtggcaagttagaagtaaatgacaagcatggtatcctagtaatgacgagctgatctcgacgcatgacatgaagtgggtaacttgtatgaggttgactccaaagatatgaactatgcgaagttctggaactgaagccccatcttcaagcgccgcaacccagtcgaagtcagctaaaggttcaaccagggacaagtcaggcgaagagaagattccatctgcaacaagggatcgagccaagcagcctagagtggcgaagttttgctaggcaagtttgttataaaagacgcgacggaagaagtcagacaagaagagaagaccgcccaacctatcttcttgctagcctcctcgaatctcggggacgagattcttgtaaggggggtggatttgtcacgtcctcataaattcatcccgaaataaaaatcattttctaaaaggaataatagaattaattaaaattcggaaagaaattggcaaacactaaaatacgtacaagaaaaattcgaatgtggcccggagaatttttgttaaattctccttggtctaaaaagagcccttaaattttacttgaattttcagagcaccggaaataattattaagcaacaaaaacaattatcaaagtttattaaaaagaaaaacctaaaaaataatcctcttcctcctttgggccaagcccagcccaaagtctccctctcctccctctctttctctccctctccttctctccctcctcctcttgggcctcctcccctcccggcccactccctcctccctctctctcccgggctgcctctccctcctctcctcctgggccggccgctcggcccaagccgcgccccctgcccgagccgcccctccctcccgcgcacgtgcgttgcacgcgcgctgagcgcgcgccccgcgtgggacccgcctgccaggcgtttcttcctcctcccgcacagcttctctctcccccgtgcgaaccctagctcgctccctcctccaaatccgcttgattcacttggttaattccaaaattgattagggggttttaatccccattgattcctcttcaatttcccccaatttcccccttgaatggcgcccccaatcgtcgggaacgcccgcgttttctccggccaccaaccatggccgccggccgcctttaccgccgccgttccgacctcccccgtggccggctccctcttctctcctataaaatgcaaccccctcgctccgttctatcgctttagccccctcccgcggtctcccatggtccctagccacctccccaccgtcgccctctctctcccgtgccgctggacgcctccagccgcccctaccgccttgcccgtgcgccggccggccgcgccgtcgcctcctccagcgtcgccgccacctcctccaccccggcctgccctccgtttcccgcggagacccccggagctgccttcccgccgtcgcccttctctttcctccgtgccggccacctccagccgcacctcccgcctcgcccgtgcaccctccggctgcgccgccacctctcccggcgtcgcagctgcctcctctttcccggcttcgcctccgtttcgcggggaaatcaccggagacgcgtcctcgccgacgactagtggtgtcgccaccactccaccatctccagccatccctgccgcctcgcctgagcgtcggccgacgtcgccgtctcctccctcggcgtcgccgcatcgccctccaccccggctgctcctcggtttcgccggaacgccgtcgccgcgccggcctctccatcctcttcgtcgccggcgtcctttcggccgccccttcctcctccccggctcgtcggcttgctgcaccactaccacctccggcatcgcagccgcaaggtcgtcctcggcatcgtttcccctccatccaaacccctccgcggtccatcatcgtcgtctccgatcgttctcgtcgtcgacgtcccgtcggtcgcccggctcgtcgtctcgcggcgccgcctccgtcatcgtcatcgcagcggcgtgttccacgtcgtcctcgtccccgtgcagccgctgccggctgtcctcgtcgcctcctcgccggtcccggtcgtcgtcgtcgtcgtcgtcctctcgtcgttcccggtcgtcgtggcgttcgtccctccgtcgagccgttctcgtccgtcgtccgcgttcgtcaagtgagccgccgcagccccgtcatcgtcttcgtcctcggctccgcatcgtcaagcctcgtgccggccgcgtctcgccttcgtccaaggatcgccgccgaagtcgttccctcgcctcgccgcgtagtggtaaggacctctccctcgctgccccgtcctcgtcctttcggtgtcgccccgtacccgttgtgcggtcgtcgaccccggtacccgtgtaccggtgtcggtagtcgttcacgtgtgcgggtggtgaccgtgtagtgtccgtgttagtgtgttcgctcggtagccgcgtggtttccacgtgtgcagcccgcgtggtgtctagtggagtccgtttgtcggctactcgcctcggttgacacacggggtccgcttccgttgacccgtggaccgtctctgtgtacccggtctaccgcggtcctttaggttgacatgtggggtccgcatgtcaacagcgcagccttcctgtctcttccaggctagcgcttacacctgttttataattgcaaagcttaattataataatccgcaaatctccatataacagcattaaacctcggatgatcatatcttggtcatacgaactctgaatcgacccgttcaagtctcctaatgtttgttataacctaaagaaccctgtgctttctttttatgtattgttattgcttctttataggcttgtagctttgcttgtgtgcttcgcgtagctttcgtcgttccggaggttcccgaagcgtggttcgtggtcgtcgccgaaggttcggaaggccgttctctctgagtaaggcaagtcacgtcatccttgaacatattgaatcccagtttataaaattatgttgctttaaattattgcattatcgctttatttaaattcccgcgttatcactgttttatctagccatgcctatttacctttgttatgaccttattattgttgttgttattatttccttgttcaccctagaataaacaaaaccccaactagtgggtactctatttatggttccactagtatgaacttaggtagatgcttcgctggttaattaggcaacattaggtggttttataactttagactttgggaagtctcatatcattcggacactatggaattgttggtttatggtggaattggacatacacctctcttcctctttcaaaacccctaaaacctgttttcggtggggtttgggtgcatgccagttgtgggaagtagcaccccggccactataaggattaagctcgggcctctgttgcaaagcactaccgtacttccacatgtctagtgggtaaggcttagtttgtggctcagtctggttataaacaaaagtacacggatggaggtggatgaagtcgggggtcgatggacattctccagggcaaatgaaggctacacgagctgcggcccggtagtcgagatgtcatggcacagggttggtgccctgctgctaggggctcagtcctgcctgcctgtcccggaggttccggccgtaggtgggattgggtcggtactcttgtctatggctaggatgggttggaaactatgtcacgtcttccgtccgtataccgtggtggtatgtggcacgtggttacacgtgaggaagatgtgtcttgtgggtaaagatgtacacctctgatcagagtataatctattcgaatagccgcgccctcggttatgggcaagccgagcaatgtacccaagtcagtgttctaattcttaaaatttgcttaacaactaaaatgtggaatggttggcctgggttggcttgggacgagctgggacccagggtcgggttgccagttcggtctgaatcatcgtaggccttgggttaaggcaggttcgtgtgggttcacggccttgattaataactttgcatagttctaagatcgtgtttacaaaatagccctgagcaactaaatgtctttaaatgctgtttac

SEQ ID NO: 21461 - DNA, 647 bp, Oryza sativa
atatgttgagagcttgcgctcttgattttggtggagcctgggacaaaagcttaccatatgcggaattctcgtacaacaacagctaccaggccagtctacagatggcaccgtttaaagctctatacggccggaagtgccgcacacctcttttctgggatcagacaggcgaacgtcaactgttcggaacagaagtattagcggaagcagaagagaaagtcagaatcatcagggagagattgagggttgctcagtctcgacagaagagctacgcggataaccgtcgaagggagctaacttttgaggtcggagactacgtgtatcttcgtgtcactccgctccggggagtacaccgtttccagacgaaaggcaagttggcaccacgcttcgtgggaccatacaaaattttggaacgaaggggagaagttgcttatcagctagaacttccatccaatatgatcggcatccatgacgtgttccacgtttcccagttaaagaagtgcttaagggtacctgaagagcaggctgattcggaacacatcgatatccaggaggacctgacatatgtggagaagccggttcgcatacttgataccagtgaaaggagaaccagaaacaaggtcacccggttttgccgagttcagtggagt

SEQ ID NO: 21462 - DNA, 3222 bp, Oryza sativa
gatcccgggggggcctgtcatgacctgacagcattcgaaccgggattacggttggtaacacaaaccgggactaaagatcaaatatgcccgttacccttttgaaccgggactaaaaatcatctttagccccggtttttattgcatccgggactattgtggaaatcggccgaccgacgaaagatggtttctccaccagtggttggtgggtggtgccgtggtctagcccaccggttcagctcgggtcattaatagttaaacccaacgcggtgatatagtcccttctcgtggtttctttgagccccttgcaatttctactactacttacttttcctgtggagtaagccaaatcgcatcatcgcgcttggttcgacgaaacttcgacgaggcgcgttgtcacctttttcctgttccacgatgaaacggcagggatcatttgcgcgccacaatcgccaattatataagccgaggccacaccgccacagaagcaacggtaagcaagcccatccacaacggcaaccattgaagggagctacagtgtaagtagctagatacgcttaattaggcgactaggcgagtacgtagtggctgcaccgcgcagtcatggcgttttctgtggagaagtgggtagggttcgggtcagctatggctggcgtcggcttgctttggtcccgaatgccggagcacgtccatgaggaggctaggtacatcatcagtagcttggttcccatggcgatgtcctacttcaacccctacgagcagatcactgtgtccgagtacattgcaacggaacatgctgttcgacgccatctctgcctacctgagaagcgtgtgcttggatggtgcaagcaagctcagggcccagctccgcaacaacagcaatgacgacccacttattagtctggaggagaaccaggaggtcgccgacagcttcgagggcgcccgcatgtggtggaggctgttccccaagacctccaagaagagggggggcaccatcatcagcttcttgcctggggactcggacgagccgcggagcttgaggctggtgtttcacaagcgccaccggcagctcgtgctgaactcctaccttccaggcgtcgtccggcagtggcgtgagctaatcgctaagaaccgacagaggctattgttcaccaaccacgtcaaagacgggaagagcatgtggagcaatgtcccgtacaatcccccgtcgacattcgacttgctcgccatggaacctgccaagaaggttgagatcatggacgatctcagagcattccagaaggggaaggagtaccactccaaggtcggcaaggcgtggaagcggggataccttctacacgggccaccgggcacgggcaagaccaccatgatcggggctatggccaacttcctcgactacgacgtctacgacctcgacttaatatccgtcctaaacaatgccgacttgcggaagctcttccttgatacgaccgacaaatccatcatcgttatcgaggacatcgatgcgattgaggtcgagctcacaaccaaccgcaagggcaagaaggcagccaacggcgacgacaaacatgtggtgatagggctgtccgacaagaatcacgacaaaagtaaagtgacactgtcagggctgctcaacttcatcgacgggctgtggtcggcgtgcggcagtgaacgaatcttcgtgtttacaacgaaccacgttgaccacctcgacccggcgctgacccggcgtggaaggatggatatggacatcgagatgtcctactgccggttcgaggccttcaagatgctcgccaagaactacctaaacatcaccgagcactcactattcagtgaaattgagggactgctgagcgagaccaacaccactccggcagacgtggccgataaactcatgccgaggaacggtgaaatcggtccactgctcgacgagatcgacgaggaaccagtcgatcgtgatagcatcatgctgcgctacaaccggaagagacatgctgatgaacgcttggaaagtttagtggaaacactgatcatgaagagggccaagatgaattccgcaacatctcctatggaagaggccaaagaggaacaacctaacgcagaagaaagctagacaagggccccggtcggatatatatgtcatggtgactgggcttttgtgtgtggtggaaaatggtcagctaggctcctttttgtgtgttgctattttacctgattttcgtgtttgtttagtcacttacgcttgcataagtcataccctaaaatgacacaatatacaaatgtttagcacagaaaaataacaacgatatgtgtggggtgccagtataactaagtacataaaataaacaaaaaacatagggaacatgtgcttcattaatctcaaggttcataaatacaaattcccaaggtaatatgtatgtatgtatgtatgtatgtgcactctatagcttgtcgttggatagatctgaacttgaagaagtggtcctctggtttctgaggtctcgaaagtctcccagttaattacctccgcaggcctaggtcaacagaacacctccgattaagctgcttgtggttgtctcttcatattcgcttcacgttttgcatgcatgatgaatattggtgaagatggtggatatgtacgtgggcgctgacaatgcatctacggccagggtttgcagtttcgaaagtgtgtattttgccaggggaggcgaaataactgcaatcgacaaaatttcagaaatttcaaaaattttcatccgaaattttttgaattaaatttgaaaattttgtccgaaaaatccgaaatatagccgaaaattccgaaaattcggggacaaatcattttgcaatcaacagaaggataattgaacattcgatcaatcaataattgccaaatactcattaattgtccaatgactaaagtatttacctcctggtggggctatgtttctccctcgcccaataccagtctcaggattgccgccctccgttccacttccaacagctgctgctgctgatccccttccccttccatcttccgctcgtcttccaacaactgctgctgctccccttcccattcccctgctgaaatcagctccaattattgagttgcatgcactgaccagttcaacccaaaagcttaagctgatgaggaaaatgcgggcaattcactttatattccaacactccccctcacgcgaggcccccttaagcctctagcgtgga

SEQ ID NO: 21463 - DNA, 1931 bp, Oryza sativa
acattcgatcaatcaataattgccaaatactcattaattgtccaatgactaaagtatttacctcctggtggggctatgtttctccctcgcccaataccagtctcaggattgccgccctccgttccacttccaacagctgctgctgctgatccccttccccttccatcttccgctcgtcttccaacaactgctgctgctccccttcccattcccctgctgaaatcagctccaattattgagttgcatgcactgaccagttcaacccaaaagcttaagctgatgaggaaaatgcgggcaattcactttatattccaacactccccctcacgcgaggccccctcaagcctctagcgtggaatagaagtgggttgcatgcactgactagtttaacccaaaagcttaagctgatgaggaaaggtaggcaattcactttatattccaacactaatagctgcggcggcggctgatggaccagggcaaccatgacccctgcatctcctactgccagcatatgcaggaccttcttctcccatgcccacagtgcacactacttcaagaacaggacaagagcagagtaactaatcagacagtggcgaagtcgaaaattgagagttgagacaccgaatcagtaagaatggggatggagaggcaagaaattccaagatacataccgctgccttctcgtcgtcgacaaccctctcgccaagttaccggatccaggagcaactgaatgccaccctctacaggaggagcaccgccgccaggagcccgaggggcagggatggctaatgcgctgatgacgtggactctacgagggagcagctgagccaccgcggccacctgtaggacgagcgccaccgtgattgaggtgtggaggtggcagcgtcacgtaagaggatttggcgccggaggttaaggttttcgtctctcagcggcgctgtcggggaaaaaatgggttagggttagggttgtgggggtagtgagggccttattagcaaatttttttaaaaattttttgtccaaatttttgaccggcattgacttttgccggaccccactagcaaaaccgaaatttttcatccgaaattgcaatccatgtctacggcctcatcactccatgcgtcggttattgttattcatactatcaacatgtgttgcatgggttactgttattcatactattaacatgggttactgttattcatactatcaacacgtactcagaccttaatatatacatagtcaatataataattttatcagtaacgtaatattcatggaagatgatgacatcgtagttgaaaattatagtaagagcaaaacctgagatatgttatctacattaagtttttttaaaaaaaataaaattaccgaggaattggcttctaagattgctggccattgcatacttgtggttctcttctaagaagaagagtactagcaattctaatacacaggagatccttatattattgcgtcgcctcactgcttctgcttcgacacgttcagctggttcagttgctttgccctctacacaaactggttctattgttcctggttctcagacttccaatgagggatcctcatctgcttctggtacttttccgtggattcttgattcttgtgtttctttccatatgacccctgataagtcttgtctttcatctatatatcatcctttagtccttattactgttcaaattgccgatggtacccctctttctgttgttggtcgtggaactctttcattttcttcttttagtggtcgttctgtttcctatgttccaaatttgaccatacagctcatgtctgctggacagcttgctgatcatggttgtcgtgttatttttgattctgactcttgttgtgttcaggatcgacacacgggtctcctagttggtactggccctcgccaccatgattctcagcgt

SEQ ID NO: 21464 - DNA, 6405 bp, Oryza sativa
ttgtttcgaaagggggtaatcgctactatatcatttttatagatgatttttctcatcatacttggatttatttcatgtctcatcgcaccgaggttttggctatttacaaatcatttgctcgcatggttcatactcattttgatacacccatcctaacgtttcgtgctgattcggctggtgagcacctttctcgtgagctgcgtagttttctttctgagtagggtacacttccacagctctcttgccctggtgctcatgcacagtatggtgtggtggaacgtaagcatcgtcatctccttgagactgctcgagctcttatgattgcttcttctgttcctcctcatttttgggctgaggctgtttccacagctacatacttgacaacatccaaccttcttctgctctttagggtaggcttcctcttgagcatctttgtggtcaacctcctgactactctaatttgcgtatgtttcggagttcttgctatgtgcttcttgcaccccgtgagcatacgaaattgactgctcagtctgttgagtgtgtgtttcttggctaaagtgcggaacatacgggttatcattattgggatcctgtagggcgtcggatgttgatttctcgggatgttacgtttgatgagtcttgtcctttcttttcgcgtcctagttccacatcttctcatgagacctctctctcattcctcacttgtcctgatgcccctatttgtactagcatccctctttcagtatcttcctctccagtggagcctcttccagtggacccttctaatgagactcttgcatcttcctatgtgcctcctcttactcaagtctatagtcgtcgccctcgtgttatggagccttatgttgatgcttctcctattgctcctccgagatacaatcttcgggatcgtaatttagttacgatttgtccagaggatcgctatggtcgctatgcttatgttgctactattctcgctgaacctagttctcatcaagatgttgatattcatcaagaatggcaacatgtgatggcagaagagcttgctgcacttgagcgtactggtacttgggatcttgtaccattgccatctcatgttcgtcctatcacttgtaaatggatctataaggtcaagactcgctctgatggaactcttgaacgctataaagttcatcttgtagcgcgtggttttcaacaagagcatggtcatcatgagacttttgctcctgtggctcacatgaccattgttcgaactcttcttgcagtagcctctgctcgtcattggaatatctcctagcttgatattaaaaatgcttttctcaatgaggaattgcatgaggaggtttacatgcgaccacccctaggatattcggttcctaagggtatggtttgtcgtcttcgccgctctctttatgggctcaagcaagctcctcgtgcttggtttcaacggtttccttctgtagtcagtgcagctggtttctcggccagtgcttatgatcctgcactttttgtccatacttcgcctcgtggtcgtaccattctttttctctatgttgatgatatgattatcactggcgataatgctgattttattgctttggttaaggcacgtctcaatgctcaattttctgatgtatgatcttggttctcttcgctattttctagggattgaggtttcctctacccctaagggtttttatctttcctaagcgaagtatattcaggatcttctggatagggcttctcttactgaccaacgcacggttgacactcctatggaacttaatcttcatctttctgccactactggtgtgccattagctgatcccactcgctatcgccatttcgtagggagtcttgtttatcttgctgtcactcgtcctgatatttcctatgctgtgcatattctgagtcagtttgtttatgctcccacccaacttcactatagtcatcttcttcgtgttcttcgttatcttcgtgggactatctctcgttgtcttttctttactcggtccacatctttacaacttcaagtgtattatgatgctgcatgggctagtgattcctttaatcgcaaatctctttctgcttattgtgtttttcttggtggttccctcattgcttggaagactaagaaacaaacaacagtttctcattctagtgcagaggctgagttacgagctatagcccagcagatgttacttggttacattggttacttgaggatcttggtgtttctgtgacttcctcgacctctttgttgtcggacagtacaggtgctaattagtattgctcatgatcctatcaagcatgagcttaataagcatattggtgtggatgcttcttacacacgcacctaggtacatgatcaggtgattgctcttcagtatgtgccttccgagttgcagatagctgatttctttaccaaggcacaaactagagctcaacacacgttctatctttccaaactcagtgttgttgattcaccataagtttgagagggggtgtgttagatgtatatttagattttatattcctttatttgtaaagggtttttctgcatatttgtgtattcttgtacctgtatatatttaggcgttttgccctgaggtgaatacaagtgttgttcataacaattcctaatgcatgaagatttcatcgcatttgactgcacccatccacgatgaaattgatttctctctaacaacttgataccctcgattcaaattaattgaactgctctgctcaactcctcttcatgtttgttgcctgctgcagatgcatatgtgatatgcaggtcccgctgcatatatttggccaccgagtcgcccggggcgcacaattaactgtatatgtcaacatctaatttcttctatttactcccttgctttgctttgctctttgtagatcgatcttccatcacacgtcatgaacaaactctcaaagctatcaaatgagggcagccattgttccgctgctaccgcaaacctgggcaagacgaggatgccagccgtgaagtcccatggagcagcgttgaatctccctgttgcatgcgtgcaccgtcgattttagatcagtggtgctgattgtatgacatgttaaattaactaggaaggtagcccgcgcattcgcgcggggatgtattgtacacagggttaaacttttcggtttagccgatttgattgggcatcagtgcatcaccgaaataccgaaatttctgaaattttgaaaacatagtttagttgaatttgaacaaatattaccaaaattcatgaaaagttaaaaaaattcggccaaaataatatcatatctgaggggtccgaaatgatcgaaatttctgaaatttccaaccttgatttgtacattgcgtttgaaatatatatatatatataaacagaatatcaattggttgacacctcccatgtttaaaagtacttttttatttttttatttgaataagacacatcaggtgaggcctccgctgttcttcaatattttgctttgataatttttccaagatatttgttaggttctaaaatatatcaaatttgatacatctatataaataattatctacaatctctttattatatataagaagttcgatttagtttgtttggaaaacgtgtctaacaaatcaactgtaaattagaagtaaggtgttttgttctttttttaacaaattctaaagaactatatttttaataaatatgttttatttgtaccatcaagtagttctccttttagtaggtttaagttgatgcgagttgttacatacttatatataaattaatagagacatgtcatatacctcgcttcgttgtgacctatactatctttttcaaaagaatatacctagttaacatgaatccaaaattttaaatttagtagtaacaaatataacttttcaaagaactatatactgcgaaccttagtgcggtttatatatgtaaaaatatgtggagaaactcataatgcaataatataggatagatgtaaggccattaatgtctaagcattttaaaattgttacgaaaatggaacatgcaatggttggtccaattttagtgaaatgtaagaaccaatttttttatgaacgtatcacgttttctcaaaatagtttaatttagtccctattgatattttctattacctgctttattttatattttatacagttcaaaatataggctttatggatctttaaatcattattctaattataaatacaataatatttagattagaaatcagatgagcttgaaatttatgcatttttttaatattttgattatttttggctgtataaacaggaagggatagagtggagaagggatgtgacgagtagtgtcgtgttgtgcgtatgttctgggggagggcgaagtggaggcgtggatttttctattttatctaaatgatttaagtgaaaccgttgatatattttttatcacattttttttattccaatttttaagacataacatattgcggcttaagacattcttaaatgtatatctattggttgaaaataatagatctacctatttaagtggaaactgatggtcagatgatttttcttccaatttgtaaagttttatttttatttaaggcgtaacatgtgacgccttaagtgcgttcagaggatgtacaatgatttacgataatatagtactcattttcattttgtattatggtttgtattttttctatttggttaccatgcaaaggaacggtgtctatagagtgaaatatgggtaacatggatattaaattatctatttaattataaataaaataaaaattcaaataagttaaaattatgattcaactttagaattataatcatttggctttctaattattgatctgtttttacttagttaaaaattaggagacaaaggaattaaatgagtgaggagaggaagagagagttgaagagaggagattatgcatgcatataattgtaataattcccgagttgtagtgttttagtttttattacttttttaactgaaaattaaaaaaaaatgatttattgatcgattaaaatctatagtttttacttctcttttccagtatattcatagtagatattaaaaatgcgaacactacaatctaataatctaataatactattttgacttattctaatgttataatgggggagtagttttttaaagcattcggtcattttactgttatccatatagatctaatttaattattccgaagtcatatatggtgataaaatatatatcattatctttctattattttataattgttcgaatggcacacaaaagtcagaaaatatagccctaaactgacatatttcttctcaaaatcgatattacagtggatatggatcttcaaatgtaaaataatctaaagacgtaagttcatcaaataatattagtagtgtgagtcagatgttatagttcttattttgttgcataagttttgctttctaactaacatattttgtaaacattactcatagtatattcattttactttcatgattgtagacctaatttaattattataaagttatgcatgatgataaaatctatattattgtcattattttatatgtttttataattgcttgaatggcacgcaaaagacagaaatataaaccaaaatgacattttttttcaaagctaaattgtagtgaaatatggtcttcaactgtaaattgagttataaataatctaaagatttacgctgatcagaaattagttgtatgattaagaagcttaattgtttaacacgatattattgcttatctaactaataaggcatgaacataggagaaggaataggtgggtggataaatgaattgaagtaagaggaggcgtacatacgtatattcgtttttgtaaaaaaaaattaacttatacatacaaagctctttggtaggcccgagtttaggaaaggaattttttcttgaaaattaatctaatgcttgtaaataatgggttcaccaaatttaatgaaaatatgttttgttattttagaattttaagaatttcactaatttattagagcatcagatgacaacttagaagcgtttggcgaattaggagcatttttggaagtttaatgggctttaagacatctaacctaatgttgtaaaacatcaattgagtccaccaatttaaatgaaaattgatggtgatatttatgtaaatttatagagtattatgtttcatctatttctatatgttactacgtgtaagtatatatatgtgttcttccggtgtttctctgatcatgtattacgtacgtacaggagtatgttctttccggtttatctgatcgtgctatactcacgtatgtactcgcatgtcttttttttgggtgaaacaatagcataaaaataggatcagaaaaaggaggaaaccc

SEQ ID NO: 21465 - DNA, 2284 bp, Oryza sativa
agagctcctagaaagtgtccaattagtatataggtatagaggtatgatagatagatagatactccctccgtcctaaaaaaaggcaaaccctggatttccgtgtccaactttgactgtccgtcttatatgaaatttttttataattcgtattttcgttgttgttagatgataaaacatgattaatattttatacgtgacttgtctttttaatttttttcatatttttttcaaataaaacgaacgatcaaacgttggacatggaaaccagggtttgtctttgttttggacggggggagtagatagatagatggattgtactggtgtcagaagacccatcttgaaaaaaaaattaatggctctgtaattttcagttctctagggctgtctttagatttaaagttaggatccaaacttcagtcatttttcatcacatcaacctgtcatacacacataatttttcagtcacatcatcttcaatttcaactaaaatctaaactttgaatccaactaaacacagcctaaacacagcctaggttctattctaattttcaggatgttacccgcacaacagggagggaagtagcgggcagatggaggcactgggcggcttgtccatctcgtcttgagccgtaggccttgaatgtataattgctttgattttctcctcctccggtcgccgatctgaggtcacctgcgagtgcgactggtctggctggtgtccccaccagttggaccctcagtgcctagttgcttaattaattacagcaattaatcttctattttttctcacctttgttggccggccgttccatatgtttattttatcgcgatgtttctttcctatgattcatttctgttttctttggcaatttttaaggaagagcgatctttgtctccaagcgtttctgaacatgtgccagcagcttccgttctcgggttgccaaacctcagatgccgtcatcattgcagctgctcgattagggaaggagattcaaatgggtttggttaggctgaggtgttaattaatcaactgaggctgcaagttgggttgagtgtagaagagtcaattgcgaaatgttgttccccatttcactcgttttatttttttaaaaaaaaattgatacacagggaacgttaccgataaatttctctaacaacaagtcaataagtccaaagataactgaaaccgtaaaaccattatgttccatagaaatctaaggtatatctatgggagataatagtacaagacctctaaaagaaatgattgatttctatcgattacttcgaaattagcttttcgggaaatttccaaacgaacaatttcaacgaatctttcaatttcttattttattatgttcaactttatgtattcctctatccgtagagtacattgaatgtacagaaaaggctataacatagtaatttcgagaaattcctacggaatgattattgtataggaatttcgaaagagaattagcatgaggtcttacattatgttttcttctttcaatgtcttgaattctattttttctgtgtgactatcaaacattagttttaaagtgttcctgtgttttcaaatcccctaggaatccaataaatatgatattctatttttatatttttcctattcccatgatttgataatcatgcgttcaaaagtgatcctgaacttgtaaaattattggcccatttttcttttctttaatcccattacaacacttgggtacgtccctagtaaaagttcgagcaattctgaaccaaaacaaatcgttagctagctagctagctaggatgggtgataaaatatgggtctctctctatgtgtgtgtgtgattttttttttaagaacgtgatgatgggtctcaactcccgcggtctcgcccgcatagggtgtggctaatgcgggagcgatcacccgcacgcccctaccccctatacgcgatcacccgcacgcccctaccccctatacgtacggatctcccccttcctccttccctcattctcttcctactacagtaaactataaaaaaatttaaaaaaagttgaaaaaaattatgtataaaaatactatatataaaaaatatttgaattcaaatttaaatttaaaacgtgtatataaacttttgaccagagccggtcctagggaggcgagcggtgcggtcgctctggcccccaaatcgcagggccccgcgccaaccccaccccccccccttcggcgcgcgcggcgcgactatgtggcgttagggcgaaagcgaacagacgccgaataccccactcgcgagat

SEQ ID NO: 21466 - DNA, 4581 bp, Oryza sativa
ggtgtaggtggctaccggccaggcgctgcacgggcaccccgccacccgctgcttgcttgcttgatggcttgatgcttgccgccggctgccctagcccctagagcactggatgtcttgacgaggactcgagaaggatgggccgaccgccgacgggggttagtgaatctgaatactgtatttgtctgatcagtgatcaatcaacaatcattctattaaggtgagtgtaacaccaatacatcgccatcgccaagtgaaaaattgaaatttttgtaacattgtgattttatttgttaacatgtaatctcatgtgttggtttttgctgtgtattgatgtatggtcctatgttaggttaatttaattgttccgataattggacaaaccgacgaaggcacaaatgtttgaagaaatatttgaggtaacatgtactataatgttttctatataaatattttttaataaaattttaatatttatacaataatttatatataaagtatatgtatatactaattatatgataagggcctctatatttagtttcgcaccggggccctaaaaagtcaggaccggccctgctttagacttataaattttcggtctataaactaatatttgaattcaaatttaaatttgaaacgggtatgtaaacttttgacttataaactttagatctataaactaatatttgaattcaaattcaaatttgaatcgggtatgtaaacttttgacttataaagtttgggtctaaaaactttaggtgtataaactttagatgcacagaaatactatatataaaaaatatttaaattttaaattcaaatttgaataggatataattcaaattcaaatttaaaatcagcacctataatattatgggtgccggttctacaccaaaaaccaacacctatatggcactataggtgccggttgtacacccagaaccgacacctatattattgtaaccaacacctataatattacaggtgccgattttttagccgaaccggcgtctattctcctcgctggcctatatgatgcaaactataggtgtcagtttggttaaataaccggcaccattgatatatgtgccggttttttcgcacggccgccacctgttgtattttaggatagttggtgggaggattttttgtgccaccaatgtccctcccaacaaaaaccgacaccaattaaccgttataggtgccagtttttcactatattggcgggaagtgtcttataggtgtcttttttagctaaccggtacctttgtggccgacactaatggttgtttttgtagtagtgagatttgtaaaaatactagtggaagtcacgggcttgttcactttgctaccatttttaaccttatcaagttttgacattgccaaattttggtaaggttgccaaaaccaaattttgatttactaaaatttgacaacaaactaagcttagccaaaatattggtaactttataaaaaaaatggtatggttgaagacgatgacatcaaagtgaataggccccacatcttgaagattaggaaaaactaaaatagattaagtaaaggtagccgttgatgtaacaatccatttgaccctgtaattaatcttatccttcccatttctatacacataaatcatttgtttgacccatttattttttatacgaggttatcaccacttcttgccgaagagaaaagttctacgaagctccaggtatatatactcatatatgtataaaaattaccacgcacgccatccaggattccataagcattgaccgctctgccgtgacgcttaattaggcttcgataagcattaattgacctttccttcaccgttggcgtttgtatcactctccacctagagccacctactcccttatggactatacagactatagtcaaaataaaccttactaaattagtaatattgctaagttttagcaggattctttatatatttatcaaagtttagtaaaaaaaataaatgtatgcatatctttgacaacttaaaagaaatatagtttaaaatggcatcaatctgaacaatcccttattgtattagtcatgcaggtggtgcatagcttgatgtgcaaagtactggatggcatcgacaaacaaccgatgcactcatttttcctagagcaagtataaggtgatgtaaatggtttgtacaagctagttgtggcatcatatttgtgtttacatgatgtagagagggagggatttagagaaaaaaagcgggctataaattgtaactagctataacacgagctccaataaactgagtatgtgagagataggtggattaagtattaatgatgcagtatagatgtataactaaatatgcatgaatatactattaggtcgttataactgatattttaatttttggagctgggagttcactgtattattaaacttgctcttaagcacatcttgagaaaaaagtcctagaagatttcgagcgcccttggatgccaccactggtctactgtcgtcacccaacagctgtgacgtgctctgttttctggtgcgttcgttaggagatgtgataagagtggaaaacttgctcgcttctctacgcgcatgattcccaaacggttaagcgatatgttttttattaaaatgccgcacttatccagtcgtgttcacctatagatcttgtcgttgctgtttctctctctgtcggtactacattattgccagccacattcatgctattatgactttcttcattaccaacctccaccatctatggacgaagacactattcattcttggtctagcctaactatgctcctgaaccactcatataatattgagacaatagaatatgaatataacaggaaaattctaatttatgtcaataaaatggttacctattcagaaatgatggataggatttgtatttatgggctaaaataagtttttttttaatttctagctaattttagttgtttttccatttacaatattaattttagcactatttgatcgattaaaaattattgtattaaaattattaaataattttgtcagggttatggataccacctacctaatagtagttgactaaatctcggaaggacccaccacataccatgtcctatatggaaacaacctgtggatataggaggagttccggataaggaaagataatcagagttctacatggaaacgacaaggactactcggattatatccatattggtttccctagttcaacttggacaaggggacacctatgggtataaatacaagcccccttaggaggagagtggggacgaggcaatcaacacccaacacaatagacatagaagcctacatacgccaagacacgtcgccggatatcgacttcagggataggcatggctagtcccctacggtgtctctagatactgtcaggagagacgaaagcactatctctgatctcgccaggcacggatttgaggaggaaggctaccctgttgtcgactacgagttatatcatcataccgccatgtcgacaacagttagataggctaccccaaatattatactggtgtgattatcatgaataagagcaataccggcttcggccaacaggatgtagggttattacctgacaattcaggggcccgaacctgtataaaaatccctgtcttcatctcttttacctcggtctcgcgtatatcctagtaccaatgatccccataccatgcaaataccgtagtcgagacatcaaacgtcgacaaatttgaattatcgtttgggccaaagttatttatagtttcatgttgttatttttattattatatttccttcagtcgagttgtgatatatgatttaggattttaatttaagcatatttctttcagtccagttgtgatatgtggttcaaaattttaatttttgtcgatgaatgttatttagattccgttgtaacgcacgggcattattctagtaagttaaataaatggataatttgatgtgttacccacttatttaatctatatataagtgataggtttgtgagatgacccaccgctccctctcttccgttaggccttgttcgtttaatccccatgagggaggggttggaagggatttattccacacctattgtggtatggaattattctctctcaatccctcaaatcctattcaattccctccagactccaaaccaaacaagaccttatagagataagacatgctagccccaaactcggaaccggatcctctgactttgcttgcaaagtcacaagcgtgcagttgggtttaaatccaccgttcgttgcatccaacggttctgccatgcactaccatgcgggctgcgacctaattcggcccaatagcacaaatgcacgatgatctattcctccagtcctccggcaagggcagcgccgctggcgccgtggcggctctttcctccgatgctggcgtatcgtgctcgttcccttttctgtcgcctccaccttcaccttcaccttcaccttctccttctacacatccacacacgcgcgcgtacatgtattgcatgaggcatatcaattccagcctcgtcttccaattgaccgtggtctcttggttaagcagctt

SEQ ID NO: 21467 - DNA, 1644 bp, Oryza sativa
gactggtagtccgcacggccatgcgtgctgcgactcgctatgcaagccgggaccgtcagatgcaacagacggtggatttggaccatagtagaaaaaaccggaccggtcattgatccggtggagtgtttggttcaccggtctatcggttcaaccggtgggtcactggttgaaccacggtttattggctaagtatattctgtgttgtcttctagtcaaaacagctaacttagcctagtggttggcaaggtttgcatctatcctaacagcctggggtagaatcccacctttgcaccatattttttctcgcataaaaatcaagttgggcctccagtcttacaaggctcataagaaatatacaagccagccggtttagggtcacccggttcagcggtttcgcgcgaaaaccacccggttcagccggttcacaccgggtcgattgcgtgaacgatcctttgagggaaccgagccggtcagggagctggttccggttttttcctgttgaaccgccggtccggtccggttttttctactatgatttggaccccgactgcacgtccgtgactttgcaagcaaagtcagaggatccggttcccctaaactcatacctgccgggccctccaccttccagcgttgtagtcactatgtactagagagcggaataaacctctataaattttaaaacaaatgtatatgtttctataattgtttaaagaaatataaaaaactcagaggtagcatctcgtacttagaccgatatacaatctgagcgaaaaagctattgcgtgaacgttcccggaacaagttcacgcgaatgccgcttttccggatcacatatgtgtactaaccctagccaggtcgtggtaatttcaaatcaccaactgattagattctggagatatacgacatgggccttgtgggccatagtttaagttgagatctttatcttatttttaattttttgtttcttttgtgaaattattttttcttctagtttgttatttattttgtgatcacaaaatatgtactcatttttcaaacatatcagcaaaaattatgtttgaattttttttctattatttagagaaagaattttatatcttatataaacttatcatgtggaaagtatattatttattaataaagttataggtagaaagattattattctactttggcccatttaagtacaatagaagttttattaaatattttttcgctggacttattttttttattgtttaaaattcactcatacttttttgaaaaaaaatctatgttgaaagtttgcatatgcaaagtttatatataacaagacataaaactactatgcataaagctagtatatgtaaagtttatacagataaagttacatgtatgaaatagaattgtttatgttggattttagtctaaatgagaaaggaaaaggctgggatatgctagtgggcccatgaaaattttgcatatacgtggactatgttgtgggctggagtagagttttgtgagcaggttcagatacgcacggaagaaataggtagcgtccacgcgtttgctccacacgaccagtcgcgtactagactcaccccaatctgggccaggagcctcataactcggatatatatgatggggctggggatcctctagagt

SEQ ID NO: 21468 - DNA, 839 bp, Oryza sativa
gtctacgtcttcccggccggcctgcttctttccccgccgattggtgcctccgctcctgcgcctacacggctggcctattatgccgccgctattgggcgtctacgacttcaccaccggcctgcctccgtcgccgccgattggtgcctccgcctacacggctggcctattatgccgccgctgttaggcgtctacgacttcaccgccggcctgcctccgtcgccgccgactggtgtcctcgcctacacggctggcctattatgccgccgctgttgggcgtctacgacttcaccgccggcctgcctccgtcgccgccgagtggtgcctccgcctacacggctggcctattatgccgccgctgttgggcgtctacgacttcaccaccggcctgcctccgtcgccgccgattggtgcctccgcctacacggctggcctattatgccgccgctgttgggcgtctacgacttcaccgccggcttgcctccgtcgccgccgagtggtgcctccgcctacacggctggcctattatgccgctgctgttgggcgtctacgtcttcaccgccggcctgcctccgtcgccgccgagtggatcctccgcctacacggctggcctattatgccgccgctgttgggcgtctacgacttcaccgccggcctgcctccgtcgccgccgagtggtgcctccgcctacatggctggcctattatgccgccgctgttgggcgtctacgacttcaccgccggcctgcctccgtcgccgccgagtggtgcctccgcctacacggctggcctattatgccgccgctgttgggcgtctacgtcttcaccgccggcctgcctccg

SEQ ID NO: 21469 - DNA, 9905 bp, Oryza sativa
atgaatttagatgaatttaggatcaagtttcattcaaatcggagttaaaatgaataagttatgctagtgtaaggattcaaattcgaataattgcgaaacagtactgttcacatccgatttattttaatccgaaacctatctacagctcagagtcactgacgggtggggtcaggggtcttattatcttttctaccgaattatttttgttagagaaaaatggggagtgggcccggcttgtcagtggctcggctgctctctttctctctctcgttcttttcctatcgtcttctacctccagaccgtgcgggagcagcaggggcggcgcagcgcgcgcggcaaggccggcggagggcgacccgacggcgaccaggggagggagcggcaaggctccggcgtccacctgccggcggtcacggcgtaagacggcgcgggggcgagcagcgccgcacggccgccatggccgggcacgggtagctaggtgctagggcgatacggagggtttccgaccaaattggtgcgggcgtgagcatctatgacgtgtgagggttccattttacttattagatggctaggaagagctccgggatggcttgtccacggcaagctcgccggcggcataatggtggccgggccagcacggctacgggcgctagtcgccgaaattgaaggaggctcgagtttctacggaaccaggagagacctgaggagcgtggacttaccgatagacggcgggacgacgaagatcgggtgcagtggtggagcggagaagaaggtgcagcacgcccacaagatgctcgatgaaatgtatccgaggaagaagaaaaggaagagaggggaggacgagctcgtgggggctgggaggtgtggggagggaaggggaggcatgggtttatatagggggcggaggggagaggtggccggtgcagtgatggcggatgggacgcgcgcggcgtgcggggctcgaggcgagcggcgacgggacatgagcgcaggcgcagcgcggggctcggcgcgatgatggcgacggcgcagcagctgacggcagcggcgcggggctcgagacgagcggtgacgcgacggcgacacgcggcgacgcgacggtgacggcgacagcgcgacggcggcgcggggctcggcgcggcgagaacgacggcgacgcagcagcggcgcgatgggacggcacgcggcgcggcagtgcacggggcgcgagggcgcgtaggcggcagagggaggtgggacgggcgcgcggcggggcaggggcgcggggcgcgaggcgacgacgtgacggcgacgacgatggcgcgcggggctcaaggcggcgacggcgactgctcgacggcgacggcgatggcgcgcggcgcggggcgcgagctggcgcgcggcagcggcgcgggcgacgacgatggcgacacgagcggcatcaggcaggaggaggaggagggctaggacggctaggaaccaaatcgaacacctagggtgctaatgaacagtgctagccggctatttaaccctattttagcatatttcctatataaattttattctataaatcctaatttttacacaaatgaagtttactcaatatttgtgttattctaaccaatggattcaccctagattaatattacccatatttatttatttatcgcacaaatgaattctttttagattaatttgagttattggccctaaggtgaacttgtatatttttgaagactttggggtactattacatttaatatatcgacttgtcatgattaatacattagcagattggtcaagtttagttgtatagcaatatattttacacggataggttcaatctatttattctataaatagtaaattgagactcggtacaatatcaatctaattgtttaattaaaactcacatattcttatttatatataagcttaatgtatttatatgaccatcattttatatgagtgaattttatgcccagaaagatatgttaaatattaatgtaagtattccaatgaaatactcatctacaaataggattactatagtggtgatcatcatttcatgtggataggttgtccttttaaatcggttttacctctatatgaatcattatattttaatatttgacctataaattaaattagtaattaaccttctctttgtatggctttgttgtggtgcgtaattatttatagagttcataataaatatcttatttttataattgttactcagttgtatagctttagcttaattttcagtggtgacaatttatagttcggcaagcaataacaaccataacttccagcatgatgcaaaagttttaaaaagttcaaaattttagtgatttttattgtcttgaattttcaggatgttacacctagctccacaaatcccacgtgaaaaataaagatcagaaccttaaatgacctttacaagttctatgcaaaacttatgctgagcaaaaattatagtctaaaactaatttcaattgtgtgcaataataatgtgtagtccaagggtgctactcccgccccatgccgatcgatgtcattaggtatctaaaaaccaaattaaacacaagagtgagtaaagaatactcagcaagtacaatcttgaactagtaaaacatacgcatgatttatgcattaagaaaccaacatgaagggttggatttactttatttttaaacaaaagaagtcaaaagatagtagttccctcccgggcaggtgtgaatatcctcttagcattaccggtaagccgagcaagcgtgatcagcgcttctcaaggatcatgaataaagatccaaattgcactcccatggctacgcatggttcttgaataatgtaaacagaacatccggaataatgaaacatgaatttgaatatgggtcgaaacacgaataactagcataacgtcatagccatacaatcagtaataacaagcaattgaataataattatgcaagtaaagccaaacaaaacaactcagttttgtccatcatataagtccgtcttgtacttgccttaactcattcgatactccgactcaactcctccaacgttggaaccctccacacctgtggagcaaaactacgcataaaccactatattcaactaatgatggttacaagggatatttagtaaaatcgaaacctagaacatataaaccttttaccgatttgtattaaataacctatagctgttccattactgttttatgagtaactcacaaaccgtctaacggaaactagcaaataatacaacttcggacatctagacaaaattgtctacaactttcatgttgagcacaaaatcagattatgcctctgaaaatcccacattaaggaaaaacgaactgctgtcctgatttccggacccggtcagcagtactgtttttgctgtttctcctaaaccgttgatcggaatcgagtgaaactagcagcgttggaaagatattgacaatgactacaaactttatttaggacaactaacctgattcctgatggtttaataccagatttgaaaatacggtttcagcctagcgttcgatataaaataaattcgaaaaaaccggaaacagatcgtcttaaatataaattagaaacaactatagactaaaacggattacctagcagtactaatgtataagaaaaacgaagaatttggaaatattcaccaaattccccaaatttcccttcttctatcaaatttccccttctttccttccttcctgttcttctctgccttctctccctccttcctgttcgttgcaggccaacagcagcagcagcagaaacgaatatcggcagcaacagcaagccgtacaccaccaccaaggaagagatcagatcgacaatagcagggttcggcagcagcagggaaattaacagaaacaacagtagctcaccaacgaccggctgcggacgacgacggctgtggcgaccggcgatggctgcaccagcggcggcgccggcgaagagaggaacagcagcggcggcggcagagcgcaggaggtgcggcggctagggctacaggagaatcgctcctgtttctttttttttcgtttgttttttttttggttggttatataaagagactagataagatctaacggctcacatctattcaatcctcgggacttcgttcggactccgattactataaatttatagtctattttgcactactcggcgagctctacgcatccacggttcccgatcgcctatacgaacaatggtttaaaagttgaacttttgcgcgtttgctctaatattccgcgagatatattaatttaaaactcggggtattacattcttccccccttcgatcgaattcgccctcgaattcgcccaatcatactctagaacacgggatatttcttgaaaggagtacaactaaataaatcatgtgataattcacggcggaagattgcttgtgataatattgttgtgcttaagaacgaaggagatgcacaccttggtaaaaaaaacgaaggagatgcacaatgtaaaaaatgatgatacagtacagaaggttccaatttggcctgccacacggacccaagttgaaaaggatgcccattgattcaaggtttcgtttgggtgccatgcaatggtatattcgatctggcctcaaaactaaatttaatctggtggacagcacttccaaaaagagtgcctacttttttctgtaaacgagtgctacgatcaaacctgcatacatgccatatggactacacgatactatttcttgcagcttattcttatgattctcctgtagccttctccagttatgtatcaataagacaattatacttttcccctagacaaacagacaatccatattcatctctgaggagattgattattctcttgcttggtgaacaacggataatattattatcatttctttactattacaggcttgataagccgatcaaacaattggcttgcaatttgcctcacaggcttgcaagctagggtagcgtacatttctacagcagaccttcgatggggagaaaatgttgcatggtacgggtaccaaaccatttatattgacattgttgcgtccttcattcatggatgcactcctggtgtaatctagatttttacctgaaaaataaaaaatattttactaggaaagcatgaaagataaagaaaaaccatatgcaatacatggatatgtgaagatggatgtctagaagaaaaatggaaacacaaattttactctgaaagatatgtttctataatacatcgtgattaccacagaataattgaataattgtgaaatcgaaataaaccttggattcaccattgagattcaatattagatagtagattaccatacagatggccaggaatgctaaaacagcctagaagggccaacaacagaagcagaagtcctcggctacagttcggcatctgcttgcccatttgtgtgattgctttgtatgaagctgtggcttgtgtttcttctttgttttaggatggttatatagacagcacaactgaaataaatagacaaaagtaatccaatgattaatagtatccaattataaggcttatcgttaacatatgtacagttttgttataaattagtcaaatgaagtatggtggataatcttatctaatcttaccatctgcagtttactcatattgctaaacatggacggtggcctatgtaacgtctactagacactcaatgtgatagctaaatatttgttaatgtgtttattctgcacaatctatgcgaagttattccctcgtgtaagtaatatatgctcttttgcacgatgacatggtctgacatattaaattttaccactaatattctttccaatatactctgtgaaaagtcactagaattacaatattataagaagatgattgtaaaagtagttaaacatattttaccagctcctataatctctacctcccaatgaaaattttaaaaacatttacgtgttgtttggtgataaacctgttttatggtcaatgcaaatttctttgtattatataatcccttattttccatatgttacatggtatggatttttcgtaaaaaatagctatggatgttgatatatttttcggaatagataatgaatataggattggtggataatcgttcagatgtatttgttggtctatttttgtaaagtattcttaacggttaaagcgtcaaacattgtacgctgaactactaggtagttggaggtggaactagacatcctatggaattttacttacatcgtatagaattgtaccaactagagcaggttgtatgacccgagaggtttcatgtttgatcggggggagagggtgcgactacaaccttaggtgagcatgattccatgcataactcttgaaaatggacaagaatcacttgtacaaccaaacttggatgcaattgtccgaggtatacgacgtgaaccacaaggtataccacgaaaaaaaggtagagggaagatctcaaggtgacaaagatgtaaagtcaacaatacctaaccaggacacccactttttacaatctatcacgcatagtgaaattgtattgaaaaccaaacacatccttgtggttaccgcgtttacaaaatttgtggaaacaggttagtccaatgaaattgatgcatggaatctctgtattacccattttattagaataggtttgtagttgaaatgggtaaaaatgggtgacaatggtgtctccatagtggatactaaactggtgatacaaggaacaatcacacgagctcatgcctgttcacttcattatcaggcagtttcgttcttaaggttacaatatcatgatttctttaaaggggtacaactataaataaaatcctgtgataattcacgggggggagattgcttgtgataattttattgtgcttaagaacgaacgttatgcatactatggtaaaaaaaaacgaagcagatgcgcacagtagaaaatgatgatacaatacaaaaggttccaatttggtctgccagtcagacccaagttgaaaaggttgcccattgattcaaggcttcgtttgggtgccatgaaaagatatttttgatttatcctcaaaactaaatttaatctagtagaccgcacttgcaaaaacagtgcctactttattatgtaaacgaggactatgatcaaacctgcatacatgccatatggactatacgatactatttcttgcgcttattatggtgtttctcctgtggccatctccagttatgtatcaataagacaattatacttttcccctaaacaaaaggacaaaccatgtttaactatgaagagattgatcattctcttgattggtgaacaacggacaatattattatcatttctttacaattacaggcttgataagctgatcaaacaattggcttgcaatttgcctcacaggcttgcaagctagggtagcatacatttctgcaacagaccttcgatggggagaaaatgttgcatggtacgggtaccaaaccatttatattgacattgttgcgtccttcattcatggtggcactcttggtgtaatccagattattacttgaaaaataaaaaatattttactaggaaagcatgaaagataaagaaaaaccgtatgcaatacatggatatgttaagatggatgtccagaagaaaattggaaacacaaattttactctgaaagatatgtttctttaatacatcgtgattaccaaagaagaattgaataattgtgaaatcaaaataaaccttggattcaccattgagattgaatattagatagtagattaccatacacgtggccaggaatgctaaaacagcctagaagggccaacaacagaagcagaagtcctcggctacagttcggcatctgcttgcccatttgtgtgattgctttgtatgaagatgtggcttgtgtttcttatttgacaacacaactgaaataaataggcaaaaataatccaatgattaatagtatccaaatataaggcttatcctgaacatatgtacagtttttgtcgcctcccaaaacgaccctaaaatacatcctctaaattatgcctagaataattaaaatacttgtgaaagccttcaaaaattaaaatgtgcaaagttaaaagtcaattaaggcttggaggatttttgtatatttcgtaaaagtctaaaatgtgtaaataagttttagtggaattttcagagcataaataataattattaagaaataaacaaagttaaaatgattttataaaaagaaaaaccttaaaattccccctctccccctcttgggccggctcggcccatctccctccccctctctctcctctccccgcggcccactcggcccctccccgcacgcgcgccgctgacgggcgggcccgcccgccaccctcgctgacgggtggggcccacccgtcatccccttcatcctgccgctcccaccgccccgcccgcaccaagcgccgccgccgccgccaaatccgccgcatcccgccgtccccgcgtgcaattaagtgggaggaaatactccccatgatcccctctccctttcccccattttcccctctctctccctctctatttcggatggaaaccccccttaatcccgccggcgccattgatggcggccggacctcctgcgccggtttccttccccgccggccgccctctctccctcctaaccctatttaaaccctccccgctcttctcccgtctgtttccgcctctcgccgcccttcctcctcgccggaatcgagctcgcgccgtcgctctctctctccgccgtcgccgccgagctccggtccgccgccgtcgtcgccccggactgcctcccacctcggcgccgcatccttcgacttcgccgcatcctcgccgaccgccggagcgccgtcgaccacgtcgacccaagccgcgccaccgcctccttccgctctggccgcctcctccgtcgccgccgtcgccccggggtgagccgtggactgccacctcctttccccattccctcccctctctcggccgccgctccgccgcgccggtggtcgccggcggcgaccatcggggcgcgggcgccgtctcccgccggccacgccgacgtggccgccttcgggcgcgccgagcggcagccgcatggggccccgccgtcagccgcccgcgccctcgggtgcggctgacgcgtggggcccggtcgtcagccgcccgggccctcgggtgcggctgacgcgtggggcccacggcgccggccggtgtgagctcgggtgcacccggtccaccgaggaccgtgaggctgccgcgtgggccccactcccgtggacccggtccgcgcgccccctccccacggctgacgcaataaattctttttaaattaaaatttaaatgaagaaattcacaaatattcacttaaagagcatataaacttcaaatggccataacttggccatttgaactcggaattggaccgttcaagtctctaatttttccttaagaagtcaagaacccatttttgtactttgttcctgcttgttatatggaatttattagagtaaaagactttttcctttccgttggtcgtgtagacgctgcagcttcggaagatccgctcttcgtggaggttgaagccgacgtttgggaaagcgagcaaggcaagtcacatcatctttgaacatattggatcccactttgtgaaattattttgatttaaattaatgcattatcgctttatttaaattcccgctgtcggtgatatgggaccgggagtatcataaccagaggcttgaggcagacataatcgcccacgtggcctggcaccttcggggacgtcgggcccgagggtgaggtgtccgccctcctcctgatttcccccgagggggggtcggggtgcgcttgccccgaccccgagggccgaggtgccccgaccccctgaggggtttgcacta

SEQ ID NO: 21470 - DNA, 18493 bp, Oryza sativa
ttacaggcaaggtgttacacgaagaagggcaaacatgcacgttgttaaaccgacgcgtggtggacaagaatgaccggtctgacactggtcgcatcagcaacgggcagccacgatcccacgttgcgcctgtctccgccgggagtggaagcaggtatgggctgtcccatcaaagtgtcatttggacggcaaccataccgatctccgtccataaagagaagaaaagtccagtttggaaagggaagggtgcatgtggtatccccttgaagtataaaaggaggaccttgcccatagagagggggttggttgattctttcccggattgagagcttagaacgggggagaagtcagctcacactttgtaactcattcatacacagatccaccaaaacacaggagtagggtattacgcttcgcagcggcccgaacctgtatacatcgctgtgtctcgtgtgtcttgcgggcagacaatctttccacatacagagagaaagagagcttgagatctcaccctaagcccccggccgaactggcaaaggggggcctgcgcggtctcccggtgaggagccaggagctccgtcatctggcgcgccaggtagggggctcagcgtgtgctttctgagctctcagactcttccgtgtgccccaagcttttcttgttcaacctaatggccgagcaaggaaaaacgcacgacctctcgccgagtgtgagcggcgacgacggggagccgaatccacgccgtcgagctcgtactcccccacctcctccgcgccaaagccctaagcagggggaggcgcttgagaaggtcgacaaatccgtggcatcaccagtcgcaggtggtgcaggaggacggcaagatggggagcgccgcctcctcgtctacggcgacggcagcacgcctcagggtacgcttcaggctgctggcgcgctcctacgacatccgcctgtcgtccatgacccggagtctccagcccaacgatggctggaagatgtggccaacttggtcatgacggcacagcagcgcctgggtgctggtggacggtccgtcaccaccaagacctccggcgccgctaccaccggctccgtgtcgtcaaggcggagggcgcggcgagcggcggcggctgcacggcattcggctgccactccctcgtcgacaccctcgactcgagaggatcagcatggggagccggatgcccgcctcaacatcgagcgccggcgtaatagccggcgtactccccgtgcaacggagggcgcctcttcgtccagagtgtcacctcggcatggacgtgaggaccagccctccgtgcccccggctggtggtgtcggctgtagagcctttgtggcgagtcttcggaatgtccgttggcccccaaggttccggcccaccatcaccgagaagtacgatgggagcgtcaatcccaccgagtttcttcaggtctatacgaccgggatcgaggccgctgggggtgacgacagggtcatggcgaacttctttcccatggccctaaaaggacaggcgcggggttggctaatgaacctgccacccgcgtcggtccactcctgggaagatttgtgccaacagttcaccatgaacttccaaggcacatatccgcgcccaggcgaagaagcggacttgcatgcagtacagcgaggcgatgatgaatcgcttcgctcgtacattcagcggttttgccaagtccgcaatactataccatgcatccctgcacatgcggtgatctacgcgttcagggggggcgtgcggcacaaccgcatgctcgaaaagatcgcttccaaagagccccagactaccgcggagctttttcagctcgcggaccgagtggctcgtaaggaggaagcatggacatggaactcctccggttccggagtggcagcttcggccgcccccggatccgccgctcagacagggcggcgtgacaggaggaggaagaagaggtcggaccgttccggcgacgagggtcatgtcctcgccgtcgagggcgctccgcgggccacccgaaaggggaggcctgcgagcgacaaaaagaaagaggctggtactcccagcagggagcgccccgtcggcaggtggtgctccgtccacaacacctccctccacgatctcgcggactgtcgcgcagtcaaaaatttggctgagcgaacgaggaagtgggaggaggacaggaggcaggaacgccgtgagggcaagtccccggcggttccttctggcaaacggcgaagtgaggccaagcagaaggcccccgctgttgacatcgatgatggtgaagatgacctaggtttccaagaacctggggccaccattgccaccgtcgatggaggagcgtgcgctcacgtctctcgccggagcttcaaggctatgaagcgggagcttctggccatggcccctactcatgaggcgatgcgtcgggcgcggtggtcggaggttgctctcactttcgaccagaccgaccacccaccgtgcattgcccggggagggcaggttgcgatggtggtttcccccaccatctgcaatgtgaagttgggacgcgtcctcatagatggaggagcggctctcaacatcctttcccccgcggcttttgatgccatcaaggccccggggatggtgctccagccgtctcaaccgatcatcggtgtgacgccggggcacacgtggccattaggtcacgttgacctaccggtcaccttcggtggacccgccaacttccgcacggagcgggtaagcttcgatgtggcggacctcagtctgccctacaacgcggtcctcgggaggcccgcgttggtgaagttcatggcggcggtccactatgcctacctccagatgaagatgccgggccctggtggccccatctctgtccgtggcgaccttaaagtcgcgctcgcttgcatggagcagcgcgcggaccacctcgctgccgcgaccaagcccgagggtggtgacgagaggcttggcacctctgcccccaccgccccgaggcagcggatcgccacatgcgacgaggccccggtcaaggaggttgccttgggcgacggcccatccaagaccacacggatcggtggtcttctggatggcaaataggaagacgcgctcgtctccttcctgcgggcaaacgctgacgtcttcgcatggagaccagcggacatgcccggggtccccagggaggtgattgagcaccgtctcgccgtgcggccgggcgcaaggcctgtccggcagaaagtgcggcggcaggccccggaacgtcaagccttcatccgcgaggaggtggcgagacttctggaggccggattcatccgtgaagtcatccatccggagtggctggcgaacccggtggtcgttcccaaggcgaacggcaagcttcggatgtgcatcgactacaccgaccttaacaaggcatgtcctaaggatccttaccccctgcctcgcatagatcagatcgtcgactccactgcggggtgcgaccttttgtgttttctagatgcatactctggttatcatcagattcgcatggctagggaggatgaggaaaaaactgcgttcattacccccgtaggaacctattgttatacatcaatgcccttcgggttaaagaatgcaggtcctacttttcagcgtactactcgaatttctttgggtagccaaataggacgtaatgttgaggcttatgttgatgacttggttgtaaaaacgcgcaaccaagaaaccttactctcagatctagcggaaacttttgaaaacctccgctccgcccgcataaaactgaaccccgataagtgcgtgtttggtgtacctgcgggcaagcttctcgggtttttggtctctgcccgaggcattgaggccaaccccgagaagattcgagctatcgagcggatgcgcccccccagcagacttagggatgtgcaatgcgtcaccggttgcatggccgccctaagtcgtttcatatcaaggctgggagagaaggcgctacccttgtttaagctcctcaagcgctcggggccgttcacttggacggaggaagctgaaaatgccctcgtccggttgaaggcatatctcagctctcctccggttctagtcgccccggagccaaatgagtccctgctactttacttagcagcgaccccccaagtagttagtgcagcgttggttgtggagcgcgatgaggacaatcctcattctgcgcacccccactctgtgccgacttggctcgggagcaggcagggaggagaggcccccgagtcaaacggtggcctaaggcccctgacgaccggagacggccctctgcccgcttgtcagacggtgctgggtgcccccgaccctcaggaaggccccgaggccactgcgggaaggccgcacttaacgccctttgaccccgaggctaaccctgtgctgactcgacccgggaaagagcagggagaagaggcccccgagccgaacggaggccagaggcccctgacgaccggagttggccctttgcccgcttgtccgacgatgccaggagcccccgacccccaggacggccccgaggccactgtgggaaggccgctcctgtcgtcctccgaccccgaggtcatcggcacagaagacgagtgcgccccgaggggccacttggacgaagaacgccccgggggtacggcccctagcagagaggaacggccccaccgaagggtgcagcggcctgtctactttgttagtgaggccctccgggacgccaagacccgatacccacaggcccagaagatgctttacgctattctgatggcctcgaggaaactgcgccattatttccaggcgcatcgggtcactgtggttacgtcttaccccctcggtcaaattttgcataatcgagagggtacaggacgagtggtaaaatgggcaatcgagctttctgagttcgatctgcactttgaaccacgccacgctatcaagagccaggccctcgccgattttgtggcagagtggaccccggctccagagaccgtcttaatgcccaaggccagcacgaacccctcacagctgcctcaaaccgcccactgggtgatgcagttcgacggttctctgtctcttcagggcgccggtgcaggggtcacgttgacctctccgaacggagacgtcctcagatatttggtccgtctcgactttcgagcgactaacaatatggcagagtacgagggactccttgccgggctcagggtggcagccgggctggggatccgccgcctcctggtgttaggcgactctcagctggttgttaaccaagtctgtaaggagtaccggtgctctgatccgcagatggacgcctacgtgcgccaagtacgacgtatggagcgccatttcgacgggatagagcttcggcatgtgcccagacgggataacatgatagccgacgaactctcacggctcgcgtcctcgcgagcccagaccccaccgggcgcctttgaagaaaggcttacccagccgtcggcgcgacccgatcccttaggggagacggatgcgcctgaccggcccccgaggcccgtcggagtccaggtctcgggacccgaagggagcgctccaagctcccttagattgattgcttggatctctgagatccaaacatacctcgcagataagactctacctgaggaccgcgaagggagtgaacgcgtacaacgcatttccaaacgctatgtgctggtagaagggaccctctatcggcgcgcggctaacggaatcctcctgaagtgcattcctcaggaacaaggcgttgagcttcttgcagacatccatgagggcgagtgcggagcccattccgcctcgcgaaccctggttggcaaggcctttcgtcaaggattttattggccgacagctctcaatgacgcagtcgatctggtccggcgatgcagagcgtgtcagttccacgccaagcaaattcatcagccggcccaggccctgcagatcataccactgtcatggccatttgctgtctgggggcttgatatcctgggaccgttcaaacgggccccgggcgggtttgagtatctgtatgttgcgatcgacaagttcactaagtggcccgaggcttatccggttgtcaagatcgataagcactctgctcttaaatttattaagggcatcacggcccgttttggagtgcctaaccgtattattacggataatggcacccaattcactagtgaactcttcggcgactactgcgaagacatgggcatcaagctctgcttcgcctcacctgcccaccccagaagcaatggccaagtggagcgcgccaatgcagaaatcctcaaaggccttaaaaccaagactttcaatattctcaagaagcacggcgattcatggatcgaggagttgccagcggtgctctgggcgaaccgaaccacaccaagccgagcgaccggggaaacgcctttcttcctcgtctacggcgcagaagcggttctcccatctgagctcaccctgaggtctcctcgggccaccatgtactgcgaggctgatcaagatcagcttcgtagagatgacctcgactacttggaagagcgaaggcggcgcgcggccctccgagctgcgcgctaccagcagagcctgcggcgctaccatcagcgccacgtccgggcccgatcactctgcgtcgacgacctcgtcctacgccgcgtccaaacgcgtgctggattgagcaaactctcaccaatgtgggagggtccgtatcgagtggtcggtgtcccccggccgggctcggtacggctggccacgggcgacggcacggagctgccaaacccgtggaacatcgaacaccttcgtcgcttctacccctgaaggggggggtcgggtgtcaggttttggctcgggccaaccccgcacccccctcgggtgtgcaggattggccgggggctaccacacatgcacatatattccttttcttatttcagcatttcaataaaagcagtttcaatttcctaaaggttgtgtctgtgccgtttttccttctaaagaatcttaacttaaaataaggtcactcatgctcaaccttgccctcgggggttcggttcggtcagctaaaatcgccaaacggggcccagaaccgagccgtgccccggggcgtggtgaactccgggggggaatcggcaaaagcccacgatcgggttacccataccccccggtcaccacgttcccggcctggccagtctcgacatgtggatctccccaggcactagccccgacccgagccattcgaggaccgggatttgggcgcgagcccttatttcaagctaaggcgcaaaaggaccatggcacagatcatcctcaactcatatatatagcaaaataaagttaacatagaaattttttttcatcatttttgattgcagagtaagttgatctatacaaaggaggcatgaaggccttagaagaaagaaaaagaaaaaagtaaagattgacgggggctcgggggctcattctgacgcgcccgggtcgccggcctcgtcgccatcgtcgtcctcaccgctggcatcgccctcctcgtccgagctgggggcgaacgcgagccgaggggccgagccctcgaagccgttgacgatgtggtcggcggcatcccggacgcgcgcgcgcgcgtcgtcctcggtcccgggagggaactcctccagcgccatccatggagagaagttggggtcccgggcctggtaactcgccagcacgagttcgaccgctccccgcgcgaggtcccttgaggatgacttgatggtcttctcaagctcctcggggagttgctcgagaacccaagccatcctgttgaggtgcggagcgaggccttccagattggtggggggcaccgacgactggcctccccagaggcccgcttgccgaccggcgcgcttcatgcgggagaccgcatcccaaagcatgtcgggcccaatctcgcccgccaagcgaagggcctcggcctccccggtggaggagtccagcgctcgctgcatttccgcgacggtgtgttcggcagccgcgaggcgggcggccaagtcgctttcgcccgcggccgccccgccgataggcgccctcgcggccagctctttctcccgtgcctcgaggttggcagcccgctgctccagcgcggctctctcggcacggacgcattcaaggttgcggcgcgcctgctcctcttgcgccgcctcgcggagggagaggctgttcgccagccgttgcgtcgtggcctcggcctcctcgagagctcgctcccgctcagcgagtgcatcctcgcgaaggcggagcgcggactcctcctcggcgcaggcggcctcatgcgccaccagcgtcgcctctcggagaccagcggcggcctcgcggtccgtcaagcccctctccacggcgccggcgtgttcttccagcgccatggcacgggcctcaagggcctcttcgcgccgccgcaacgccgcttcagcctctgttgctcgctgctctcgggcggcggcggcgtcgaggaccccctgggcggcgtcgagctttttctttagctccgcctcccagctcccgtgttgaaggcggagggagtcctgcgcctcgatcatcgcggtggtggcgacgagggcggcctctcgctcctcctccacctctcgggcgatctccgccagtgccgccttgcgggcttcaagctccgagatgtggcggcggtgggccttaccgcccacctccaccatggcgtccaccgagcgccgcccctcctcgacgcgtgcccatgcggcctcgagctccgctcgttccgctcgcaaggcctccacctgggcgctaaatccatctagcaccgcggtgtttgcggcggccaaggcctgcataatgggctcggcgctcaccggggcgacggaagatgaggagaaaagtcgccttggagaaaatgcgacgcggcttggccccccggaggatgcgctgggctcggggatgtcccccgggcccgtttggtcctgggcgtcgcccggtgaggtaggcccaggcgatgcgcccgcggcctcgtcgcgagccgcctcggaggatgtcgcctgaggaccgcccgagggagtgggcccaagtgacgcgccagcagcagctgtcgcctcagcctggcgagcccgggcggcctcctcccgggcagcttcttcggcttggcgagcccgggcggcctcctcccgagcagcttcctccgcttggcgaacccgggcggcctcccgggcggcctcttcagcttcccgaaggcgggctgcggcttcacgccggtcagactctcgcctccgctcctctgcggccgctggatcttcggcctcgggctggccggacttggggtggcgggaggaatgcgacgggacatcgctgaagcagaagaaaaagccagaagacgagcaaaatgagcaagaaaaaacttctttttggagaaagatggttgcaatgagagtgagacgaacctgcgagggggtcggttgaatgaccaccttggaggggaaatcaggtttccccggcatggttccgtctcccccgtcttgcggagccgcttcttcttgcgcaccccctcgggctgcgacgtcggcgcggccccctccgggcgccgactgctggcacgcgccgccccgccccctcggggaggagatgggggaggtgtacctcccagcttcctcttcccctgggtgtcggcagggcggctgctccccgagcccccgacgcggggcccagaagcacgaccccctcctggggcaggtcgttccccccggcggcgctcgcccgcgccgtcgtggcccttaggggctctctcctctgaggccccgacccccatcataatggttagaatggagacgcggtcgggatcgctgcagagggggaggatctcctgaggaaggcgagacgcctccgcggagctaaggttcagcaccctttggactacgatcttgaagtcctcaggagcccaatcccatctggttccctggtgggtccgcatgtagtcttcaggcccagtgtactcccaggcgctccgggcgcgccgttggagcggcgcaatccggcgacggagataatcgccgtacaccatggccccggtgagcccctgggatcgcaggcccgccaggcgatcgaggacggcgtcgtagtcctcccccagatctaccggcgcccgccagctggagacctgcgccgggggctggcttggaagtcggaggcgcgcttcgtcggcaaggggggtgtagaaccagtcgctcttccagtcgtcccacttcttgcggaggacgcaggggatgtagcggtttaacaccggcccccgcggctggaagtagcagccgccaaccaccgacggcggtgacaccgactgcacggtgaagaaccaccggaacagctgaagagaggggcgcaccccaatgaacatctcgcacaggtgtgcgaagatggccaatgtcatcaccgcattgggggtgagatgcgccatctggagatcgtagaactccaggacatccatgaagaaatgagaaaatggcgggaccagcccagccattgcgaaggggaggaagaagatggaccgctccgggtagtctggtgccgggcgcccctcgcccagcatcactatctcccgaccggtggcggactccggcatgaagcggcgcggcagtccggcatgcctctcgttcacgatgcgggaaggcggcagtacactgccgtcgagcagagcagagccccgtgccatggcggtggaggaagagatgattgagaacgagcgcgtgtggcgaaagtagggcgtagcagagaaagagttagagctcaggcggcgagggcaagaggaacaatggcgaaaggaagggagcaaatccttttctcgatgcttttatacccttgccatcgctaggcctggctcctcgtttctcgcgcccactacctcgctccctcgtatctcgctatctcgctccctcgtttcccgtgcccacgcttccactaatcccatttgcccgcttacggcgcgtgaagtggatatgcggttgtggcaatcgaaacggattgtatcgtgcgcgcgttaattacgctcgccgaccgaagcggcgttaccgtatctccgagcgagataaatctgctcacccagattcgcgcgctgctcaagtggtgtggcagtcttgaatagaccgcccattatggacaaccaaagttaccaataccaatgtgcatggattgagaccgttgggtattttgcccaactatggagaccggtcccacctgtcaccaggctttaagggtggcgtcacacctgaccgcttcccttgggaagggaaattgctctggcataacgccgggggctactgtcggtgatatgggaccgggagtatcataaccagaggcttgaggcagacataatcgcccacgtggcctggcaccttcggggacgtcgggcccgagggtgaggtgtccgccctcctcctgatttcccccgagggggggtcggggtgcgcttgccccgaccccgagggccgaggtgccccgaccccctgaggggtttgcactatgtacgtaggttgggtgagcacagcagggctcacctaaccacatttattgcacatcggctaagcgtgtcacgccgcacggagtgcagtgcagtgcactcgattatccggtctgtgaccagtcacagaccggtcaaatcgcgagttaggtggcggcaggcggtctgacgcacgccttgccccatcccgtcaaggtgtgagcttctaagcactcgtccccagctggagctagcgtgttacatcccaaagatggcacgttaaccccgatcgatatataccaggcttcatcctaaccattacaggcaaggtgttacacgaagaagggcaaacatgcacgttgttaaaccgacgcgtggtggacaagaatgaccggtctgacactggtcgcatcagcaacgggcagccacgatcccacgttgcgcctgtctccgccgggagtggaagcaggtatgggctgtcccatcaaagtgtcatttggacggcaaccataccgatctccgtccataaagagaagaaaagtccagtttggaaagggaagggtgcatgtggtatccccttgaagtataaaaggaggaccttgcccatagagagggggttggttgattctttcccggattgagagcttagaacgggggagaagtcagctcacactttgtaactcattcatacacagatccaccaaaacacaggagtagggtattacgcttcgcagcggcccgaacctgtatacatcgctgtgtctcgtgtgtcttgcgggcagacaatctttccacatacagagagaaagagagcttgagatctcaccctaagcccccggccgaactggcaaaggggggcctgcgcggtctcccggtgaggagccaggagctccgtcacccgcgttatcactgttttatttagccatgcctatttacctttgttatgaccttattattgttattgttattattaccttgttcaccctagaataaacaaaaccccaactagtgggcactctactcatggttcccctagtatgaatttaggtagatgcttcgctgattaataagacaacattaggtggttttataactttagactttgggaatattcatatcccttggactttatggaatggttgaactattgtggaattggatgcacacctctccctcttttcaaaactctcaaaatggttttaggctgggcttggggtgcatggttttgatagtagcacctcggccatataaggaccggtcttcggacctctgttgcaaagcactaccgtacttccacatgtctagtgggtaaggcttagtttgtggctcagtctggttataaacaaaagtacacggatggagatggacgaagtcgggggtcgatggacatctctaggacaaatgaaggctacacgatctgcggccggtagtcgagatgtcctggcacagggccggtgtcctgctgctaggggctcagtcctgcctacctatcccggagattccggccgtaggtggggttgggtcggtactcttgtctatgtctaggattggttggaaactatgtcatgtcttccttccatatgccgtggtggtatgtggcacgtggttgcacgtgaggaagacgtgtcttgtgggtaaagatgtacacctctgatcagagtaaaacctattcgaatagccgcgccctcggttatgggcaagcctagcaatgtacccaagttagtgtttttaattcttaaaacctgcttaataactaaaatgtggaatggttggcctgggttggcttgggacgagctgggacctagggtcgggttgccagttcggtctgaatcatcgtaggccttgggttaaggcaggttcatgtgggttcacggccttgtttaataatattacatagttctaggatcgtgttttaaatttggctttgagcaactaagagtcttttaaatgctgcttattgcaaaacctaacccctatactataactccattgtactcctttgcatttatgctgcacttgtgggtgtgtcttgttgagtacggtggttgtactcagtcttgctcaatttttcccaaacccagaagaggagctcctggatgatgaagggcctgccgtcaagcgcctgtggtcgtcgccctagtcttccgctgtttcccgtttgtctttgtgtgtgctgggccttcgcggcccatgtaataaattaactatttacgcttccgcttgttagcctctgaattgtatcaacttttggtgtaacttgcctcctgggacaaggaataatacacgcacgtaaggaacgcccgttgggttatttccggtcgtgacagttttgttatatattagtgaaatgaaaagtatggtggataatcttatctaatcttaccatctgcaatttactcatattgctaaacatggacggtggcctatgtaacgtctactagacactcaatgtgatagctaaatatttgttaatgtcaggctagccggagtcggcgtgaccagggttctggttcggccgaaccagggctagcccagcaggcctccagatttggcagggtcactgacaggtgggtccttatggcggtttccaggacggttacacctgacatgtgggcacatcttatctttaagcttgcttaggagtgagttttcctcgtttcttctccatttatgtattaatctctgcaaacaaaatatacttcaagtacaagtggaattatattattctagaacaaatatgcattgcaagcatagtaagttctcctttattttagttatattgacagtcgaaattggttcgtaacgaccgtcaaacctaccgtatatttgcaagggatacgattgatttggcggtggccgcagcagcgccagccagggtggatcaggcggcggggagaaggtggtggaggcgcagtgaagggcggcggcaagaggctcctcggctcctccttcaccactaccgggcgggagcagccgggtgggggatggagcggcgggcgggagtaggagccgcaagtagctcagcagcggtggatacggcggtagggagcacagaggcagtagatctgtcaacggggagggcggcggcaattgggagggacgccggcggtggggacctcagtggcagctgatctggtaatggggagggcggtggcggttgggaggtgcgacaaaggtggattcggcggcggggaattccatgggaaggggactcggaaacaccgatgacaacgaggagctgtcgggctttgacgacaacgatgatgagctgtgctcggcttcggcaatggcgacggcggatgtgattttttggattttcacttttttgtgaaattaatttttgcgtgcgggtgcaccaaccgtaggaaaagtattgatttttacaaacatcttcgggcagacggacagtcttatcgcgtgaaaaaataggttttggttgtatgcaaaaatgctttcttttgagtagcgtcacatatgcttggttcgttcagtccacgtgctgaatagtgtaggtagagcgagagatggagcatccagtattccagtggctccaaccggctgccagcaatgagaataccgtcatatttgtaaggatgatgtaattaattaagacactttctgataaaaataaaggccaaatagatcatcttggctcagtaatgcaaggttgggttgataattgaagctagtttgactttgtgtcttggagactcttaaggatgccgtctaataatcctacccgacactgccgaacatgagaaaacgtttgatgtccattacattacattgcccttttcacatcgttacaatttcaggctcagctcagacattcagtagaacaaagcggttcctaataatgcagcttttttgttattgttttattattagacatgttatggaagagaaaaaaaaactcacaaccgagaaacacaagcaaaccatacaccaaaataggttggcacccacaaagcacacacatatatctagcgttggtataatatttataagcggatcaatttcttccgtggccaagctgcagcaggagttgtccatgccccctcccaacagcgtttccatgatcgttgtccgatatcttaagcttgcgaacgacttcatgcatgtctatcaataagacaattatacttttccccgaaacaaaaggacaatccatgttcatctgtgaggagactgatcattctcttgattagagaacaacggacaatattattatcatttttttactgttacaagcttgataagctgattagacaattggcttgcaatttgcctcacaggcttgcaagctagggtagcatacatttctacagcagaccttcgattgggagaaaatgttgcatggtacgggcaccaaaccatttatattgacattgttgcgtccttcattcagggatgcactccaggtgtaatccagatttgtacctaaaaaataaaaaatattttactaggaaagcatgaaagataaagaaaaaccgtatgcaatacatggatatgtgaagatggatgtccataagaaaattggaaacacaaattgtactctgaaagatatgtttcttaaatacatcgtgattaccacagaacaattgaataattgtgaagtcaaaataaaccttggattcaccattgagattgaatattagatagtagattaccatacacgtggccaggaatgcaaaaacagcctagaatggccaacaacagaagcagaagtccccggctacatttcggcatctgcttgcccatttgtgtgattgctttgtatgaagctatggcttgtgttttttctttgttttaccatggttatatagacagcacaactgaaataaataggcaaaagtaatccaataattaatagtatccaaatataaggcttgtcctaaacatatatacagttttgttatatattagtgaaatgaaggatggtggataatcttgtctaatcttgccatatgcagtttacttatattgctaaacatggacggtggcctatgtaacatgtactagacactctatgtgatagctaaatatttgttaatgtcaggccagccggagtcggcgtcaccagggtcctggttcggccgaaccagggccggcccagctggcctccagatttgttctgaatatttaaaaatgagaaggaagtcagagataagtgcaagattgaactagctagttctgaatatttgttctgcttcaagcacaacatctccatgtgttctgaacttaaatactgagattcctgaagaacagattctggaagacgagtgcattccatctgaatacgcggtttgcagacgtcggctcggtgacgacacatgagtcagaagcaaatcaggattcgataacgttcatgctttccttgacttgacctataaagtaacgtccttattactcccgtcaatgaatatgtatatcgtcgtattaagaagatagtgcgctgcatcatgcacctaaccggcctgatgttctttttcaatacgggtgaatccgaagagaatgatgactctctgaatagtggatgaattattagatcggagggattgtggttagggaatcttttaaaacatagacactattttacaggatttttatagaaattaggaagcaaacactacttaaaaaaagtatttttgcggacgttgggtttcttttttcgcaggtggatatgaccctcggagccaaatatctgttagaaatttgatcataatttggcatattttaatccaaaataacaagataataaacatattttttacaatgggatttaatccagtgatagtagcatgtaatcaacatgagcatgcttaatgtagaataagcatcaacaatcacatagtaacacaatgttgacattgcgatgaatattaaccataaaacttctaattgaaataatgtaaaaaggttataccccaagaatggttctccgctggagtttgagatagtattgcctctgttggtgttgaccggagcctccttctccttgtcttgccgttacctccagtgttcgacatgttagtgaagacgaagtagatattgatgaacagtgagtagttgcgccttgcgctctccaaaaacctgatcgcccacccgtccgtgcaaacatcgtagcagtgcgtggtttcgaaggcctattctcccaaagcgtgtgcacacactcgtcgggatgggattatcgtagcagcaatagccttggaaatggatgaaagtgtgtctcacttctccttagagagatcaaatccattctcattttataggaggaatgaaagatgaagagtaatagaataggaagaggaatagagtaactaattctcatcaattacccatcaaccatcctctactacacaattatcaaccaaccatcaattaggagtaattgatgtaggttaccaacgaaataggaagaggaatagagcagctaattgtcatcaactaacaattagccatgaaccatccttcaccacacaaccatttaccatccatcaattaggagtaattgatataagttaccaattcacttatcaaatggattaattctcaaaactcttcatcccattgatatcccataagagaatgaatacacatgaattcctagcataatgagccttaaaattaatttgatttaattgatttaaatggatcaattacccaattaaatctaacaatatccgcttatgaaaatgtaaaccgaggtggattttcatcatcctcctacgaaaatcaatttttctaggcggaccacttaagaggtctgcctgcgaaaataccgttatttcgcaggcggacctcttaagtggtccacctgaaaaaaatatgatttttgcaggaggaatattatgtggtccgcctacaaaaactcatgcctacaaaaaaaaactaagtcctatcttatgttctcctcttccatcttatcctctccccaccactcattccctcaactctctctcgcatttccctctagctccctcccctccgcttccttccttccttccttccttccggc

SEQ ID NO: 21471 - DNA, 35806 bp, Oryza sativa
cgcccaccagatcccgcgcctccaccgctggaggggctcgccgtgcaccggagagcgtgcagtaggccggcgctaggcgtcgcccaccccttccgtcgctgccgcctacgacaaccgccgccgccgttgtcgccgccaggagggaggagaggagaggagtgtggccgggagagagaggagaggagtgaagccaggagatgaagtgtgaggtgggagagacaaagatagggggagggtagaataaaaaatggggtggacgaatatttcacatacgtgtgggtgagttaagagacccgcttgcgaaaatacccttatttttgcgtgcggatgttttaagtgagccatttggaaacatcgatttttttcgtacgggtctcttatggagccgtattcgaaaatgagggctgatttttatagacgcggacacttatggcccatctgcaacctattagattgcttgtccaggaaaatcatttttgaactagtggggaaacattgttagtaccgggtttggttctgaagatcctgtctagattcgttatactagtatgtgttacatatagtacaaggttgctatattttggtacggagagtaaagtctatcgacccaacaacaagctacaagctataaaaagataaagaaattgttaaatatgtgatccgaattttgggcccataatatattcggattgattttctaggagaactccatgtctatcctacgtttgtaatcaactcctctgcagtgatcattgccggtcggcgcccgtggtttttttctgcaagggtttttcacataaaacttcgtatctctgttgtacatctttttttcataacagaaatgacaagtaaaagtttacacgaactaaaagtacgggtctcccattcccatgtgtcacatggttagcgccatgtgaccgtactttgcttccattctccgtttctcccccaacccattactgtattgtttactctatttgagactagtccaatagctaataattatagttcggaaccctgtgcttacttgtctatatattgtatcgaagactgatctgatcttaccgtaactagaagggaacgcagcatgcatccgcgcacacagacatgactataaacatgacttgagcataaattttattagttaaattcagagtaagtatattattggttgaaaatttcctataattccatttaacataaaatggtgattttagaacattgtgtgataaagaaagcattccacaaactaattcaaaagataagaaaaattaactaattgcccatagggtgccaatttccccgctggggctaggaccccagcctaatgggggcagaggccaagtcaggtttcacacccatgggtgagcggcggtgggggaggttatattcaccctcgggtgacccagcggggccccaggctattagcgcgcgatgctgcaaccaccctccgtctctccttctccttcgagtcgtcggcttgccctgcctatcaaagcatgacgccgcaaccacccttcgtcccttcccctcatcggagctgcggggcccactcaactgtcgggtcctctacaggggcgggggtggctcaggttattcacccggtggccaatgtgaggccgggagcggggagaaatgtgggggcgttcctgcccaacctggccccgccccaccccgctgccactcctaattgccattggaatattgtactccatgttcataccattacttgcctggtatcgcacatgtacattaattaaaatataaccatcaggtttataccatggtcgctaatagtatgtaaataggttcacctaatttgtcattttttatagaatcaactgattaaaaagatagatcaggttagcttcgaacgtgggctataagcctgttgagctaatgaaatgtaaagcacgtgcatagacgctgattaaatgtaaagcacatgcataaactacattaccactaagtttagatcttgtcctgtgttgttctttcagttgtagcttccaagctgtgcatatctcaaacattgtttggttcactctcaaacattgccaaacctaaggggttgtttggttcactctcaaacattgccaaacctccatgccaaacatagccaaatctgtggcttataaattgatggctacaccttaggcaacttttggctataagatgggtgtatgacatgtgagcctttgaattgaaaaactttggcatgccacaactttggaagtgaaacaaacaagtatcctagaaagtgtggtaaagtttggcaaagtgagggagtgaaccaaacagcctctcagtgcaatcgtgcaacctcctttgtgtaccgttggattgaagatggatggtccagatcgagcacctcatccctatcgcacattttgcaaaaaaaccgcccgcctctcattgtctttttatgttttggttcttggactcaacttcctttctctttgtatcgtcccactcttctcaccaagtaaaaaaatttactcacaccagtatccaggagtaaaaatttactcacgcttaaagtcgggagtgaaaattttagtcatgcttaaaaccaaagatttactcacatctataatcagagtaaaaaatttactcatgcctaaagtcgggagtgaaaattttactcatgcttaaaaccaataacaaatttactcatgccccaaacttccatgcttgaactttgtcaatatcttgcctcgataaagagaagaacaatggctgattgagcggagtgccagaactaatactgaattaatcacggttggatctcgttggtcttttcctattagaaggtggaggcaagctccaaatggtgtttaaatgagctcttgttggtgtggagctcgagcacgggtggatgcgtgcaatcggcggatcgagcttgtgtggtagaccaagctcgagtgtggatggacgaccaccttagcctgtggatcggtggatgtagatcaagaagtggagtggcttggtcggagaaaagggaaggaagaagaagatgaggcagaggagagcgaagagggcaaaattgacttttcagctgtctccactgttcctcagctagttggatacattattttagtacccactgtgtcttgtagcaaatatccacacaattatagtgcccataagcaaaaaccggttttcattgtgtcttctagtaaatatcacattattaagtgttcactagcaaattttacataaaaaaaattgtgggagttagatcgatctcaactacccatagaaactgcacgtacgttgcctggagaaacaatataaacttccattggctctaaatgattaattccaaaacctaaacaggctgtagcgcatatttatagtgttgattactcggcgtatcgatcggagctcttcatactagcaagctagcttgtgtcgttaggatcgaattgcacaattcgtgcagtccaacctaagatggcctgcctgcagctgcaggttcttctcctcctcgcctgcctgctgcttgatgctcctcatcttagtagtgctgcagccacagttccaacaccacccttctccttcaacttcgacttctccaacatgtccacatacaagccggatgacttgagatttgagggcaacgcgactgtgcacggcagcttcgtcgacctcacctgcaacgcatatgggctggacatctctcagtgcacggctgggcggatgtcgtacaatcacccggtgcccttctacgaccaaaccaccaaggaggttgccagcttctccacacagttcaccttcaagattattgtaccaagatttaacaacgacaaggagaagggagatggtatggctttcttccttgcacgttacccatcaagaatgcctccagattcaggcggcggcagccttggtctcatcaccaacaacaactatagtagctttggcccggaccagttcgtatccgtcgagtttgacacgtacaacaacacctgggagcagcctaagcagactggtgaccatatgggcatcaacatcaacacagtcactttttcgactaacacaacaagtgtatccagcttcagcccgaatgagagcatgatgaaggcgtccatcacctttgacagcaagacctcgatgctggtcgcctctctgcagtataccggtaattattctaactatgcccctgttaacgtcagtgcgaaactcccagatcctacgaccttgctcccgtcggaggtggcagtgggattttctgcagccaccggggcagccttcgagctccatcaaatacactcatggtctttcaactcaactattgctgccccggtacaaaaaggtatatatgcagttactacatctcttgaattgattgttggattaatgcattgtactcgttggaggtacttctgacgcagcaattgacaccttagtagtttgtattttttttgaatgaatttgtaatgcagcaattgacaccgatctgccgtaacatcgatgcagatcacaagaaagccattgccgtaggggtctcaattggaggaggtctcatattggtgctcctggtgtggtctattctctcatggtggaagtggagaaaaacaaaccgtgaatttgacaagggaactcgtggggcttgtcggttcaactaccaccgcttggctgctgcaacaaaccatttttcaatggataataggattggagcaggtacgttcggtgaagtacacaaaggtttcttgacacaattgggccgtgaagtggctgttaagaagatcttgagggaatccagagcaggaaacaaggacttttttgacgaagtccagaccatcagtagagcaaagcagaagaatcttgttgaacttcttggttggggaatgaagggcagctcgatcattgatttcgtcatgtgctggcgtaggcagaagaacaccgaccttttcctggtatatgaatttgtggataacggcaacctacatatgcacctgtatgagaaggaggccctgctgtcatggagaataaggtacatgctgcgagctgagcaatataatttatattcaaattttaagaacctagctaggtattattatattactaccgcacacataaccccaaaaattattgtctaataatgttttacaaaactccaccatgtccatgttgagcataatttttctaaaaataaaatatagattgtatatgaaaattgtaattactgatttcttgactaaggttgatagtttaacttttcactgctttaaaaaaattattttagatatgtttaaattaaatgacatttcaataatacctatatatgggttttctgccacatagaccctaaaacatgttgtttcctggaagtaactattttgaatatggaagtttgaaaaaacgagctagtaatgttgacaatcattatgtacgttcctcggaacaagaaaatgattatgcatgcaaatgttgtcttttcaggtataaaatagtgaagggcattatcagcgctcttgtttaccttcaccatgatagacatccatacattcttcacagggatatcaaaccgagcaacatactcttggacaaaaatttcaatgctagattagcagatttcgggctgtcgagaactgccgacaatggaacaatacaatcgtcaatggttgtaggaacggaaaattacttggatccagagtgcaggaagacgggaaagttcaaccgtagctcagatgtcttcagcttcgggctcgttctgctagagattgcttgcaagaaagacgagaatagctatgcacaagtctgggaaaggtacatcgacaaaactctgatgcaggctgctgacgataggttacaaggtgcgttcgataagaggcagatggagcgtgtgatcgtcttggggctgtggtgttgtcagcctaatattgagatgcgacctacgatggagaaagcaatggatttcctggagagtgatgggccgttgcctaaactggccaaacccgaaattacctcctcaagtgcgccaagcaattgaactgaacaggatcagtcgaaatgtataagttgaaagtaagcaagtcacaccagatatattgtgttttacattggatttttttttctttccttttaattagtttgggcatgtggaagttatcacgtacatagaggggttgcagttgtgttaatttgcttgtggctgtagtcatcgtacatgtacatgtggagtcagtttttgtatagccacagactattcagagtttcagacgtgggatgttgtgttatttgccgccgtggcatcaggagtcttttgtacgtttgttttggattcacgattgagtataaaagaaaacaagaaaacgccgcagtcgttgtgcggcaccatatttttttttccctcgctttcctttttttcccactcccagctggtgaaaggatgacgatcttttcactcaccattctctccctcgaaacccccagcttgtttagcaactcgaggaaaggggattgggagtttacacgaggaaattgatggtgaggttaagatgggaatttgatttttaatcccagtatcttgtttggaagaggtggtggaaattgatagggagtttagggcttgtttggtacagctccaactcctaaatataactccaagagttgagtctggagtggagttgtggagctgcctacattttgtgagagagctccacccaactccacttctagttttggtggagctgaaactgtttagctgagctctagctccaggagaggtggagttggagctggagttatgccaaacaggcccttagttagagattaggtcattaatgaaaatagatggctgagatttgtttacgcagagtaaaggaggaatttcctcccaattaccaccccctaccgagtattgaaaaggagggagttcctccctcaattccccatcctcatcccaccaaaatttccatgtaacccaaccaaacaaaacagttaatagcctcatccctctaaactcccaatccctcctaaaaactccctccaaccaatcgaggtgacgttcagcctcatagccaagaacccaatattcggtgccacatcggcaatactcggtgccaaaacaggtactcggagccaaacttggatactcgttcttcgaatgaaaaaagtagggagaagctgggagaaagtgtcatggagggcggagcctcgcgcgagtggcttcgcgcaggcatcggcggtgagcgcgtagtactccagtgacaaggatgggagctcgtcgaacggcgtcatcaccgcgtgaccgtccagatgcccccaccgtccatcgctcccgtgctagaggaggaggaggaggagaaggaggggaggtgcggcggaggagaagagaagaggacatccggcgtcgattcggagctggcgagctcaatctgccgacggcgccgtcgctgctagggccgcccgacgttgttatcaccgctcgcgcctcgcgccgccctcgatccgccaccgcgtcgtcgcctttagggctgcctggtgccgctcgggctgtcctggcacttgcaccgcccttgatccgtgttatctaggtcgccgctagggctgcccagcgccgttcgggccgtcccgctgcttgcgcctcgcgctgcccgactgctccatcactgctcatctccgtctcgccatcagcctcggttcctctggtgggggatgaaaagagaggagaaagaggggacttcctctggtgaggaataaaaaaagggcgaggagagagggagagttaaaaataaaaaagatggtacctgtgggacccattacaagcaacttgcactgtggaacatatagcttaacacgttcttggtctatgtggcatgtgagaaacggcaaaaacgagcaacgcactgctaatgccataagataatcgattctaagaaacttccggaggggattttgtagtgcgattctctctttgtaggtgatggtgcacatagaggatgatcgcctgcaataccttttgtatcaagtgaactcactcaactacaccgactgctcaagaaaatcataagtaatataaaatcagtcttaaataaataacttcaataaaccagtagaaagaaataaactaaatcgtaactgatcattaatagaaaacggagacttctccaattctgtgtgcagatctctgtatggccacaacgaatgtcagagcacgattaatgcgagacttggtgggtgggctcatcccgtcaagtttgaatatcatcgccaactcggccaaaacttttactccttaggcagcatgccctattgaagctacgagccgcgttgcacgagtagcgtcctcctgcaaatggtccgggggagagtggaaagaacagaaacacttgaggacgggagagaagggcctacccagcaacgtctagagcatatctgccgttgatgagcacctccacgccatgaggttgataggatggcgggtgaaggagagctcaccttcattgcctccacaaccatcatcccaatcatcacaatttgtggcctcctcgagtgagagagagagacagctagttccggcgttcgttggtgggacggggagaagatggtactggaagaggagcggtaaggggtttgcggggagtgagagagtgccatttttttgacaaattatcttttcaaaaacttatttcaaaactagaccttgctaaaacttcaaccaaaaatgcttagtgaccttagcgccaggcccattggcaccgaacccccgccaatatggtgcccaagaagatccgctcgccgacgggccaggatcatagtgccgaccaccacgacgctaaggtgcccaacctcagcaccaagcatgttggcgctaaggtaatggaattaaccccatgcgcggccacacccagccgccttcttcctctcctctcctctcctctgcctaggatttgtacgacggagccaccctcttctctctttcccaaatgtacgcaaatccaccccaaatcgaaggggaatttatgggtagtgcgttagagattgatttgcacggtgaagtccctctgaaaaccctaatttccctaatgtttgcccatgtattgagtattttgattgaaaccgtggttaatttgttaaacgtggcacaggatgcgttgtgaattacggaatgtgggtcggcatgtaaccatgtgatgttgaggttgactagtgcagcactacgtggctgcccaacaaaagagttgtgttaggcagatcggtaacgtggcaaaatcctaaaccttagcgctaatgcggctggcgctatggttgagctgagtagcgccatttaggcttgggggcctcacttcacgaacctaccacatcagcgaggcgatgggctcaagctatatgtggacaggggattcaggaccaacatgcctagcattgagctgtaggacctcagggccgaggctgctggcgttgaggtcacggatcatttctagttaaataagtttttgaaaagggctaaattgtcaaaaaggaagagagtggtggcggggagagtggggatcaaaacagcgagggattatggatatatatgcaggtcttttttatcacaatgtctaaattatatgaagtttcaataattatctaatagagagtattacatgggttgaaaaatagtgtctaggggctaaaacgaaaaaaaaacactaaaatgtggtttgaagaggtggcggatatcggttctagtgaaaataagttactgaccattgttcaatagaaaaacaaaatgtttcctaatagcaaaaaatgagatgataattttcgttactagtgcaaatgaaagttatttgtatacaaaaatataatactcttgaaaatgatgattcttctagatctaagaatgtttgttttgatccaaccaacggtatatgtacatacaatatctacttaatttacatattatcagcgaagaaattgggggtacaattaattataccctcgtgtcctagagggtgggctcgtcccatgcggcacaacttttcttcatgaggacctccattaattgtccatgccctactttatttggatcttccactgcctctttgccgaccgattaacttctcttttccttttctttttcaaatcggaagttaaccgagtactggtcagtacatgtaatttcataaaacagggtaatatagtcaagggtttcactttgatgtcattttcaaccatatctttttttttttgcaaagttgccaaaaaaatatcgaacgtttagtttgttgtcaaatttgctaaatacattagaaatcctgtcaaaattttagcaatattgctatcctgctaaaatttggtaaggtttattttggttacaacctgaacaggccccaaatcattcgcaaatgtcctaagttatttgaggagacggagtgcttgctaatgcacatgtcacttgtgcacacagagtaacctttgggaaaagctcccaattgaatactcgagggattcatgcccaagtggatatatacgatcccaagctgcatcgtaattaatctctatagatatactatatcaaactaccaacgaggccagcccgattgacgaagttgcattataagttggtacttgggactgtataggcattaagaaaggtttcatctggaaggttagaagtaacagatcaatcacaggcatgcattatcttgattagatttgggcaattactatatgcatacttcaagggagataattattaaggacgagagagctacaggaagcaaagtacaagataagaactactgtagtgtattgaaccaattagggaccaaattaggcaatgctcataaaacaaggcaagatttgcatcatagctgtctgtacatcctcctcaacttccatgaaaccgtgagcgccgttgcattgcagggaagcgtaaggctagcagcctaccaaagctaggcagatatattagacgaacgcagagacgatggtgaaatgtgatgatcgatatatgtcgagtgtctctgataaggtaatcgcttattcaaatacgcaaaagttatctaggaaaattatgaaatagagtagaatttgcggtgggtccataaagttagaccgtaatatcactttggtccgcagtctttaaattgctctcatctatatccgtaatctagatttgatgttacaatatatccataacacctttggttgtccacggtagctggaacaaacttgtatagctatagtgcacatagctattcatctatctcttctcaattctcctcctttatattagcacggcggctctaggacgaggtattctgaaggggactaaggtggccagaagtgctctaaaaactgggtgtccactgttagggttggaggaaatttgttgctacagtgtctaagagagagctgaaaagtagcaaaactatggtcagcatggatatccacgtaggcagttcatcatagcaaatcaatatacacctttggatctgttgtgatacattaagcctgggttgggatgtagacaagcaatttataataatttacaagattatatctcagtccaactttaagatatataagggccgcatgaacttttataatattaccgaccatgaacttttaactatcatatataagtgcaccgcgtgacaactcaactataatatgatcttgtttcaggagttgtatggtttccttttttttaaaaaaagaacagatcactacgtaattttgtaaattagaaaattaaaaaaattctacgttctaacatatatataagcatttcaatatgttccatagaaaaaaaatctaagataaagagaaaatattttgttttagtcacttcagtcgtaaaaaaattgctttggattttcgtgcatgttggaaaccaatgcttagaattggatatattgtaataccaattttaaatctgagaaatgttaatattttacataggagagtgtaattgatctacggcgtgtgaattaccttggtacttctgattgattctaaatttctattttgttcaattacttcggaacatgggccttcagaactggcccgcacgtgattaccaaatcctttgagaattagcaatatagaacgatatcaacgaaccggcacatcactaaggccgcgttcgatagcgtgagattgaggggattgggtgaaagcagcactgtagtccaccgaataatttattcatcgtgaaatgcagtctagactgtccagtgacaggtgttagacagcagtagacggcgccgtttgctactgcacagatgccattcatttgggcttaggtagctgtagcgtctttttttttctacttgcaagatgatagatatttttgctgtgtcaaatagtagttacagcgttctattaaaagtagtgacgacaaatgcagaaaaaaaaatattgcaatttgacatatgggaaaaaattgttggaaaaataaaatatactccctccgttttttaatagatgacgccgttgactttttctcacatgtttgaccattcgtcttattcaaaaaatttacataattataatttattttgtgatgagttgttatatcactcataatactttaagtgtgatttatatcttatacatttgcataaaatttttgaataagatgaatggttaaacatgtgagaaaaagtcaacggcgttatctattaaaaaacggaggtagtagcaatttgagcaaagtaatgaaaaaaattattgaatacgagttggcacagtccaaagacttgaatgcagtacataatacatatatccatcacgaaatggatttcttattaaatcgtacatctaataaaaagctcgtacactgtacaggagatagttcatgtacttctacaggttctccaccgaattggcaatggcatcacggtatgcgttcatcgcttgtgcgctattgccggcgtaatacatattggagaaggggggtgccattggtgctataggattaccattatacagagggttattggcctggaagtcattttgcttgctgtcgattcggaagttgtgcaaacaaaacgctgccaatattatgtcgctctggacattcttgtatgggttgtacggtatgccttttaagattttccactgttttttcacaattccaaattgcctctcaattatattacgtagcttggcatgtatgtagttgaacttctcttcccttccttctggcggtggagcgtgtggccccttgaattgatccttgtggtaccgtacacgtgggtacggtgccaggaagcccatcctactcggatatccggagtcaacaagaagatattttcctacaaaataataaggaagttatacatgaaaactatcagtgcacaattaatgaagtgctatatggtgtacaaatgtagtacttacgaaaaggtagtcttggaaactcctctggataagagtcaatagcttcgtttaggactcgattgtcatgcactgatcctggccatccggcatcggcaaatataactctaccatcgaatccaacaattgttaggacattttttgttgtctcgtcatggcgattcatgtgttctatggcactatccacaccaacagtgaccggaatgtgtgtgccgtcaacagcacctacagcaaactggaatggtccaaaacgactatcttgtagtaggcgacgagggatgtccgtaaaattcggatcaattggcttgagtattttcgaccctaacataaccattcggctaagaacccttcgaaaatagatagacaccgtcgagttcgaccggacccaacgattgttcgactcccttgcagaattatttcctgccattgtgaacaagaagattcctagtgcctccaaagaacttacatcattactcccatgcaggttgtaaggggcattttccaaaattacatgtagagtgtatatctgatattccgttaaacggaaaatcgcacggcactgtgcagaattcgccattgtctctagcatccaagttattccaaattgggttgggacacgatgaggagctcttggaggagcagctaaaatctcttgcatcattgcaataatagtgtcatccttatcgctcgtgtattgcccttcagtaccatacgaactccacgatgaaccgtcgctcattgtgtgattccttcgaaacaagaaaaatatttagcttacattaaccattacaacattatttgtaaaaaaatgcacgcatggtgttcaataaaaaaattaactgcataaaaaatttcacagtgacataccacaagtaccagttcagactacaagcattagaaatgagtaaagcagatgctaaaaatcatacaacaagatgctaaaatcatacaacaagagggtacaaatcatacaagaaaaaaacagttaagcagatgctaaaatcctactgcaaacagtatggtgagcattattttttatgcctctcatatgaatctcctcctctcagtgagctccaagcaactgaccaagcaagagcaactcaatagaacccattaccatctacgctaccaggacccccacctccaccagggccacccccctaccaacctccaaaccctgtatgacctcctgaacaagttggcgggggtactcctccaccataaccctgctggccagttggcgggggtgctcctacaccataacactgctgcccagttcctccttcgtatccaggctgtccacctccttggccaccagctccttttccgccaaattgcttttgccatgtctgtactatgtaatgggaccgtgactcgggtgtagggcagtaatcaatgaaccattgacgccaataagcacgctcaaatacatccagtgccataaagaataaatcactccctgggttatgtccatcagctaccaccaactggatgcaagctgctgcacttctagccctgtcctcttccaccttccgggaacggctctccatcaactccactcgcaaatcagctagccggtgcagggcatcaccggctgagtcacttcgactcttctttgaagccgatcccctcgaagtgccagcttcatctgctagcctcttgccttttcctgcacttgaaactcctggagtcgcaatgttttgttgttgagctagcagctgtgagatattgatgttgggccttggagttggctgctgaggaggtgctggtgctgcgcctgcaacagcagagtggttccctaccactgtgcgccccgaaaaaatagcacagtgaaggtcgatgtgcttgagaggggaatctttgaagacacgagctccgtcctttttctgcaaaaatggttgagtaacaaaataaatttacattgaaatgaacataagtagtttcttaaatcgattttcatttttgcattttgttgacgctttttgaactaaaaaagcagcagcatacaagtacataactaatgtacgcagtaacatagctattattggtggcaccatgttttaacatctgcagactgcaggtaacattttacctagattttacggtctaactaattcaagaaaatggaggaagtactatatgatattgatatgcattgacaataatagcagatgatgagcagactaaaaatcaaaaaactttatgccatgtaagcaatgtgacatgtcacatagaggttgatgtcatgtcaaactatggcatcaacaatagcataggaataccaaatatctcaagatatggctcagttttgttgaaaagacctacaagagaataataaaaatagtaccaaccatgcatttgctgcttcctaatcaatttattggaaggtagtgaatagaacagagaaattgtacccccattcattatagcaaaaaaattacattctgattttgtagcctagaaacacaaggttttacaaaggtacataacactttctatgaacaatatgtatgattatacctaaaaatagataactgtggagatttcatgaactaaacaaatgtcatgggtccttgtgttaatgcaaatcagtatggaaatcactatcttcctagttcgaccgaacacaacataagggtaggtgacatacctggtccttgtcttcccaccaatcgtcgtcagcaacaatggcttgagttatcgggtcacggccaatgccggtagcctttgattccagccacgtccaaagcatccaccttttacgacattgacgccatatgtacttcacttgatccttggtgaggtttcttccgattctctccttcatcttctgtatgaggttcttgtagccttgcggctttggacaagtggatgttatggtcattgcggacaactcctccaagcatgcctcaagaaatatgccaatttcatcgtcgctccatcggattttaccctccgccatctaccacccaatgttaacaaagcacaaatgcaatggatcaaaaacaaattacaatgggcattaccttttgtggcgagatgggccggatcaggtccaaatcgagggaccgaacaaccgtcgccggcaacacacgacggacgaaagagcgaacgccttctggggaggtcgcacaaacggctgttaggaagcgggcggccacattgatgtcattgtcacaaggaggggcagagctggcgtcagatttgccagaggcgctcgaccccgtccccgaatccagattgatgagcagtccgtgaggagccggtgcggcgaacgccaaaggcacagcctaccccttggctgcagtcgacggatggatgtcctcccctctcttccactttgttcccctggtgcccattgtccacccggagaaggaggcctcaaataggaggccggaggcgagaagaaagcttccaactctgccgaatcttgacgacactgtgacacccgagagcactccaccgagtacagccgcatgcggccaaagctgcagagcctgatgagcagctaggtgacgcagacaacaccggcagcgctccccgacttccgcctggcttgatggcagctccgccagagaatcccctttctccggcctcgattcgccttttcagcagctcccgtgacgagtggtcgatttctccgtgtgcctaacagccccaggctgaccacgacgaccaccggacgaggctcagcagtagggcacaacgattccagccacgacgactgcgcgtggagccgtcgacgaccgagaaaatttggcgaaggaagaaggggatcgatgggagagagagagagcgagcatggctgcttgcgctggtggtgggttggggacggatgggccgacgaatcgatccatccaaatgccgtctgtgccgtttgtacaggtgccacgtttagtcaccaacgccatttaatatgcagtaaattattcagacatatacagtgctgaacagtgcacaattcaccaaatcccctcgatctctcgctatcgaacgcggcctaagttcacacatcctatacacataaatttccttgcacatgattaatgcacaccaactaagaaatatcgtaaaaaattctagaaaaagtacaaataatacggaaactcaggactgcgtttaaaatgggatggagttagcactttgctaattagttgctccttacctagcatagttattggtatttatctctttcatcaaaagccgtaagtagttaatattactatttcttatcccaccaaaacttcccccctaagctcctgggtaacggcgagcttgtctgttatagctagtagcgaagcaagggtgcaacaaaatcaagataaaaatctataacaatttaccagctattggggagataaagtacaatcgtacaacatattaatgttatcgttagttacaaattattgcaagttgcagcatgggtcagtttctagaaggtatagtaggaatttcacttcaaattttgtattatatattttctaggaactgttttagctcttatcggaacttggatatatattatgtgtggcaagaatagttagaaataggaatatatagggtgtatatatattgtgaaataagatcagaattcaagattaaatatgttgaagttaaaataccttcaatttctttatccttatccccaactttcattctaatcctaatgacagactctttgatattacataaatactagctagagtaattaatttaatttaactgatgtgctgtgatgaaggtgctgttcaatcccatgcatcaggttggatccgcccctagtttctcactatcaccattcgaggtagatacctcctagggtaccggatctaggctagaagccctagagaatattcataagattattaatttgtaatggagaacaaagtatggaatataccctagaatatacactcatataatatatactgtagctaattacttccacttgcctaaaaaaatatctctatttatacaaacatcttagtgttagagttagttaattcattatctagaaaaaaagagttagttcattcattgccatatagatgaagatgatagacgattataaatgaattgaacgttacaaagttgaaaatttacaatgttaaaaaggttaaataagaaatgatggtgaagaaagttacggaaagatcgcaataatctattacatatcccagacatcgtccgcggatccctatttgaagactttttaattcctctaaaaaaactatgcgtatgtgtacatatctattttttcaacatacaatataatcacagtattaatttactcaagagccactttagatttaagtgtataatcctatttatcgtcgtaaacacggggaacaaaacatgacacgtatgggataattggcatctaagattaatcgtttaatttcataactgaactagtgttttaattttttttttgaattaaactagtgttttaattaagatgggtcgtctagagatttggttttataggaatctttttttccatgtagtcatgtattatccgtttcaacatataagtatttactagaaaaatacccgtgcattgcgacgggtaaatactgttttaattttattattgttatacagtttagttatggtaaaattcactgtgggaattcgtttcgatttatttttaaaaaatcatgagctgcagttaggagtccgacttttcatctcaagttagtaggtggagttttctaaagagatttcttatatgactgattttgtatttttaaaagcaaacgagcttaaaatcgaattcaaacacgcatatatattttcccaaagcaaatgatcttaaaagccggcttaaacacggatgacataccaaaataacgacaaaaacatattcaaattttacaatagtcactactggagaaccccacaatactcccggttcgcaaccctctcttttcctgggtatgcaaccagatactcaatctttagttccggttaaaataaacgagactaaagatatatagatctttagtgctggtttgtgggctaaatgtttttctattgtttttttctgtttgcatattgattttaagccaaactcatcacaaatcgtagatcacaaattaattcacatatcaaaataacaacacaaattcacatttcattgacatcacaaaatcacatactcaataaaattcacagattcatacacaacatcaccacacatcgcagattcacataaacaacaacaaaaaaaaaaacaagcgctgggagggagacgagctgtcaccgcccgcggctgcctaggtagccgcggccctctgcccggccgtaattgccgcggctcttcgaggccgccgcctcccgccgccacccacagctaccccttgtgccaccctcgtgccgccgccgccgccgcccctcgtgcgggcccacgtgaggccgccgcccagccgcctgtcgcggggccggctcactccgctgccgcccgccggaaggggaggggaggagggggaagagagggggccggatctgaggagaagaggaggagaaaagagataaggtgttgaagggatcgagacgagggattatatcggagagaaagaaggctgccaggaagtgcgccgatcagggttgattttaatttccggttgtttaacaactgggactaaatatagatctttagtcccgattggtagcaccctcttcctgcggcaggctgcatccaagatgacgacagtgactgccccaatccctctcgggtgcggtgggcggtgaggcggacgacggtggaggtagcggcagtggtgacaacattgactcgggagctagggtttctacgggttgtgggctagggtttcgatcggtttggagttctgaattttttaagtgggtgcatgcaggccgcctagccacatgcatgtccatctgaaaattgatttctgtactagtgaagtattaaaaatttgataaatcgatttatttgatttatttttaatatatatatatatataatatttctttaaaagaacaaaccttttatcggtttgagaggtgtgttcataataaacaagcgaatcacaaaatccaaactcaggttatagtaagtacgtaccgtaccatgagttgtcctgctgtgcatataaaactgccatgactctaaacaatttcccaacaaaaacggcttataaaagcacgtaggctctctatatatagccgatcagcttccagctcttcatcccagcttgcatcgttaccaattccaccttcactcgaccactccaacaaaacatggacatctctcacctcctcctacgcttcttcctcctcctcctcctcctcctcctcgccttctcgctcgacgatgctccccatcaccattgcactgaagctgcagcaacaactcttcctccaccaccaccaccaccattctccttcaaattcgacttctccaacacctacacctaccgcctagaagacctccgattcgagggcacggccgccgtgcacggcgccaccgtcgacctcacctgcaacgtcgcccagtgcacgacggggcgcatgtcctacggccgcgctgtgccactctgggacagagccaccaacgaggtggccagcttcgccaccgagttcgccttcaagatcgtcaccccggacaacgtggccaggggagacggcatggccttcttcctctccagctacccctcacgcgtcccccccaaccccagcggccagagcttcggcctcatcgccggcgacgccgaccacgccggcgacggcccggaccggttcatcgccgtcgagttcgacacatacgatgacaccttcgaacggccgaggccggccggagaccacatcggcatcgatgtcagcagcgtcgccgactcgattaacacgacgagcttgaacttcagcaggaacggggccatgagggcgtccatcaccttcgacaatgtcaccaggatgctggtcgccaccgtgcagtttactgatcagactactgcttcgcgtgctgcccctgttcaggtgagtgcgaaacttggagatcccagggcgttgctgccatcggaggtggccgtgggattttctacggcgaacggcgcaacattccagctcgatcagatactgtcatggtcgttcaactccactcttgcgtctccacatcccgtaaccaaaggtaagcaacagcgactctctccataccaaaatatataagaagttttagaattggatacggttattaagaataggcatagaattaaacgggaagatgttgtgattggttgagaagtagaggtaagtgagaaaaataaatgttggagggttctgattggttgggaagagaatgctgatggaaaaattgttatattttgggacggatgaagtataactttgaatagtttcagttttatttttgggtaaaaaagaaagtcgacatgttcttttctgccaagaaaatattttttattttccaaaatctggaaaactaacgaattcgtgaatttcaaatatcttcattcaaaaattcacaaatacttttagctatagtaagatttagaacagatagcacatttatttggtatatatacagcttgttttttatcccgttaaatttgttgttgattaatccgcggttacatgcattatgcctaggtgtgttagcggcattgatatttgtgatcacttgcatccatgttcattttccacgtgatgtgccggtatattgggaatctattcagctcaggattatttttttattgatgcaatttgcactgatattgatgcacatgcaaatgcaagtcattattccattccaaattacacacgctttcgtggcttatccatatttttctgcattttgctcctactatagaaaccacatgttttacagatggctagatataaacaaaaggaaaatgccacattctttagttacgaatgcaacacttttttccaatggccaaatgccttttttttcttagttatctttatttatttcctatggagaatgtaagggtagaattgacattttaaatgttgaatttgcatatgcaggtgatgtggcatgtacacgtggcatttagcctttgcatctgaccgaacaccattaattgttgcatttatgtatgcagcctttggaaatcaatttccacgcatcgagtttttctatacaaaagaggggaaaataatttgtatattcaaatgattttgtgtgaaatacatgtgcgtacagcgtattcaaacccagaacctccggttgcccgcgtagcctccatagcatctgacctacaaaagcacttcctacttcaatggacatgctacctggtcacatagaaaaaatatcatcaacaaaaaaaaatatggatctcgtcaaagtctacaacttttatgtataacactgtgtccatctaaggtagtttaaaactctcttaaaaatcagtgatccaaatagatatgaaactgctaacgtaatttggagtatgtaattgatctataatttttaatataaagtttttatttatccgatttcatagaaaaaattatgtaaaaaatgcacgtatgagtggaatcattttcagagagacacagtcactcaaaacaactgtcccaacaaataaggctatatttattcattttcaaagagaagaacttaaaacaaccgtatctgagagtcaattttcatcttaatagagtcaattttaaaggtcttccatgaccgcgggcccctgacatagtgcatagtagtgtaacaaaagagtcgacccacttcaaaaaatagttatttttgttggtgtgcatgaaccgattattggcacatgctggacttaggaataaccagtccccatttttaaatccatagggcgactccccatcattgaatatggtctcaccgatcacttatccattttatatctctcctcctatggacctacatctttcaatattcctagcattgaggtcaaattatatagctacaaagcaaattcattttgcacctcatgttattatcatttattttcaataacgcacatctagctaattactaataaatacctgtaaatctgttatcatggcaccatggatatgcaggtcatcacaaaaagaaaggggcagcaggaaagtttgcgattgttggagctcccatatttttgcttctggtgtggtctatcctatcatggtggaaatggagaagctcaagccgcgacattgacaagagaactggaggtgttaggcagttcaagtacaacgagttggctgctgcaacgaatcagttctcctctgagaataggctgattggagctggtccgttcggtgaaggctacaagggtttcttcaaggaaatgggccgtcatgttgcgattaagaagatttcgaaggagagcagatcagaaggaagtaataaggacttctatgacgaagtgaaaaccatcagcagtgcaaagcacaagaatctcgttgaacttgtcggttggtgcgtgaagcgtagatggaacatgtttgatttcatgtgctggtgtagggagaaggcccataccattttcttggtgtatgaatttgtggataacagtaacctccgtgttcacctgcacgagaaggaggctgtgcttccatggacaacgaggtacctgtacatctacttgatgagcgatgctgtttaatttcctttttgaaacatggaagtaaataattaaagtggtatcaaaattaagtctttaacatgagatattttacgttgcttgagaaagtacacttaaaattttggtacgtcgagatactaataggtaccaagttttaaactagaaaatttggtacgatcccggtgtcttcttaaggttgtaaaattgtctctttaatttaacatattgtctatgcatgtatcatctgtcaggtataaaatagtgaaggacatttgcgcagctctggttcacctccaccatgaaagacgtccattcgtccttcacagaaatatcaaaccaaacaacatactcctggacaaagagttcaacgccaagctagcagacttcgggctgtccagaactgctgacaaggtaggcaaggccagatacctggatccagaatgcaaaaagacgggaaagttcaagcgcagctcggatgtctacagctttgggattgttctgctagagattgcgtgcaagaaggatgaaaatagctttgcgaaagtgtggagccggtatctagagaagtctctgatgcaggtagctgatgacaggttaagaggtgagtttgatgagaggcagatggagcgtgtcatcatcttggggttatggtgttgtcagcccaatattgacatgcggcctaccgtgcaacaagcaatggatttcctggagagtgatgggccattgcctgaattggctgaaccggagacctcctcaagtaaaattggtaactaagagtagtattagtcctgctctaccagcaggatcaggcgaagaactgctggacttagttaataaatgcttggattaatacgagcataattttttattgttgtgattcctgcaagttattgtatcttctacatccatttatgtttctaatcagttgtgtcattgcctacttcgctttgagatttggatagatagcagcattttgggtaaactatgaaataagcccgcccacatactccccactactgtgctctatttatattaccaccctagttagtggtaggataaatgtggagggatattattttttaaaaaatggtctggagaggtataagcatcatttagcaatgaccaagctttcactactacagaaagggtaaaaggtgccggtcgaaaccctagctaataagtgccggttttccgaaccggcattaaggaggcgttttgacctaaaaaccggtacctatatggtttaaataggtgccagttctaagccagattgcaacgtaactgttaaataggtgccggtttttagtttaaaaccggcaccaatacggtcctaataggcgtcggttcaagcctaaaaactggcacctatttattgggtcaaaaaaattatagtaaattcatccacacaaccccaattccatataaacccaaatttatccccacagccccacatccatacagcacattcattcacattcacattcatcaacacaaataaaaacctacgagccattaatcacaacatataaaaacctacaagcctaagtcaaaattcgaaagtccaaaatttcctatctttaaatcctaaacatttgcatatataacctaactcaaaatatacctagtttaaaattcctaagtcaaaagattgtaagtctaaaatttttaagtccaaaaaattctaagtctaaattgtgaacattaatttgcacatatatccttaggtcagaaattcaaaagtctaaaattcatcagtccagaaaagtataagtgtaaattctagacatttccatataatttacattcatatcctcgagtaaagagcaaaagagatattgctgggactcagcgtgccagtcaactttagcctgagacgtgcccgtcaaaccacacgaaggcagcgaccggatgtgttacacatcccaggagacttgactaaatcgctagagctctataacatctcaaatgctttaaacatttacatatatatcgtaactgaaaaattcctaggtctagaatatctaagaattcataagtgcaaaaatataaacgtgattgttttttacctccaacatggggtgagcatatgattttaaaagtttcttgtcctcaagtcatcgagcctataatagaaagcataaaatagaatccataataatagtaaatattgaaatgcattacacataaagtacacttccatagttcattcataaagactaattaaatacattttttcacataaatctagctagttggtttttcttttcctaggagttaatttcttcgtggcttggtcccgagggggagggacagaagattgcactcgttgtgggaccttgtcgatgttgtattcgccacttttgccctgaaaaaactttgaactcatttttttaaaactttcacctaaacttaataaacattcatatcaaatttaataaaaccttcaactcgattttttgaaattttcagctcaaattttatgaaattttcaactcgattgtttagaatctgagcttgtttagaatctaaaacagaaacttcataggatggtaaatagcaaccaaaatggacaaaataaaattacacaaaatttatcttagatgccacttggtttaccatactagacttgccattttcctatgacgggaactcagcgaccacttcaaaataaactggagcgtctgaactgccggagtctaaacgacaaacaaggcacacaataaatacaagctataaagctactaaaacagcaaaacaaaccaattttaatggattcttggcattttaacgaattcactgcaatttgaatgggttaaaacggagcgcagattatttagttatgaattttacaagatactttgtgttattactaataacaaaaaaccttagttaatttacagagattagagcccaaaaggaatgtaggatcaaaggatagattgactggcaaacgagcctcacgagatacggactcaacaagtcacttccacgtgacacgggatcacccaaatcatcaactgagaccggcgagcggaatcggtggctctaaacggctctaacttaaggacgattcgggatggacgaacgaacgaaccacaggggacaccttgttcgaacgaacgagcggacgactcaacaacgactgcacgctagacacgattcacgataaagcctcggtacggcaaacaataggctggtaagaacctagggttgcaccgacggctaggcaactcaactacggagctacggctaaagcggcggctaggcaaagacgcacggcggaggcatggcacgtggcgcaacggcagcggctcggcagcagcggaggctaggcggctcttctcggtggcggcagcggcccagcatggcggcgataggagcggcggtgcggcggcggcacttggcagcaacgcagcacaacggctagggagcggcagcggctagggcacggcaatggctcggctagggcgcaacagctgcgacgcagctactatgacacacgggaaccaaataccaacaggagggagcttctcaccggggtgcaaaaccggcgagggaacacgacgacggcggcggtggtctggcagcaagcacaagatcgatgacggtgcggcgctagagaggacacaacgggctaggttagacagcgagacaatcgacattgggtttaaccaattcaattgagagggataatggattactggcgacgcgagggcgacgacggcgacggtggcggcgcgacagctagggcagcagtggtgatggcgcgctagggcggcggtggcacctagctaggacggcggcggcggcgggctagggcggcgcggcagctaggggaggaaaatgaaagaaaacagtgagggaacacttaaataggggaggactagattaggaaaggaggagtcctagagggagttggactagaaggaggggagggagaccgactcgggcaaggggagggaaggcgtgcgtggcatgacgtgggagagggtgcggccggctgggggaggggaaggaaaaaaggaaactaggggagactaggactttcccaaaaaggaaaaacaatccggtgctgttttaggaaaagaaaggaaacagtcctgcgaactgacactgatacggttcgtcatgcaaaacgaaactgcggactgagagggaagtgaattgtgcacaactcacgaccaaaggcaaaggaaggaaattattatcttgacacttttaacttagcaacattgcctccagtgatcgaatatttactctttaagtcctgttagtgattttcagagtaaagagaattcgaagaaaattctctctggcaattccgattattaaatgcattgttaactggggttttctcttggttaacccaagcaaattcttgaagtcattttttagcgatttggaacctaagggaagggaaaactccaggtgtgacacgacggctagggtttgacgacgtaggaaaatagaaaaaaggagggggtatgatgacttatataggtggaggtggagttggattaggttagggtgggttcggcggtaatgcgcgcaaagagagggagggcgcggcggcttcggcagccaagtaggagagggtgcgggcgcgcaggccaagagggagagggggaaagaattatggtgggagggggaatccaaataggaaatgagagggaaacggtgccatttcgggaaaggaaaagaattaggagtcatcttgtcataaaaaacgaaaccgcggcgacaaaggggttggcggatacgaggaaccgcgaacgaggagagtgaatcgggaatgattcacgaccaaaggaaagagagaggaaacaattttgaattcaaatcctggcatttttctttaagttaacattattacttcctctgctctgactattccttttaaagtcctgctattgatttaaagcaaaaataatttgaaaaaaatactccctgactattctaattattaaccgtattgttaattagggttttcctcctggttaaacatagtgttttctatagacgatttgtcaatgatttagaaactttctccctaactattccaattatattgttaattagggtattcctcctgactgtattgctaattagggttttcctcctggttaattaaacatagtgttttctatagacgatttgtcaatgatttagaaaaactttctccctgactattccaattatattgctaattagggtttcctcctggttaaacatagcgtgatttgtcaatgatttagaaaaactttctccctgactattccaattatattgctaattagggttttcctcctggttaaacatagtgttttctatagacgatttctcctagttaaacatagtgttttctatagatgatttctcctggttaaacatagtgttttctatagacgatttatcaatgatttagaaactacggaaaagggaaaaactccgagtgtgaccttttgacacgtgtgacgtgcacacgcgcctcacgatgcgaggccggagagcgcccgcttgtgttccctttgttctcttcatctcatctcagatgcctgaagtggccaagagacaatcctcccttataaggaggtctctatctcctagaatagccaatgtggtactaaagtcatcatgcatgccatcctataatgtaggattttgtgatttttcgaacaattaatcgttgaatgtactaaggcacatccattaattccaacattagaaacgtagcaatacctccattttcataaaaagtaaaacttctactttgatcgaaatgaaaaaaaaatccatttgcttcatcgaatcagccgaaattgcatgtttccatgttggaatttcttagtttggactttaccctattatattttttacgttttttactctttttgagtttttcgtttctttgtttcgaacagggcctaatgactagagaaccaaatagtctaacacactacatccatcttaaaatatagttcatccatcacaaaataattaaacctattatgagatgtgacacgaagactacaaatctagacaaagccctccgttctggtttaatactaatttgtatcattatattagatttgtttatatggcatcgaaagaaaaagatttgtttatatgggatagagggagtaagatataagggagtactcttatactactcgtcccaaactatagcaacctaaaaccagataagatatattctactattataaatctggacatggacatgttcagaatcctagtagtaaaatatgtcaattaagttttagtaattgtttagaggaagtatatattttaatcagagattgaaatttcggtttgaaaattttgaaatttcggtaatttcggacccccacggcatgacaatatctcagcagaaatttttggtttttctcaattttttgtgaatttagtcaaaatttagtcaaattcagttaaattatgtcaaattttcagaaaatttcggccgaaaaattactgatattttggaaatttcagttctactggaatggcgagaatttgagccaaaatcgaaattgaaaaccctgattttaataaggaagttaatactatgttggtactcaattatattcatggggtgggcacacaggacgtacggtgtgcacctggcggcagaacagcccattaatgggcttgtttactggctttcttctctttgtgggctcgaccatgtcgcttgtgtggaattgaagcgtacaacaaattcctctgtactaatataaactcatttatatatataggaataggacagaacccactataaaaaatcttacttaagaaatgaatgtaactctccaagcgattatttcctatattttccccactttttcaatcatctgttttatgcatgcaattcatattaatttctatatttccttattcctgtgtttgcattttttgcgttctaaagaagcccttgatctcttcaaaagtacagtttcttatatttttccatcgagggaggaccaatcatgcatgtctaggttttgagctggcattattcatctatatgtacactagagaatcggtccaaaactccaaattaaagcttccaatcaatttgcgtcactgtgtcatagtcacttataaatgcatatacatgttatgagactagcatattgttgaatcaatagttgatggcaggtgcagattagatggagctgtttggtgaaactgctgacaggtgcagcttctatcagaatgttcagattccaatttatcatccacaaatctattatataaaaatccatcaaactttatataaacactcctaaaacgtcacgtagtacatttaacaacgcttctaaaccatcacttggtaacattataataagtcggcccattgttttttcctaaaaaaaaaccgatgatccactattaatatctatagatgtcataggttgaattggttaatatagcaattctttgaaccatgattaaatatttgtgcatatctgtgcaaatatgtgaaatttccatttttactatacctgcatgatttgcacagagatgtttccatataagtttgcatgcatctactttccaaattatatgtacataatcaaatccactaatttcggtgtaattgctttattctattcttcgtgtatatatatatgggcagcgatgacattccattttttacacactctagtttcatctgtccgttctgttacactccggatgtcgaccacgagattcgatgcaaccactcgtccatgagcatcattgttgacaacggtcatccgtgaccttcatcgcaactagtccttcacaatattcgtcccgatgccattgtcccaccggacgtgcccgagcttcttcgtcgcgggctgctggtcgtctgcgagatctgtggatgacattgttcgtccacgagcttcattgccacagtcaggccaccacaatcttcgtagtcaagctgttacgccaccagacatccaagagtttcttcgttgccaccactggtcatctatgagcttaatttgccgcagccactggttgtcgcgaccttctcgtcctcaagctcgttagtcggcccaatacattgttggttttgttcatggcttgggattgttttttcaaacccaaaatttgggtatacatactgttccaaagttcgattcaaattttgttaggttcgttaagatctaattcacttccaaaagtattttccatgcatcagaattacttttgggttcatgcccaatatttggatatatgcacatattcacgcgcaaaattgggtatatacaaaatacttgactatatacccaatatttgagtatatacccaatatttggttatatgtacagttctaaatttacacgtaaattgggtatatactgaatatttaagaatatacccaatatttgggtatatgtacggttctaaacttacacgtaaattgggtacatacccagttttacatgctttttttccgtttccacctaattccaaaaaaaaaaaccacgcatgtataaatgcgccaaaatgtgtgccccaaaaatcacgggtgtggtgtactttttgtctgtaagattgaaagtgagccgtactacagtaataccaaaactaatgacattataaacgataaaattagctacatctacattaccatatattcagctgcaaaatatatatacacaaataacatatttccaaatacttagtttctatgtcgccaaatactgagtttcaatattccaaaatacttcgtttctaaaatttgtttatatttttccaaataattattttccatattccaaaatgcgacattttccatgatgttagagatatataaccatttattcaaacgcgtacgtgagttttcatatttacatgatattattaccaattacatggacatgcaagatttccattctgaactttaaacacacatatggaaagtctagtaaatgggtttacacctgttaagataactaggaaggtagcccgcgcatatgcgcgtgcatcttatttaatgtacgtaaaattttatacgaatatccatgtgtggatgactttgtcttaaaatattcttttactatatctaaacaaaaaaaaagaacttgctagttataatttttcatatttacatgatattattaccaattacatgcacataaattctaaactaaaattactcgagagagtacacttctcaatttatgagaaagtattatgtcgaaacaatatatgtagttcctatgagataattttgggtattttgatttcctacagagataacttacccccaaacatttgctcacaatatccatttttttttgttagatgctatttgaagttttacatattttcattccattaccgctgctaaaagtttgaatatttctatttagaatgggtttttaaaccatttcaaaaaaaacagataaattttgtttgttttcatgtccattttttaaagaaatttggagaattccattctatgaagcatctttgaaatcttttgatctctgcaatttaggttgaaaacataagtgggttgagcctacaacttgacatggggtaaagtcatctcttctaaattatctcacttcaatagagtaagaaatattaaaatagaggtcatgtaataaatacacatttctagattgttctatactaaatgttaggagtttacaatgtagcgtagcaagtactaccaaaatgaaataaatgacatgatttttaattcctatatggaagtgactcattatattggtaaggccacctcatcattgtttcactactaagattctttgttgcaacccacatgcttatatgatcaatatgatgttcaacttagcatgtttttattttcattatgttgtctataaaaaaataactctagatggggtacacattatgactaaaaacaatatcatttaaagtttttctctaatttagtagtgacttcatagatcatatacataatttagatgctatgatcatctaaagattatttatttatctcctaagtggatcatttattgataaaaagctcaaatatcaaattgtatgggcaaatagcccccatatacatgttgagagaatttaattaagttgatagaaagttgttaggtgtccaactagatataactaatgggtgtaccagctttattaaaaattaaggtgggatatttcaattttcaatgacgaattttaatatcttctttatttagtgttggcctcaagatggatgtaggtctgcaatgtaatttttatgttggcatttaaatatggtcaatatgaatatgaaagtattgatttcactaaaaatataatagttcaaacagatcgtaagttgaatttatgatttgaaaagttataattattttaatttatgttgttccaagttatagtaagagaagaaagagaagaacagtgcgatacctggctagaccatatatgtggaaggttcatttatggtttttttctccataaagataattttaattttagttatcataaataaagataaaaataggagaaaaggaataacacacaccggacggggacagaccggaagggagggggtgtttttttataaaaaaaatgattgatctaacaacttaaaataatgtgttttgatgtttaagtcgaaaccaatggtcggatgttttgttttttctctcataattttgtatgtttttttaaacttaaaagagacccctagtggtttagaaatatttataggatgtttaatgtagttttaagtcttaaacattgtaggggcagggaggaaggaaataaggtttgggagtttttttaaataaaaatctaataacaacctaaatgataatgtctgtttaatatagttttaagtctttaacattgtaggggcagggaggaaggaaatgaggtttgggagttttttaaaataaaaatctaataacaacctaaatgatatgtccatcgatttaagtcgaaaccaatagttggatgttttgtttttaaatttttatgattttctcaaatttagaagtgtcacggggtggtttttaacgttgcatgggaacgcggagggagatttgtgattttttttgaaaagattttattttttttagattttctctaatttaagagtgctatacactccctccgtcccataaaaactcaaattagaatatgatgtgacatccaagaacaacaaatctcgacatatgtttagaaatatttatatgatgttgaataaactatttattaggagagaatatataaagagttggctatatctaataggttgatgggctttttaggcccataaaaaagtatttaattttaattgttttggggattaaaaaaagaaaggaacggtggttggagggatcgtacatatgtgcgcaccaaggctgacgtccggactccggacatagattttttttccttcgattgaagataaatctaactatcaaaattaatgagtccacctatttaaatgaaaatcaatggtcatatttttactattttattaaagtgacacatggtgactcgagagcgtttataagatgtcacatggcagtttaggagcgtttgaagaaagtttaatggacttttaatatataataagagttgtacctcacatgatcacaccgatcctgtggctcgcaaccaatgagctccacatacacgcacttgtgtttctctatgtatgtatgtatgtaaacactataccgcacccagggtatattttagaaaaacgctccataatgtctttgttcctaaggacgcttaagctgggtttgggaggtggagttaggaactccacctacccgcacgggaaacaatgttgctcattaacacatgattaa

SEQ ID NO: 21472 - DNA, 8598 bp, Oryza sativa
aaaagtatacgcgaggaaaaagagagaggtgagataggaaaggaggaacaacataaccttaggagagcgggggcctctgtcaaacagtacaactaggtaggccatgcggtacatggccatggacatcaacctcctcacttgcaagttgcaactaggtaggccacgagacaagttgcagagcatgagttgttgcagcaatcaatcttttatagtatatatatactccctccgtccaaaaaaagacaaaccctggtttccgtgtccaatgtttgaccgtccgtcttatttgaaaaaattatgaaaaaaattaaaaagataagtcacgcataaagtattcatcatgttttatcatctaacaataatgaaaatactaattataaaaaaattacatataagacggacagtcaaacgttggcacgcaaacccgtggtttgccttttttttgacggagggagtatgtgtgcaacacccttacaagtaggaggtaatgtcgatgatgggggcatgatgtttacaggagacctgttttgctatcaagagagaatcaagtggatggaggttttacacgataagaaatggaagtgcattcatggtactacacctgtactacgtactccctcggtcccaaaatatttgcttcatccttaataccacaatggtaggtcaaatttgggatgatgggagtatagaagatagagcacgccgagcgagccggcattacttttagccgatcgacttttattattttcttccttttagattagttttatccgataatgctattattagtagcctgaatatatcaaaacatggcagcaatgattgctcaaaaaatatgacaatatttaataatttagttcttgagattaacaaatggcacaacccgtattctataatggatattcagacccaacaagagtgttcagcacctagctaaagattagatgtctaagttatcccaagaatcaggtcttttcacgacatgtagaaaattgtttgggcactatcaaatgtttcaacttacttgataaaatgctttagagaaatgtaacatttaaaaaatagtgattgcaacaccaacagccacgtgaaacatcgagtcccaatggttattaacaatacactggtcaaggtcacctgtgacgggcccaaaccctcacctttgatggttttgggcttggtcaatgatcagtggtcactggtaagtccagtcacctttgacgggtggccggccgtcagtggtgacatccacctctgacgggcaagttaatagaaggccgtcagaggtgttggtctaagctagactagggcttgttaggacccgtcacaggtgtctcatctctgacgagcccctaaataaaggcccgtcagaggtgatgatctccggtatatagtaagccgtcacaggtgggtcacctgtgacggtccgacgtttgcgagtccgtcacaggtgaggttacctgtgacggatgtttcttccgaaccgtcactgatgagttaattccagaaaaaaaataaatgctaaatattggctagcctcaggaattgctagccatgccctctgaaaaacagaaacatcacaggtgccagtcaccccccctccatatcacatattccccaactgcccaacatcacagatgcatcacatatcacagatccatcacaaagcaacaatttacaacatcacatatgcaacaatttaatttattatagcacacaattcataccccatgaaagtcctcaaatgattacgaaaatttcttgtattctgttcgttgtgaacctccacaacctgtcaataagggaaaaaaaaaaggagaaaacagatgaatagtacaacataaatcgtagttgatcaaatgtgatgacaatttagtaaagtaccataaatattgcacatatgaaagtaaattacattgcactctataaaaacataattttttacattgctagaaattataaaaacatcttttttacatcacaataaattatctagccaagttcatgagtctatttggcatgaaaacgtcctttcttgttcattatttctgtaagaataaaggcgcacacttcgcctctgatagcgggggggttgatgggtgagatcttgaggccagctctacctttctgtttaataaataagaggttaattagcacgttttgaatatcaatgtagatattgaaatgagcttattcgccattagcaacaacctcagggtcgaaatctttcacctctcttagaagtgttgacatgttgtggcacacgtggaaaccatattggtctccgatctgtcgtgcgcatgcaaacttggtgtcatgataaagttcgttcttgccctccttgtgcctaccacccttttccacatatgggccccaagccatatttaaggccttggtgatttcactgaaatcataatctttggacttattggagttaaggtaggtaaccctactccacttaggtacgatgactaggagaatccaatgtcgcctgcgcagtggttatgtagcgttagtactaagaaccttaacttcaaaaacaatatacatgaagggtattgtcctcttactcttggttgtgtgtgcacatgatgtactccttgtcttcatgggcccataaacaccggttgacatagtcaaccacctcagtgaagctctgtcgtaaattaacctcattcaccatggatggatcaaggaacccaacctgattaccatggcgacgactctcgatccaacacaaccttaaaatatttacgtattagaactaatttaattaggagatatagtccagtcatatcacaagtatagaaggtatgcacttacaaggagtagcattttagaagaccagtgtccaacttccggatcctgaaaaggtcaaagaggtcatcaaaacctatagttatataggcaggcgacgataggaacggctggtggtcgtgatgtccaactatggatgactccctcattttccgcttggcattgcttagctccatgtattgcttatgtagctctcggcaagcaatacccatcacagctaacacattgtcctccaccaatggcatgcctagctcaaattgggctggcgccctcacgaccttccccgatttgctcaccggcatcgacgtcgcagccttgcccctttttggctccggcaccaactccccgaccttccccttgccgcgttcacgcttctggcccttgacaagtggtggggagctatcggcctttcttgtggtctttattggagccaagctttgagctatatctgccaagtccatatcagctccaccgggagaatgaggtactgacaatgccggtccacggggagcctcaattgatagcttagacttgggaggtgtaagctccgtcggtcgacttggacgaggagtcatcttcacaactatgtcttctttgggccattgtatgaacgtcttgcgcgcatcgcccaaagtcatgatttcatcatttgagggcacgggcagcggatagcctgaccaggtgttctttactgtatcgatggacaccttggcatacccagctagcagatctgtgccgtggaccttgtctgtaaccgagggcttgaaagccatgccctcagcgacttcaggagcgaaagttgggtggactctcgctagtaggacacactgtgctgcgccctgcataaggtgaaagtttgaatataatattggaatgtgtacatgtcttttattagatatggatcggataacaacaattacctcgatgtggtccactgcagctagtggtgcgatcgggagaccaggggccggcacctctgtggatgcacaactactcctatgctgtgacggactcgtgtcgtgttgtacacgaggagttagttgcacagcaggtgttgtgactcggggtatattcatgtcggcgaggaccttgttaaccctttcttccacccttgcattcatgctagcttctagttcttgaatgacctcaaccttaagttcggccttcaaacgagcgtccctctcttccttggagactttccgtttcctgtattgggagctgtactgagggagtccatgcttccagggcacatcgctaccaatttcccgagttcggccaggatgttctttggttccgagcgcctttgtgaggatgtcatcttcgcgcctcttcggcgcggactcaacctcgctttgtgaagcttgttcagcaaccaagcccaactagaaaagaagatagtcgtttatacgaacttgtactttatacgaacggaaattagttaggttaagtagtgaactcaccagttcctgatagacgacggcatcacttttgttctcaaatgtgacagagccatccgggttgaccttaccccttgcccgcgcccagttgcgagctctttgttcagggatgtctgaaaacggggcagggacattcgctgctgcagcggctgcatcttcttgggcccatattgcctccttgccgatgtaccctgcggtgcccagccgatgcgggtgctcattccgctgttgcagtacgcgatgtgcctcgcttgattccctaaactcttgggtggtcttgagagagcagaattcctcccacaccgcttcggttatttgagggtattcatcgaacggcgtatgattgccgggcgggttgacaaactcggtgaagagcttcgacttccaattcttccaagctttgcccatcttttggaatgccttccgcttgagcctatcctttgcttcggttggaaatgtgaaccatttctccattgccgtccaagctcgctctttctcggcttctgtgaccttcccgatatctttatggaggatcccgaagttctcacgtgctgctagcccgcagcagttagaccatcttccaatgacagtcctgggcgccgtgggcctaccactagcgtcaacctctcttataacttgcactatggtcggccatatattttgtgaccgcgaatttctactagacctacttgcacttgtcccgcccgacatcgacgtatgttgttcctgcggcaattctgcagcacaaacagaaggcaatatttgctaaggggtgctagctaaaatttatgtggtcatgtggtgaaaatttatcctataaattaccatgaatttcgggttgttggaccgccgttgtcgcgggatgaccttcggcaactgcctctgtggctgggtttgcttcttcctggatcctcgcaggtgttggggagggcgggtttgcgctgggcattgacatggtttaactttcgcgaaaaagattataaatttcctaccattagactaaatagcattagatccaatgtaatacggggtatactatgaaagatatggcctcagttttgctgagaaatatgcatcaattacaatcatttgcatgaagggataaaaagaggaaatcagctactaggaggaaaaagcaacccaaagaaaatagaacaagtgtagttcatctgttcttatccataaaatagaacaagtgtagttcatctgttcttatccataaagaaaagagcaagtgcaggaaattagagcagtagcaacagcatggccatataatagcagcaataagagcagtagcagggccatataacagcagtaggggtatatatgccacaggggcagcaacagcagggggagattcacataaacagcaacagcagggtggaaattcacataaacagcaacagcagagggaaatttacatagacagcaagggtatataaatcaacaagtgtagataatctgttcttatccataaagaaaagaacaggtatagatagaatgttattaagcaattcatccttggccatttaacaagaagtacaggggcaacaacagcagtggtatataaatcatgcatatattattgtagataaaaaaatgaacaagtgcagaaaatctgttcttatgcataaaaaaagagcaagtgcacaaaatctgttcttatgcataaaaaaagaacaagtgtagaggtatataaccactgaatcaatcatgcaaatttaaaaaacagcagcagcaagggtacagaatttgcatgattgacataaaacagcagcaggaggagtatatatgccacaggggtagcaacagcaggggcaaattaactaaaacaacatgtctagatatactcctcttatcaatccagaagaaaagagcaagtgcagaaaatctgttcttatgcataaaaaaagagcaagtgcacaaaatctgttctaatgcataaaaaaagaacaagtgtagaggtatataaccactctacactggccatttaataaggaacaagtgaacaagtgtaggggcaaaaaaataaacaagtgtagataatctgttcttattgagcaattcatcactggccatttaataaggaacacattgggcagcagcagcaagggtatataaatcatcaaagaatgacagaaaacaaaatgcatggagaactttggtgtctaggtcggttccgtcggttcagctaaatataaacatgatccacaaaattcaataggtctagcaacatatatagcagtacacactccatgaatggttatatgtccaaatggcacttaaatccacattcaagttgcacttaactaacagttgcaaccataggcagcagcatgggcaaacatagacagcaagggcaaacatagacagcagcagttgcacttaaatccacattcaagattcacttattgagcaattcatcacttattgagccacaacaggggcaaaaagaagaatagataaaaaaatgaacaagtgtagataatctgttcttattgagcaattcatcactggccatttaacaaggaacacattgggcagcagaagcaggggcaaagatactccacaggggcagcaacaacataaaacaaggaaaaggtgtattaacaagtagcccacaataacagcagtagcaggggtgtagataaaaaaggagacagtactactaacttcatgtaaacagcaattcatccattcaattcaagcaagtctagataataaaacagcccacaatcattgtggcagcagcagcatgggtatataaatcatgtatataaacaacaattcatacaattgacctattcatagacaaaaagggtatataaatcaacaagtttagataatctgcaaagttccttaatcatcaaattatgacagaaaacaaaatgcatggagaattttggtgtctaggtcggttccgtccatggactacactggcctatccaccaaaattccccatgcattttgtattctgtgatggtttgataacctcggaactacattaaatctgcggccaatctatcaattcttcccttgtaactagatttcaaaccctacacctaataaaggtccttaattatcaaagaattatagaaaacaaaatgcattgaaaattttggtgtgtaggtcggttccgtccgtggactacactgaccaaaccaccaaaattccccatgcattttgtattttgtgatggtttgataacccttaactagctagcttaataaactatttctagctagctaccctacctagctagaaacactattgccaatctatcaatccatcctttttcagctaaatataaacatgatccacaaaattcaataggtctagcaaaagggaacaaaacaacatatatagcagtacacactccatgaatggttatatgtccaaatggcacttaaatccacatccaagttgcaaactagctacacattcaagttttaactaacagttgcaaccataggcagcagcatgggcaaacatagacagcaaggggcaagtgtagataataaaatagcccacaataatttatgtggcagcagcagcaggggtatataaatcatgtatataaacaacaattcaactattcatagacaacaagggtatataaatcaataagtgtagataatctgttcttatccataaagaaaagaacatccactgcagcaaaattcatgctaagatcctctattgatgctaagattcactgcaccaaaatcatgtatataaaatctagcccctacattcatccaaaacatccacagacaacaaatcacatttaattcatctatacagcagcaccaataatcgaaacaacaaatcacatttcattcatctaaacaatgcaattcatccatcggaaaaaaggaggaatgggggagggtggcggcatacttggagaagcggcgtacttggagacggcggcgcaggccgtagtcgtcctggatcctggtggcggcggcggagaggcagtggcgaagaggtcgaggcggtcggcggtggtcggggatcccggcgtcggggaggtcagggtcggggaggtcggggaagtcgatggacggacggcggagaggacgaccggcggcgagggcggcggtggaggcagcggcggagagggcggagatggcggcagagagggcagcagagatggcggcggagagggaggaggagaggttgaggcggcgacggcggagatggcggtggagaggacggcggagatggcggcagagagggcagcggagatggcggcggagagggcggaggagaggttgaggcggcgacggtggagatggcggtggagaggacggcggcggtc

SEQ ID NO: 21473 - DNA, 18252 bp, Oryza sativa
gtggcctcacctgtgacgggcgccaaccgtggagccgtcacaggtaagaccacctgtgacgggcccaacactctgggccgtcccaggtgaggtcacctgtgacggccctacagatagagcccgtcacaggtgagtttgcctagaacaattttattttattttatttcacttagttcttttattttccttaacatattttcacatacactacatatttttttatacttaattattttatttcactaacagtagtaattgcacttcattattatactactttaattattttatttccaatgcttatacttgcttaattattttatttcacttctagtgggtgcttcacttaattattttatttgactatttcataagcaatatactattgatcattgcgaacatattagagtcatacagataacagacatgtagacataaactacgtacataaattacaaaaataatccttcctcatggtcgacacgtgcatattgaaattcatcttcttcttcctcctcttctagaggtatttcttgacctatgccgtggacgtgctggttgtaatcatcctcgtctgcaatgttgtccaatccaacaattctccttttcccttcacgaacaacatgtagtttcttgttacacgggtcaactatgtagaacacttgaacaacttgtttggcgagaacgaacggttcatccttgtacgcgttgttagccaagttgacagtggtgaaaccttcattgtcaacttttacattgcgaagatcgacccatcgacaacgaaacaacgggactttgaacttcaagtaatctagctccaatattttctcaactttaccatagtattgatcacgacgaccaccgtcactagcagcctcgatgcgtaacccactgttctgcactgtgcatttgctgtcttgctttaccgtgtgaaaggtgtatccatttatgtcatatccttgccaggtggtggcactccattcaggaccctgtgacaaccactgaagtgtttcactagacaagttctgcaacctggcaattcagttcttcagccactcgttgaaagaagacatgtgcttattcctgacccaactctctgatcggcctgggttctcttgtcggataactgcaaggtgttcgtcaacgtacggcaccacctcagtcatatgctgtagtaccgtgaaatgagctttatcgtacaccttccgatccaacctaatagtctttcttccaacagtaccaacaccgtcaagcctcccttcgtgatgagatcgtggtaatccaattgaagatgtttctgacatgtagtccacataaaattcgatggcctcttcggtggtgtaactctcgatgatactcccctcggggtgtgaacggttccgtacataacccttaaggatccctaggtacctttcgcaaggatacatctgcgtcatgaatgctggaccacagcactttgtttgcctcacaaggtgcaccggaagatgttccattatgtcaaagaaagttggaggaaagtacatctcaagatgacatagggttctcacaagttctgcctgtagttcatctagtccctcgggatcaatgatcttctggccaattgcatggaagaaggaacacaaccgctggatcgtgtgtcgcaccttaggaggcaaaatattccttattgcaacgggcaacagctgtgtgataagaacgtggcaatcatgcgacttcattccaatcaacttaagatcttgcagtgaaacgagtctactgattcttgatgagtaaccagatggaacctttataccactcaaacatgttagcaaatcaatcttctcttctttcgagagagtgtagcaggctggaggaaggtaaaccctgccggattccgtggttatgggatgtagctccgaccgaacacccatatcttccagatctcgtcgggcgttgagaccatcctttgtagtacctgggttaagcagtaatcccattaaactctcgcatacattcttctcgacatgcatcaaatctatgcagtggcgaacttcaagatccttccagtatggtagtctccaaaatattgacttttttttccacatgctcttctcttttgtcttttgtttttccacatgctcctttgttttttccttcgatgtgctcttctcttttcgctttccaactttcctcttttttccaaactcgttggttattcccatcactaagttgtgcacctctgtccctgttagctctgtcggggttccggctgtatctctgtgtccattgaaattctttctcatattcctatacgggtgataccttgggagaaatctcctgtgacccatgtagaccgtcttgtgtcaatgcttcaaccatttgcttcttgtttcctccatacactccgaacacgcccatttccctttcacagtttggccagaaaggttgccaagggccggataatcgttgatggtacaaaacagcatcgcatggaggttgaaatactcttgtgcatatgcatcccatgttcgtgtgccctcattccatagcctttcgaagtcatcgattatcggttcaaggaacacatcgatatcgttgccaggttgtctcggtccttgaatgagcatggcaagcataatgtactttcttttgaaacacaaccagggaggaaggttatagttaacaagcagaactggccatgtactgtgacgactgctcaaatcaccaaaaggattaatgccgtccgtacacattgcgaaacgcatgtttcttgggtcatttgagaattcctggtaaatcctatcgattgtcctccactgtactgaatctgctgggtgcctcagcatagtatcgactttccgttcttcggcatgccagcgtacaagcttagcttgttccttgttcgcaaacattctcttcatgcgctccgcaattgggagataccacaccacctttgctgggcctcccctctttgacttacttccttcaccttcactctttgctcgtttgtatcttgatgccccacagatagggcagacatccaagtcagcgtattccttgtaatacaaaatgcagtcgttcggacatgcatgaattcttctgacctccaggcccaacggacataatacttgcttcgcttcatatgtcgtctgaggtaaattgttcccctctggcaacagatcctttaacagctcaaggagttctgtaaaactcttgtccgaccagccattactagccttaagcttcatgagttccaacacgcatgacaacttgctgtgcttcgacttgcatccatcatacaacggcatctggcaatcttccaccaacttactaaacttctcataatctatgtcgttgtcctctgcgtcttcaatgtcatgcaacattgtagatagacattgagtgtccaaatctatggtctctccacctaaaggagaaggtacgaacatgccttctcgagctgcggcggtgttctctacatcctgatccaacacttcttcagctgcgacatcaggcgcctcttgctctccatgcttggtccagcaggtatatttcttcatgaatccattcattatcaaatgagcatgcacttcatccttgtcttcgatcatctgttcattcttacagtccctacatgggcacaacatgtgcatgctcatcctactttttctgtcattatccgcaaatgtgacaaattcagtgaccccctctctatactcggtagacgaacgatgcgcatagtacatctatctacgatccatctgaaatcaacaacatacgaagaaaaataaatcatgatcgatatgttgagaatgaatggagaataatgtgttttttaccttgaattttagcaaaaaatcgccccccttgccctcccaaccgatttgtgaacagtacaatggtcgggatggaaagcagttggcagtttgggggtattttatagacccaacacacctcaaacgggttagataaaaaaaaacccgtcaaaggtattgctcatacctttgacgggcttctattcaacggcccgtcactggtatccgctcacctgtgacgggccagaaatgaaagccgtcacaggtggcggcccatcacctctgacggcttctaatgtatcggcccgtcacaggtgaggggataccagtgacgggttggaagcaaaactcgtcactggtatacctctgacgggttttcctttcggcccgtcacaagtgaggggatacctgtgacggtccgcggccggatggctcaccggtgacgttatcccgtctgacccgtcagaggtaatggtcactagtgaccaaatcgtttgcccgtcacaggtatcccgtcagaggtgtgaggatctggcgtagtgattacattgaaaattgttaaaaaatatatcaaaacatgaaatgtgcaacaaagttttattccaactgaaacatcaaatttcaacatttcaatcatattattttttcatcagaatatcatcatgtgaggtctttttctaaagatttaattggagtaaatacaatagtgcaactggatcctagatcatataagttttttatcagacaagtcatttaatattttccaaagcacttatgcatgcatggacaaaggcgtaggacaagcaataccaacattgagagaagctagcgaccactgcctgatcgatgcaccagcagaggattacgacacgatggtggtcatcacgtgctacacgaccgagatacagagtactattagagagcgtagaccagctcatcaaccgttggttacacaggttatattgggcctgattcaccactggtccgaccaacaccacaactctaggtcctcgaacctacacaacccaaatgagtaggtgataggtgcagaatgccctcatattttgagtcgtgctctcgtatcgtcggttacgactaaaattaacaatctcctccatcaccagcagccctaacaatctcctccgtcacatcaaaccatgtggcctcgaagacttatttcggtctaggcccaacaatctcttttgttgtatcatagcctatgcgacctaggcccttgacttttagcaacatagaactaaacccaatagagaggaaggattggagagttatggtaatggcatttctcctactctccgctcgaagactatggcaccaccgccaccaaatacctttcctgcctccgggcgcaaactttgctagttagatctgctgctgtcggctagccatcattgcatcgctaggtctggatttgcaatcatcatctagtccttatcaccgccctttgaactgatggcattgtggatgagatcggtagctcaagtcatggggcagggaacgaggtcgccggcgtcacattgccattggggaagcgtccaagtgcagaaatctcaatgacatcgggggattattgttgggaccctcagtggaagaaggcagcctaagcatgcctaggattgtgcagttgttggcacgtggcggtggtggccacagcggaggagacgaggataggtcttcgtcgttgatgggttgaggaggatagcttgatgtggaggcaaatgccctcagcctaatcaggcggagagggagagtggcgttgccattaaggatgctcctcccaagttgtcccaacaatgctgagagctccaatttagaaaagattggctaccggtgatctatggaggtggcagattcgaagccaggtatgtgcggggtaggacaatggaagtctccagtctctgggcggtgtagccaaccgtcttctctggcatgctcccttccacctcatggtttcttcctcaccatttgctcctcctatgcttatcgcaggtaaaggggaagctgaagggaaaatgaacggcctcttccctcggtcaatttctatccagtgcagcaagatccaaaaattactggagtggttttggcagaaagagttggtcagatacatagtataagatatgaacacgatagttgaagagagttacaatgggagaagtgtgaagaggatgggaaggggaaacatgaccttgggatgctagtgttgtgggatggtggaagggtgtgatgcacgtcgtttagttcaagtaactcgcaaagtgctagatagtccttgcccttttgacaatgtaagatatttcaaaaaaaatgaaaatatatcttttttcattggttttacataaatatacatgtactgaagaaatttgcagaagtataccactgtcgcagggcggtccggcgagatcgcaagagtcaccacggtctcgctctgcgagggcgtgagaccgacttcccatccatactctgtgattaataaattaactagcataattagaaattaattaattaatattattgtaattagcattattaataatcaattaacattaattaggataattaatcactaattaactattttttgaagcgctgtcgcttttttgcatgcgagatcgcatggtctcagctcagactcgcgttgtggttgtgtgagaccgcgcggtctcacgctcccaccccgcgagaccacccacatcgtcattctcacgcaatggttcagcgtgtcttatcgatctcgcactctcatatagcgatgacagtatatttgtgccaaaagaattacagcccgaatatttcttagaaaaaatgaacagtatatactctaagaaggataactacgtagatctccactgacgtggatttaatgaaatccgttataatgggtcctatgcctagaaggatgtatagatttattcactatttctggactaacatgaatgtttctcgggactgtccaacaattctacaatctacatatatatagacagacatatatacgcatatattgatagattggttggtacgctaacaaccgcagcaaccagcatatatacgcgaggcgacctgccctcggttggcctaagctcaaaattcacaacagagaactcgtcataatgtctctagtggatttttggaacaaatggggtgtggagattatgggtaccccatacccacacggcatggttatccgactagttataggggataacttatatatataaaatatgtaacagatcatgacttgggtattacgtttccctgtatattatgaaacggcctaaagtcctggtttgataagattgtaaagtagatttaggaaaccgataccgtattggttaaggtttctatcttgtaatcctgccccccatcctatataaggtgggcaggaggccctctagggggcatgagacaactagatcgtcagatctataatacacccggcggattcaaatccccaaacaggagtagggtattacctctcattgagagggcctgaacctgtctaaatcctttgtctccacatccatccacttttaggtctcgtgcgttaccccgttttattattgccgaattcatgtttcgacagttggcgcgccaggtaggggttcgccgagtttcctgtcaacaagtgtgatggaatcaatttcatgattcgtcggcttcgtctttgattcgtgagttttcacttcctcgctgccgacgacttcaacaatctctctttctccgacttgggttttaaccagtcgagagaacggcgatcaaagatctgtgtcatcaagttggaagcttcaaaccgtcatcgtcaccgatatctcctgtatctccgcaaaaatctccgcttcgggagctacactttgtggttacaacaatgaccaggttcgccgttccaatctaccaattattagattggtctcagatttaactactaattaaatcaatctatgtcttgcatgcactgattgttggctgtgccctccgagtcccctgatcgtcacgagagacaaccacggctggctagttgcataagacagctgattggatcaatctcggactcggctgactcaacatggaaaatcaaaaacacggagcagtacatacaagcagcaattttcactttgtcagctcgagtattttttaatgaagacgtatggctgcgggcacacgcgagctatatcaatgctcaaacttatccagcaattactggtcatcgcatgcgtttgtacgtgcctggaacaactatgtacctgtatgcataaacacataccaacagaagatctgcacatgcatatgatttttgctacgagagtctgggccatatatgtcgccgacgactttgtcaagtttctcttcaactcggactggaacacgacagacaaccttcaatctaggatacaaaacgggctggactaccatgtcaatattggtggccatcatcatcaccggcttaccttcaccgccgccgactggtgtctctgcctacacagctggcctattatgccaccgttgttggacgtctacgacttcaccctgggcctgcctccgtcgccgccgactggtgccctcgcctatacggttggttggtcacaccaccgttcatgggcgtccacgtcttcactgatcggccggacttcgccaccgccgactgttgtccacgcctaagcggttggttggtcacaccaccgttcatgggcgtccacgtcttcaccgaccggctggactccgccgccgcctactggtgtttccgcctgcacggccggcctattatgccgccgttgtcgggcgtccacgacttcaccgccggcctgcctccgtcgccgccgactggtgtcctcgccttcacgattggtgtactccgtcgccgttgctgatgtcaaccatgtcttcactactggctgcagtcatcgccgccgaccggtgttttcattgctattgatggacgacttgttcccgcatcggctacttctgccatcaccaagggaatattgaaaagctaagtcatcatttattttattctttatatgatatttttccttttcctctacctcactacaccaattggtcttccattgagtagtgagtcgggggctacagatgttatatcatatttttcataatatttatcttgattgcttgcgacataatctgagtacaaaagtgcctatcgagttatggagttccatcttcctatgctttccgtttggtttgccaatggatagttgcctttaggccgattcgtagcacccgggggctcgttggatggaccgagtaacgcaaggtgctaagtattattcggaataaatcaaaagcatagagataagataatttattttctgctcttaataattgcaaaagtacccgagtagtaaactccgatccgtgaaactttgttccattaatgacgaactcatgtcactcatatgcatgtttgggaagtgcttaggccgactcccagtgcttggtggctatgactagtcgggcagagtgtttaaacgtaatgagtcatctgctcggggaaatcaaaattaacaagagaagaaatacgtatttataaactgcttgaatttttctcgagtattatatttacatcagatactactcatcctatatatttgttctgcaggatccaaatccagatatgcataaaagggattcatggctttgagcttatctcttacgctccaggaatggatcagtcagaacatcaccaccggctcgccgtcgtcgccgccgactggtgtcttcgcctatacggttggttggtcacaacaccgttgtcaggcgtctacattttcaccgccggtttgctttcgccgccgccgactggtgtcaccgcctacacggctggcctattatgccgctgttgttgggcgtctacctcttcaccgactggccgcctcgtccgccgccgactagtgtttccgcctgcacgctggcctattatgccaccgctgatgggcgtctacgtcttcaccgaccggcttgccttcgccgccgccgactggtgtctccgtctgcacggctggcctattatgccgtcgttgttgggcgtatacgactccaccatcggcctgcctccatcgccgccgactggtgtttccgcctgcacgctggcctattatgccaccgttgatgggcgtctacgtcttcaccgaccggcttgccttcgccgccgccgactggtgtctccgtctgcacggctggcctattatgccgtcgttgttgggcgtctacgactccaccaccggcctgcctccatcgccgccgactggtgtttccgtctgcacggctggcctattatgccgccgttgttgggcgtctacgtcttcaccgaccggccgcctcgtccgtcgccgactggtgtttccgcctgcacggctggcctattatgccgccgttgttgggcatctacatcttaatcgccggtcgtctcgtctgttgctgactagtgcccttacctctacgtctggtttatacagctaccactactgatggacatcatcatcttctgtcgccgactgattatgccgccgccgactggtgcttttatcttcacaactgcgcgtcttcactaccggtttgcttctgttgccgccgacttgtgttcacttcattacggcaatacaactttgtcaccatggtggagcgacttcatctttattatcttcggcaccggcaaactctattgttgctacttcgcaagttttactacttcaccaaccacgacgtctttgtgaacctcgacatctcggcatgcaatgccatgttattttactacaacaagtggctctccaatattcaggatttctacttggacatcttcaacacatatcttcaatcaagcaatgactattcgacgacaagaagctacagttctcgactctatgttcagttgtttcccaactaatcaaagagtcgggggctacacaaatataaggctcaaaatttgacaaattttatgtcaagctgaagaaatcaattcatcaacccacgagtcaactccaggagtcattatcttcatctttgcttcggagcagacattctacttcaacaacttcaaatatttcggtttagacgagttgggcaacaacatcaactctcctccaagtgaagcatctacaacagttataacattaatttgatggattattgtcactgacatcatcaccagcacctctgcttcatcgaccctgacatctctgctgttgctaatggatgattatgttttcgccgacttattatttcaccttcacggttgacctactatgcaaatgctgatgagtgtcttcgtcattatcattggttgctacactgctattgactggatcaccgacatcgtcatctttatcaatatcctgccaagcctcttcaacatagcctattctactgctgtttgatgggcaacttcgtcctcatagtcgatcatctctgttgctgcttatcatcattactgtcggttgtgtttgtcgtcgccgactattttcttcatcttcatgattggtggatttcgtcatcgcctttgatgcgtgtctacatcttcactgtcggcttgctttcgtcaccaccgactggtatcctcgccttcacggatggcttattatgtcgccactaatgggcatctttatcttcttcaccagctgcctcgtctgtcaccgactgattatttcgttgccatggctacacaactttatcactgggcgccttcatattcattgctggctgacctgactgctaccgactggtttcttcgcttccacggctgtgcaacttcatcactttagattggtatcactatcttcactaccatcaatatttttgccacctctggtagacaatattatctctatattggtcgtcttgtctctatgccaactgcgccagctaccatcaatggacaattgtgactacgacagaaggacaagctatatgctcaggggcttactagctcaaacacaagtatcatacctccaatttggacttgttccggatacatgcaacatgaattcataatcatgggtctattttctatgctcaaagactggactatttattattccccgtaagggttatcaaccgaatacttgcgccagtcgggatttaattattatatttattttggaatatcctataagggataatcactcagatcagaagcgattgatatgagctacacttggtctatatcacccgttccaaatttattactcggaagcatgttacatgcgtcatcctttaaagggtgtcgaaggcatattttttggcctaggcctaatatgtctgcagcccatattttcaggtgtggcctgtcacgttcttttagggacttaggcactttttgcttaggccaaagtgcgcgtgatcaagtgcccaataccttaaaatccttttataccgcagttactcaactttttaggagttggtacaatgcatcttaaaaggtgtcaaacagtaaagctttatatagctggcccgctgacttttttatatagtcatggtgctgtttgggtttttaagcaattgattggatacaatatcattgctttttgccacgtaagtgtgcatttttattgaccaatattatggcttaggctgattatatattgtggtcatttttcaggcggttggtaaatcctttatgagtttatttactcggattttataccacatatgccatatatttccaggtgtggtagaaccatgtgtcttctagggacttaagcacatctgttaaagcagtgtgcgcatggcgtatgctcaatactttggaaatttctttattcacaacatacaagcttctttatagctgttttgctatgtgaattttcaatgatgtagccaactttaggttacactcatcatattttacaaagcagtcggtatattacttggatcatattattcagggattcacaccgcatatgctacatattaatattaagtcgcttggttgaatacaattatcgaaaccactcggtgcatctagtcgatgcacctgactttattttttcagccctccacagtcttctgatttggaaaaagtactcgggagatcatggcgaagatgattgaagcactcggctttggagtaatctagttcgagagaagattatctttccgactgtgaaggtctcaggggctactgtggagattatgggtaccccatacccacacggcatggttatccgactagttataggggataacttatatatataaaatatgtaacagatcatgacttgggtattacgtttccctgtatattatgaaacggcctaaagtcctggtttgataagattgtaaagtagatttaggaaaccgataccgtattggttaaggtttctatcttgtaatcctgccccccatcctatataaggtgggcaggaggccctctagggggcatgagacaactagatcgtcagatctataatacacccggcggattcaaatccccaaacaggagtagggtattacctctcattgagagggcctgaacctgtctaaatcctttgtctccacatccatccacttttaggtctcgtgcgttaccccgttttattattgccgaattcatgtttcgacatgggggatacaattctttgtactcctcagcctcgcgctgcaggtcattctcctcctcctggctggtactcgccggcgtaaagtactcgtgccaaagatcatcctgtggatagcttaccagctggccgactcgacggcgatatacgcccttgggaacctctccttcggcagcgtggcaattgaagagcaccgtctggcagcattttgggcaccattcttgttgctgcacctcggtggcccagacaacatcacggcctatgcactagaggacaacaaactctggttgcgccacgcactgaatcttattttccaggtaatcggagcttgctatgtggtctacaagcatattatcgttcgcagggaggccacaatccttagagtggccaccggattgatctccgccgtgggcgttgtcaagtattgtgagagaacatgggcgctctatcgcagcaattttagcagcatcgggagctctctcgaggagttacagggtaaccaactccattggtaccaagggtacctacacaatgaggatcataacaacactaacaatgaattccttctgcaacgtgctcactccctgtttcacatatgtaagcgtgggatagtagactccgtgatcaatgaggatactgagaatgctgaggcggaaaccaccaaggaaataatcaacaatcttagtgaagagccccagcggatgtataaggtaatggagatggaactgtccctgatgtacgatattctctataccaaggcagccgtagtccacacttggattggctactgcatccgagccttgtcaccctttgctattgccacctcctttctgctgttctatttctgcggcagcgaggtcaaggatggccagaatggagtcgacaccgctgttacctatgtcctgttaggcggtgccctcttgatggaaacaacgtccctcctcagcgctctggggtcaagctggacgctttccttcttgtgcgccaggaggtggagttggcttcaacatgtcgctctatgtgtcggaagatggtaccagctccgacgggcagtcctggctgttcgcaagcgcgtcgcagccttgacgggaggccttctcggtggatcaagaaactggtcgggcaccataggacagttcaatttgctctacttccgtgccacgcaggtcaacccaaccaacaagcaattcggtaggctcattaagaagctagggtatggtgacgagtgggacaccggttgttatttgtgggacatcacaattcccgagctggtgaagcagaaagcattgagaatggtctccaagtatgatctcaacaccatgggcttgctcaggcataattggggtgaactggcactgaaaaagcatactgaaccctcaaaaaaaaataaaaattgtactgaactgctggaagagctagagaaattgtggggtgacgacttccacgggagcatcatcatctgccacattgccacagaccttatcctcgctgagatagaaaagaacaaggccggcgaagacgacgcagcacaactccagtgtgtcggctcgatcagggcactatccaactacttgatgttcctccttgtggctcacccggatatgcttcgaggccttccccaaaaatggttgtaccagcggacctgtgagaacgttgatcaaaactgcaaagagcatcgtgaagaactcatttcttctggtggaaaggctaataatgtgatctttatggtgctcatgaagctgttcggtggccatagtaatagctcaacatctattgggctcaggcagacgaatgcactcgctaaaatcctatacaagagcctgcccagccaatttgaccccgcaattcctcgccttacttatgcaaggttggttgccaaggaaataataaattggaaagatgaagatggtcaattgaagaagccagatgcaatattgaaggtgctgcttaacctgtggacagattttctcctctatgctgccaacaggtgtaacagggagtctcatgccaagaagctcaacactggtggtgagtttattactattgtgtggctaatggttgaacacatatacaaaacaaaatcaaaaggaaaaaaagttgtacctgtcgggccatgataatatctattgttagtgttatatattctctctatattcaatcttaaaggatattactgtaacattcccaaaacgtgtaaacttcaaaccatctgttctcagcaatataattgtttccctttgcgtgctttttttttgttatgttgctggattttcttgcatggcatatatagttgcatctgatgtgcattatcaaattgtcttagaagaattcatacaacttatatgtgcataaaaaaatttgacattccaaaaaaaaactaaattttcgccaattttgtcaactcatttgatacgtcgattgaatcagtcaaagttgataaaacaggaattaaaccataaattttagggttgggaaatcaaaaaaatgccactctattcgctttattggctgggtgccactgaaattttgtaaaattagagatatgccactccgtcacagcaactgccaatacctccgttagctctgttatcgcagatccctttcttctccaactcaggcaaaaatctggcggcgctcaggctcgtcgacgacggggtagagagggcttctccggtgagggtggagggaagcgccgagcccgagccccgcgctggaggagaggggcggtgacggatcccgcgccaccgatggaagctggacgggagcagctcaacccccgcgctggaggaagacggcgtgcagaggatacgcgggtcgccggcgacggcggtggtgatgtcagcggcggagaggccgaggtcggcgaggaagacgacgacggcgtctggcctagacggcgatttgaggtgtgagatggtcttggaggcagcgcgaggcagcgcaggtcgttgacggtgtggaggaagcgctcgtcttcgtcgccgacgaaccggagaaagatgaggtgtgagatagccttggaggcggcgcgaggcagcgcaggtcgttgacggtgtggaggaagtgctcgtcttcgtcaccgtcaaaccggagcaagataaggtgtgagatggtcttggatgtgcgaggcagcgcaggttgtcgatggtgtggaggaagcgctcgtctttgtcgctgtcaatctccgaggtcgagccgcagcagcagcgccgcctcgtccgcctctccgtcgagctcagcatgccggatatgagaaaggtgggaggggatgaggatggaaacagagacggcatgagagaggagatgaaaaaatggtttggagtggcatggttctaattttagtaattcccagtggcatataaccgatatgatgaatagtagtggtatttttttaatttcacaaagttttagtggcatggatctaattaaccctaaatttcaaccctcttcagtcttcacaattttgccacattcaaaccatagcaaatatgtctaccaaacctctcacatatgttgtatacattagttactcggcttgctgtattaaacccagaatttttgggcaagctagctagccatgcaagaacttcccaacccaataactaggatgatgtttataagatgatgtttatagcattaaagaagctaccacctaggatgaataatgatgtggcaagtgaataaataaaaaaagagaaggaaaccatgtctcgcataagacatgatttctacacaatatctaagacatcatgtgagataagtagcattaaatttaagtatgaaatagtggtgtttgtattggaagaaaattactacctccgtcctatattacttgtcgctttgagtttttgtttgtaaaatttgattattcgtcttatttcaaaaaattttgaaattattatttattttatctgtgacttgcttaattatcaaaagtactttaagtattacttatccttttttatatttgcataaatttttcaaataaaatgaatggtcaaacgttgaaagaaaaaagttaaagcgacaactattacgggacagaggtagtatctagtactagtttcttgatgatgtagagtttataaaaactatagctatgtctagtgtattgggttaggaatggccttaaactatccgtttttaactcagtatgctaccgctttgtccatctccggtttccagcgaaagaggtcccgcaccgacactttgatctcctcctgtgattccacttgacctggatcaacttgttatgcgcatgaatgttggccatcatcttgcttagttccgaaagttgtttctccgcctcgtctgtcatgatctgtgctcctgaatgatagcgtggcttgccagaaaacctctaggtcgataggtcgactgctctgatacaggatgttatgtttcttgatacaaagaagacaagggaaatgcgaacagagaaacgacttgcattggaagaagaagcagttggaagcggtgtggaaaaaatctaattattgtattttgtttgttttctgatctattacatcgaacctttcatggggtatatataaaagtacacaggggatagagaatataagtaagagtagatttatctctaggactctatcttatctctaggattatatctctaggaaatatcttacctctatatttgtatttgactgttatctctaaccgacatagctatcttttcaacaagcggtaaaattttggattggggagatagagcccgtgtttagcttgtacaagttcagcgagattgctaaggggcgatcgatcgcccctagcgatcgcccatagcacgccccccctctccacctccacgtggtttcttttttagcactgcattatttttctattttagtaaa

SEQ ID NO: 21474 - DNA, 2191 bp, Oryza sativa
cgtctgtcatgatctgtgctcctgaatgatagcgtggcttgccagaaaacctctaggtcgataggtcgactgctctgatacaggatgttatgtttcttgatacaaagaagacaagggaaatgcgaacagagaaacgacttgcattggaagaagaagcagttggaagcggtgtggaaaaaatctaattattgtattttgtttgttttctgatctattacatcgaacctttcatggggtatatataaaagtacacaggggatagagaatataagtaagagtagatttatctctaggactctatcttatctctaggattatatctctaggaaatatcttacctctatatttgtatttgactgttatctctaaccgacatagctatcttttcaacaagcggtaaaattttggattggggagatagagcccgtgtttagcttgtacaagttcagcgagattgctaaggggcgatcgatcgcccctagcgatcgcccatagcacgccccccctctccacctccacgtggtttcttttttagcactgcattatttttctattttagtaaatttatacacctaaagtttgtacacctcagtttacacatctaaagtttagagacccaaagtttataaatcaaaagtttatatatccgtacagtatttctatacatctaaagtttataaacctaaagtttatagacccaaaatttataagtcaaaagtttacatacccaattcaaatttaaatttgaattatatccgattcaaatttgaatttgaattcaaatattttttatatatagtatttctatacatctaaagtttatacacctaaagtttatagacccaaaatttataagtcaaaagtttacatacccgattcaaatttaaattcgaattcaaatattagttcataagtcaaaagtttacacacccgttttaaatttgaatttgaattcaaattttttttatatatagtatttatatgcataattttttttaactttatgttttttatttaaatttatggtgtagtaggaaaagaagaaggggaataggaaagaagaaagtagtgtatagggggattggggtgatatgagcgatcacccgcccattagccgcccccaagttcagagagaaccagtcagttgcctggtagcagaagaaaaacacgattttctattctgcagtcacctgcaaaattcgtaattggtcagtcgatttctttgtctatccgattcgcttcatgatacgtgcatgttatatatgcttttaggttagtttattgtatctttgaaaaagtacgaattacctccttaactgtcgcagtcgtccgaattatcccctgaaccacaaaactggacattctttacccctaactatacaaaccggacgaattacccacctcgatccaatccgcagtggttttggtctacgtggcgtacacgtggcagtccagtcagcattctatgcataaaaaatatgagacccacctgtcatatcctcttccactattcccccctctctcttcctcttttctctctcttctatgtgggacccacctgccatatcctcttccacctgtcatgtctcattcttcccctctctctcacacacccacacggcggcaggcggggaacacaaagtggcggcggcgcgcgcgaacgcacgcgggcgggggccgaaggtggcggcgaggacggcagcacgcacggcgcggggcgtgcacgcatgcaaacaggggcggcggcggcgaggacggcggcacgcacgcggccaaacgctcgaggcgtcgacctccctctgccccgcgcgctcttgtcctcctcgacgcgccgccccatcaacgccttcaacaagagggtgggcgacctccggcacgtcgccgtagacgcgttcgcgcggcttaaggcgcggtgggcgtgcctccagaatcgcacggaggtgaagctccaagacctccccgtcgtgcttggcacctgatgcgtcgtccacaacatctgcgagacacgcggcgaggagctcgagccggtgctccaatatgagctcatcgatgacgagacctcgccggagacccacgtcggctctgaggccgtcaagcgcgacagggacaacatcgcccaaaacctcctccaccgcggcttcgcctgaacccaccttcttatgaagatcgattcgataacaccaccgccgct

SEQ ID NO: 21475 - DNA, 14830 bp, Oryza sativa
tacggtatcggtttcctaaatctactttacaatattatcaaaccaggactttaggccgttccgtaatatacaaggaaacgtaacacccaagtcatgatctgttacatattacataaatataagttatcccctataactagtcggataaccatgccgtgtgggtatgggatacccataatctccacagtagcccctgagaccttcacagtcggaaagataatcttctctcgaactagattactccaaagccgagtgcttcaatcatcttcgccatgatctcccgagtactttttccaaatcagaagactgtggagggctgaaaaaataaagtcagatgcatcgaatagatgcacctgataggtgtaacccccgactatgtggttagctgaacaaaccaaacatatagtcaaggaataagttatccaattaaccgaatggtttttgataattatagtcaaccaagtgacttgataccaatatatagcatatgcggtgtgaatccccgaataatatgatccaagtgatataccgactgttttgtaaaatatgatgaatgtaacctaaagttggctacattatcgaaaattcacatagcaaaacaattataaagaagcttgaatgctgtgaataaagaaatttccaaagtattgggcatacgccatgcgcacactgctttaacagatgtgcttaagtccctaaaagacacatggtttcaccacacctggaaatatatggcatatgtggtgtaaaatctgagtaagtaaactcataaaggatttaccaaccgcctgaaaaatgaccacaatatataatcagcctaagccataatattggtcaataaaaatgcacacttacgtggcaaaaagcaacgatattgtatccaatcaattgcttaaaaacccaaacagcaccatgactatattaaaaagtcagcggggcagctatataaagctttactgtttgacaccttttaagatgcattgtaccaactcctaaaaagttgagtaactgcggtataaaaggattttaaggtattgggcacttgatcacgtgcactttggcctaagcaaaaagtgcctaagtccctaaaagaacgtgacaggccacacctgaaaatatgggctgcagacatattaggcctaggccaaaaaatatgccttcgataccctttaaaggatgacgcatgtaacatgctcccgggtgatatagaccatgtgatctgagtgattatcccttatgggatactccaaaatagatataaaaattgaatcccgactggcgcaagtattcagttgataacccttacggggaataataaatagtccagtctttgagcatataaaatagacccatgatcatgaattcatgttgcatgtatccggagcaagtccaaattggagatataatcctcacgcttgagttgatgagcccctgagcatatagcttgtccttctgtcatagtcaaaattgtctattggcaatagctgacgcagtcggcatggagatgaaatgaccaacatgaagacgaaattgctcatcagaagtaacggaagatgtcagtggtagtaaaaacagtgacaccaatcaaaggtaatgaagttgcataaccatggaggcgaagaaaccagtcggcaacagtcaggtcagctagcagtgaagatgtaggcgcccaacaacaacgaaagaacagtcggtgatgacaaaagcaaaccgacgatgaagacgtagacgcgcatcaacagtgatggcgaaatccaccaatcatgaagatgaagaaaataatcggcggcgacaaacgcatccgacggtaatgatgattagcggcaacagagatagccgactatgatgacgaagtttcccatcaacgacagcagagtaggctatgttgaagaggcttgacaagatgttgatgaagatgacgatgtcggtgatccagtcaatagcgatgtagcagccgatgataacgatgagatcctctatcggcagttgcgtagtaggccaaccgagaagacaaataattggaggagagttgatgttgttgcccaactcgtctaaaccgaaatatttgaagttgttgaagtagaatgtctgctctgaatcaaagatgaagataatgactcctggagttgactcgttggttgatgaattgatttcttcagcttgacataaaatttgtcaaattttgagccttgtatttgtgtagcccccgactctttggttagttgggaaacaactgaacatagagtcgagaattatagcttcttgtcgtcgagtagtcattgcttgattgaagatatgtgttgaagatgtccaagtagaaatcctgaatattggagagcctcttgttgtagtaaaataacatggcatcgcatgccgagatgtcgaggctcacaaagacgtcgtggttggtgaagtagcaaaacttgcgaagtagcagcaatagagtttgccagtgccgaagataataaagatgaagtcgctctaccatgatgacaaagttgcattgccgtgatgaagtgaacacgagtcgtcggcaacagaagcaaactggtagtgaagacgcgcagttgtgaagataaaagcactagtcggcgacagcataaccagtcggcgacggaagacgatgatgttcatcagtagtggtagctgtataaaccagatgtagaggcgagggcactagtcagcagcagacgagacgaaaggcgatgaagatggtaaggccaatcaacactggcagaatcatgcagccatggaagtgaagaaaccagtcggcagccatggcaaacgtaggcagcttgtgttgaagatactgatgcctattagtagtgacagcgatgtagccagctgtgaagaagatagcatcagttggcgttataacaagccagccgtgcaggcggtgacaccagtcagcggcggatgcggcggccggtcggtgaagacgtagacgcccaacaacggcagcataataggccagccgtgcaggcagaaacaccagtcggcggcggtcgaggcggccggtcggtgaagacgtagacgcccaacaacggcggcataaaggccagccgtgcaggcgaggacatcagtcggcggcgacgaaggcaagccggtcggtgaagacgtaggcgcccaacaacggcggcataaaggccagccgtgcaagcggaaacaccagtcggcggcggcgaaggcaagcccgttggtgaagacgtagacgcccaacaacggcggcataaaggccagccgtgcaggcggggacaccagtcggcggcgacgaaggcaagccggtcggtgaagacgtagacgcccaacaacggcggcataataggccagccgtgcaggcggaaacaccagtcggcggcggcgaaggcaagccggtcggtgaagacgtagacgcccaacaacggcggcataaaggccagccgtgcaggcgaggacatcgatcggcggcgacgaaggcaagccggtcggtgaagacgtaggcgcccaacaacggcggcataataggccagccgtgcaggcgaggacaccagtcggcggcggcgaaggcaagccggtcggtgaagacgtagacgcccaacaacggcggcataataggccagccgtgcaggcggaaacaccagtcggcggcggtcgaggcgagccggtggtgatgttctgactgatccattcctggagcgtaagagataagcttaaagccatgaatcccttttatgcatatctggatctggatcctgcagaacaaacatataggatgagtagtatctgatataaatataatactcgagaaaaaatcaagtattttaaaatatttataaatatgtatttctcctcttgtcaattttgatttctccgagcagatgactcattacgtttaaacactctgcccgactagtcatagccaccaagcactgggagtcggcctaagcacttcccaaacatgcatatgagtgacatgagttcgtcattaatggaacaaggtttcacggatcggagtttactactcgggtacttttgcaattattaagagcagaaaataaattatcttatctctatgcttttgatttattccgaataatacttagcaccttgcgttactcggtccatccaacgagcccccgggtgctaggaatcggcccaaaggcaaccatccattggcaaaccaaacggaaagcataggaagatagaactccataactcgataggtacttttgtactcagattatgtcgcaagcaatcaagataaatattataaaaaatatgatataacatctgtagcccccgactcactactcaatggaagaccaattggtgtagtgaggcagaggaaaaggaaaaatatcatataaagaataaaataaatgatgacttagctttgtaatattccccttggtgatggcaaaagtggccaatgtgggaacaaagtcgtccatcaataacaatgaagacaccagtcggcggcgacgaaggcggtcgacggtgaaagcgaagatgcccactaatggcggcataataggtcagccgtgtaagcggaaacaccagtcgacggcaacgaaggtgagccaacggtgaggatgtagacatccaacaacggcggcataataggccagccgtgtaggcggaggcaccactcggcggcgacggaggcaggccggcggtgaagtcgtagacgcccaacagcggcggcataataggccagccgtgtaggcggaggcaccactcggcggcgacggaggcaggccggcggtgaagtcgtagacgcccaacagcggcggcataataggccagccatgtaggcggaggcaccactcggcggcgacggaggcaggccggcggtgaagtcgtagacgcccaacagcggcggcataataggccagccgtgtaggcggaggaaccaatcggcggcgacggagtcaggccggcggtgaagacgtagacgcccaacagcagcggcataataggccagccgtgtaggcggaggcaccaatcggcggcgacggaggcaggccggcggtgaagacgtagacgcccaacggcggcggcataataggccagccgtgtaggcggaggcaccactcggcggcgacggaggcaggccggcggtgaagtcgtagacgcccaacagcagcggaataataggccagccgtgtaggcggaggcaccagtcggcggtgacagaggcaggccggtggtgaagacgtagacgcccaacaacggtggtgtgaccaaccaaccatataggcggaggcaccagtcggcggcgaagtcgtagacgcccaacagcagcggcataataggccagccgtgtaggcggaggcaccagtcggcggcgacggaggcaggccggtggtgaagacgtagacgcccaacaacggtggtgtgaccaaccaaccatataggcggaggcaccagtcggcggcgacggaggcaggccggcggtgaagtcgtagacgcccaacggcggcggcataatagaccagccgtgcaggcggaaacaccagtcggcggcggcgaaggccagccggtcagtgaagacatggacgcccatgaacggtggtgtgaccgaccaaccgtataggcgatgacaccagtcggcggcgacggaggcaagccggcggtgaagtcgttgttgctatcagcaatggcggtggcgaggacaagccggcggagtggactcgcggccgatcgaccggaaagctgagacgcctcgagtccatgaccagcatcaatcgcctcaatagtgccgcgtagttatatgcgaacaacaacaaaaaatagcaagaaattaatctgagattaaaaatcaatatgataaataatgataaaaatcagattgagtttccccctgactgatttggatcaagtcagagaagaggagcttgaagaagtggtcgacggaaaggaagtgaaaactcccaaagcgaaagcgaagtcggcgactcatgaaattgattccatcgcgctcgttgataggaaactcgacgcaacccctacctggcgcgccaactgtcgaaacatgaattcggcaataataaaagggggtagcgcacgagacctaaaagtggatggatgcggagacaaaggatttagacaggttcaggccctctcaatgagaggtaataccctactcctgtttggggatttgaatccgccaagtgtgtattgatctgacgatcaggttgtctcatctgccccctagagggcctcctgcccaccttatataggatggggggcaggattacaagatagaaaccttaaccaatacggtatcggtttcctaaatctactttacaatattatcaaaccaggactttaggccgttccgtaatatacaaggaaacgtaacacccaagtcatgatctgttacatattacataaatataagttatcccctataactagtcggataaccatgccgtgtgggtatgggatacccataatctccacaacatgtgtgcgtgctgccacgccgtgcgtgccgccgtcctcgtcgcggtgcgcgtctcggccacgtcgccgtcctcgccgccgcctccggccccattccgcgtgcgtgtgcaccgccgccgccacttcgtgtcccccgcctggcgccgtgcgcgtgagagagagaggggaagagtgagagagaagagagagaagagaggaagggagagagagggcaacagtggaagaggatatgataggtgggtcccatatttttttataaatagaatgctgactgcactgccacacgtacgtcacgtaaacgaaaaccacaaggattgaattgaggggggtaattcgtccggtttgcatagttggagatgaagaatgtccgattttgtgattcagaggataattcggatgaccgtgatagtttagggggtaatttgtacttttttttttcctagtatctttggtaatgtgctgaattttccctagcacgttaaccatgtgggcttgggaaagctggagagagtttttccagagtcctctccctctctcactctcgctctgtctcttttcccctccatgtttgcgagcacttgctgctagggtttggggagacaggggtgaggaggaaggcgggaggcgcgcaggctgcgacggcgctggatgggttccttgagtggaggaggcagatgcatgcgtggagatccgccggcggaggtgcctgacaagggggaagacgaatgagcaccaggaaaggaggcccagctggcctccaatttctcattttctcccctcatcgttggcttaaagcatcacaagagtttctctgaactattcctagaccctgtttggataagggaaatccatgtttggatactaattagaagtattaaacgtagactaattgtaaatctcattctataactctggactaatttgcgagacgaatcttttgaacctaattaatacatgattagcccgtgcgatgctacagtaaacatatgctaattatggattaattaggcttaaaaaaattatctcatgaattagctatcatttatgtaactaggaaggtagcccgcgtattcacgtgggcatgcatattattttattttggaaatagttccagttgaaattcaagtaaagtatttttcatttttaattgaattttcattgattactttttccttaagaggtctcaaagttttattgctcgtaaatttatttattttaccatcctgatagccctcctttttaattgatcaaatatatatctaatatagtgcctcttttaatatgtgagaccgtacggtattttaaagaaaagacatagtcaacatgaatcataaattaataattcattggaaaagttaacttttaatcatattattaaaagaaagaggctattgattttgtattgccaccttataggcttataaatgcaggttgtagagaaaaccatggagctactttaattcattgctttatcattgacctttgcctcttggtgtgtttaatatgacttatgcagagaaatataaaaattttgaaagaataaaatatcattatgaggttaaatgagctatgcttttccataacgaaaggagtatttattcaatactatcttacaggtttagtgcttcactaaagtagttttatgtgtaaaaacttcaacgctatattgcgggtgaagcattctagtaaaatagttctgtataaaaggattataaaagttattttcaaagatgatccatgagtttgagacaagaggctcactgcataggaggctgcacatttgagccatatgtgaaaagaaggcttgcaaaaatcatttgtgtagtggtgtgatgaaaataattatgcatacaattaaaaatttggaaatacctatatgaaaataatcgtacttgtgctcatattattgtttgccaacaatcaatagaacttgatagtgcgtgagacttcacatagcctacgaatataattacatagctgaaaataactctgcaagagtgaatattattgtattgtggacttttcatgagtgccatcatgatttaaaattttttactctaaaatttataattaaacatcaggaatttatatactccaaacaatcactctttgtaactttcttttagctaatgtgcattaggcatttagtattgcacttatatgtaaagtctgagctgcctaccctattttgtcttctttgtttgaaagaattaggcatttaaacaataatggtagtttattatgtccattactataagtaaaagttgtaatcacgatgtcctgggtaaatctcaagcttttattttttttatatcatgttatagttttctggtttgcaatatatgtggtttatactacctatttttccttctaattaaatcaccgtttatatgcatcgtgccgccatcggtcctggcggggcacacataaaatcagtttggcacacataaaatcaatttgcttgaactcgccaaaaaacaagttcaccccaagttgtttgttccttatatatagtagtatatatctatggcatgttttacgaatatgctctagtatatatcaattgttggtttgttctaggcaacgaacaatttagcacagtacaatatgaatggagatagatccatcgttataaagttgaagttgtgttgtatacaatataaaggtgtagctcatcagagaaacttgacacggtgatagcgatcgcctgcaatcaccagaggtgcatcgtagaattctttttcttttttttttagtcttgatgctctggttgagtagatcaacctattctaacggtggaggccctagttgttctctttcaataagataaatccaatagcctaaaataacatatcatcaatttaagtgaaaatcaaagatgatatgttttttatcatattttatatgaatttgtaatttatttgagcgtcatgtgatggtttaggagcatatgtaggatgcctcgtagtggtttagaagtgtttctagaaagtttaattgacttttatataaagtcatgcgtttgtgcaactatattatctcccctctattaaatttagaataataatgaacaatgtacatatgtgttcgtagaacatttttgcaccatatatatagcgttatcacatttatgtttttcttttctgtaattaaacaataatttgtcatatatgttggtgcggccttggtacatctgatcattctttgtcatgatatcacataggggcacggagtgaagttcagatgaatttttttttaaagaaagatagatctaacaacctaaaattgattaatttacaaatcgatggttgaatgtattattctttttggattttttctaatttaagagtgctatgtagttatttaaaaatatttgtatgatgtctagctacaataaacagattatacaggttgatgtctatctatggattttttaggcccataaagaaaaaatagtaattttaattatcatggaaataaaaaaaataaaggaacagagcaagggtaggttaggtatatgcgtaagaacgccgcacagaggcatggactgagggcaaatttttcttaagatagatctaacgatgtaaaataatgggttcactgatttaaatgaaaatcgacggtcgtatttctctgttttattagagtgccacttgatgacttgaaagtgtttatagggtgacgcatggaggattaggaatatttgtacgaagtttaatggactatcaattatgatcatcaaggtataaaaaacaatatgtattacatatataaatattgttaatataaatttaatggtagaaaataattgatcgactatgtttaagtggaaatcaatggttttttttgttttttccttcatataatttctatgattttctctaatttattggagtgttacttgatgacttaggagcttatttatttgtcggttattaaaacacaaatgaattaattattaagactatagtttcacgtgacaacttttgtaattaagatatactaatatggatgttatatttttttatagataaaatacatcatatgctttataaaattttaaatagtgaacaactgaagaaaataaagaggtaaggattgatcgcttcttttccaaccgtaggtgcaaaagtgcttacatatatactttttttatttttttttccaatgaatagttttttatttgtttttttagcaaatagtgcctagttatttttctcacgtacgtttttacgttagtatgtatgtgcacgatgcttggatgtgggggataggagagtgtagacccccgattttggaaatcggaaatcttctgtgtttatccgtaccaatccctggatcagtagttggtacacacatacatagttggatcacaacatatcacgaatgaattcaggctaaaagagttaaatacttacattagggccaggtaggccaacaactaccagaggacaacagcggaagacaaaataatataagggtccggttaacatgccacaggcagtcgactagggaacgagacctagaacaagactgcacttcgatcattttgttggatacgcaagcgtacgataagggcttctcttcaacactctcctaaaagatatataaatagcaagggtgagtaccaaccgtacccagcaagccacctcaacaacaatgcatatgatagagggtattttaaggaatggcttcaggttcttttgcataaagctagttttgtaattcttttcataagcctaagacctagcatagactgatcaaattttaataccaattttcacattaaacaacgacggttctgtccaccatccattatgatcccaaggatagcttcccaccattgaatcgtcatggttttctgaggacgtccaccttcccgcctctcaggaagtggctccaacaacataaaatcatcatgcaatatcccatcccacacaagttaagaactttgagtctagccaagtgtaatacatgtcccggtgctcaataaccgcgagcacggctattcgaatagatttggtttactcacactgcagtggatgtacactttacccgcactccgcgactgcccaacacatgagcctcgtcccaacacatgagacgcgtcacggcaaagcttttcgataacctcgcattggcagtacccgctccatgaatttaaatcctcatgcactctaggcgtctatatttatagcagtgagaggagttctggcgctcccgggaaagagaagtctcacacacatattaaattatggttcaagttaagttctctatcacacacactcatgacagtcctaccaatggcgacaccgatgtagggcacgcctctcggccctacctcaacggctgccccaccgtagcgcacttgccacactcaggggtgaaccatctatgcagggatactgcctccgctcggctatctaatccgctaggtctatacccattcgagaagtacggttgtacgggggtcgtttcatgcttaacttcatggctcggtccttaattgaccgaggacggtactagccttttccagataccacccaaatcctccgtccaccccagtcgaaaacagttgtttatttttatttctcctttcgcaaatcatgtcatcaatatcatggcaatgtggtgctcatgtctccacataccatatctcaattaccttcccaaaggtaattgcccaagcatatagcatttgataaatatgagcatgcatgattctagaatagcatttctaagcatttgtcatagttgactagggactcatacgtaaacatggttatgaaggaataaggggtaaacaataatcaaggcatggcataatcgcaagtaggatgttcatcattgcatgcaattttatttgtaaacaaaacaatttcgcaattgggatcaacatgttcaaggaatagtgatgacttgcctgctcaggatagtccttattctcgatataatcttgatcaaccttcacctcctagaagttgcagacgttgcctcacgactaaccgatacacaaagtctataatacgcgagaaaaaccaatattcaaacaacaatcaaatatgcacaacaaaatgtacttgttagggtcgtacctagggttgctcatactattattgcttgctaggggattccaatcatgctaagggctaaagtttcttaatctttctgttgtcatggtggtctatataggagctaaccaatgtagtatgaatgagatacgtatctggctactatgtggtttagtctagcaaatggctattcatgcatctatctaaatagaacggttatacactagaggttctgttgccggatggatttggatcggtcaaataattactgtgaatcatttgtattattattttattgatggaggctttattttaattatgtacatattttacttgtcaaaataaattataaaaggttaacaattacccatgctttgtatgttagaactgtttaggttaatcatattatggttacagactatcccatcacataattttataatgaataatcctaatttacaattatattaggtcaagatttataactagtattttatccactatagatgtttgtcatagactcattagtttactatacacaaaagggtaggtttttgatataccgtacatctaaattgggatgtacaatgtacgtgtacgcaacaatatttaatcattggatcatttactgaatggttgctatttactagaagctatacgatatatgtgattaagatggctctgttttgttaactaatggatgtcaaccgaactatatttattccacttcacatgacattataccgactaacttttaagcggtccaattacaactagctcagttattattctccttagacaagttgaaggttcatctaagtgtgtttatattttagttacaaagtatgaggctaaacttatgtaaataatttataagtcataggtttagttatatttggacatagactaattaatggcactaatatttcctatgctttaatcaatttgaaacaatgcacctagttagtttacataggttttatagtgagaaagcatgttaaagacaattatttgacatctactttacagtacaatatcaattttcttattagcacatttttaagttaactattatgcatcatcttgatattaattattaataattataaatatattttattaaatagtgaattatataccattggaaagcttgtgaatttagatgaatttaggttcaagtttcagtcaaatcggagctaaaatgaataagttatgctagtgtaaagattcaaatttgaattaattctaataattgcgaaatggtactgttcctaatccatttatttttaatacaaccttatccacaggctatagtgacttacaggtggggtcttcctattttctttccttttcttttatttttcttcctaaaggaatcatacgggcaaatgacgagtgggcccgattcctttgactagggtcaaactggccatttaacgcggtagggcccgcatgttgtagactcgagattataaaacctttataattagatttttaaccacccggacccacatgtaatagactcaactaataaagattaagaagggaattactattcactaaacacgtggggcccactctaatctctcctctcctttctcttttctctctctcttctctgttttctctcttctctccctcccagcttcttctccctcctctctctctcggctctttggcgatgacgaccgaccaaggggaggaggcggcggcttaccgacgatggcggcggcgacggcggcacgacgacggcgcacggcgcggcggcacgaaggcggcggtgcggcggcgcgagggcgacgcgacgacggcgcacggtgcggcggcacgaaggcggcggcgcggcgcggtggaggggaagggggaaaaaggaggggaaggaggggggaaatggcgtggggagggaagggaaaggggagggggtatttatagggctcgggggaggggtggccggctttaaacgatgacggaacggcgtggcgacgcggggctcgggcgatggcgacgcgcggcgatgggacggcgcggcgcgacggcgacagtgcgcggcgcgggcggggctcgaggcgctgatggcgacagcggtgacgcgatggcgcggtagcggcacggggctcggggcgcggcagcggctcatggcttggaggcgcggcagcggcgcaaggcgacggcgacgggatggcgggtgacgcaacggcgacggcgggtgacgcaacggcgacagcgcgcggcgtcttaaggcgctaggccgacggcgacggtcgagcggcgcggcatcgacagggcgcggggctcgaaggcgtggcaacgcg

SEQ ID NO: 21476 - DNA, 18627 bp, Oryza sativa
tggttagggaaccaaatcagacacctagagggctaatgaacagtgctagccaactatttttgattttatagggtattttgcaattaggaaaaatatactattgccactaattttgtcacaatgtaaaatacaccaagcctaacataatccatcgaaatttgtattcaaatttaatattgaacatatttttatttttattatatatttttctaagtattcctatttttagggctttggtttatttataaattgagaaaagttgccaattaaatttgtatttactcctaagcagttgagtgactatattaagtgctcaaatgtgaattttcccaaaatttaatattgtccaatatttaatatatatcctagatttttataatttcctatatttggggattttggtatttatctgtttccacacatattggttcatctttttggattggttttaccactacatggatttctataatttagcatttgtgattcagttcaaattatataatatctaattaatttttcccagtaaaactattctatagatagagttccatttatttgaatgattatcatttcctaagtgtttatatttcatagcacgcatcacatggttcaagtattcaatatttgatccataaattaaattagtaattaacctttcctttgtttggatttgctttctttgtgattatttacggtttggcaagcaatagtaatcataacaatcagcatggtgcaaaagttttaaaaagtttgaaattttagtgatttttattgtcgggaattttcaggatgttacacagagggaggtggaaaaaacaattctaatatagtaataattaaacatagtgggtctagttgtttatttaagtgacacatggtggtttaggagtatttgtaggacttccacatggtagtttaggagtgtttgtaggaaatttcatggacttctagtatataactaggaaggtagcacgcacatttgcgcagggaggcatcataagctacggttgacacttatgagtgcggaataccaatcaaagaatatctggcacgctttaaaagtataatttctccataaattttattctcagcattgcttaggtaaattttctaacctattagttaattatttcaattatctaacacaattgttatggcaatagccttttcaatctaagtgaaaagtaacaagcaaaattttctaactttttcctccaattggttagatttactctctaataatatttttctattttatttaatacaagtgcaaatataagttcaaaatttgtgatattatgaatagtgatagagcattacacctttcatctcaactttgagaaaatttcaatcacacttggtgatgtattaagtagttaagactgatgtgggtcctcattctttattaacaataaacatatgaattggatggtatggatttctagagttcaataagattccgtgctgtgaaacacatctatgaatgtatcatgtagagtgtgcgaggcttcatgcagccgattgtaaacacgatcttacaactaaatatatctaactgtgcatgcatcattattttggaatgtgatgtattacatgcttctatgatttgtttggttactattgatttagtttagctatatatgtttatatatatgtttatagagtgacttataatgatataatatatgctggcaatttttttctcgtatttcattgctatttggatgacatgcaaagtgcatgggtcaactgtagccaaataatatattatatagcaaaatataggcatgtggatcttaaatcgtcagttttgttataaatatatcaatagttagattagaagtaagacatgtatcttaaaaaaaatatcatcgtttcaatatacaattatcagttgtttcttctttagtttaatagttaaataattcaaaagggtagagaaatgaagaacgcagagttcgaggcatggagagggggtggattgtgatgtgcacatgtgaggggagaagattacacgcaccttccatgttttctttatcgccaacccaatttacttcaaaataaaatgaaggctccacacacacaagggccaagtacaatttagagaaagcagcatggcaagctatatggttggtacgccaaatcgaggtgctgataaagcagtgctgtccgacaggttggtggagaaatgttatgcaaactatatggcggaggaatgttaacgatgccgtctgataattagggggcttttaactatttgccactcttacgaatggtgcttaacgatttgccactaggcccacatgtcatagacacatgagggcccatgtgtcattgacagagcatggcaaaatcgttaattgccaagtcacaagagtggcaaatagttaaatttcccgataattagtggcccctactccccagcctgactgttgagcgcgcacgagaaaatgtatcaaggcttcacaatttacacatgctctcttcaaataatttcacaattcaagttcagactttcagtaccagaaaatggttctcaataatgcagctttatttattatgctagaacatcacaacaaacagagagaaaactccaagaaaggcaagtaaaccacacacaaacatagcacaaaccacgtcagcacacatatgtatatagttttggtaggaggataaatttaatttcctcagtggtaatattccagcctgggttgttagtgcgccctcctaccatcattctccaatgccatcacattaccgtggtgacgaacctcttgatgcatgtgaaattcatgcctgtgcacctccttatgcactctgtgatgcataccatgatgattatggtccacagattcgaaactgtccaacttagttgaagttgtagttatccatccctgcagttaaaacgcagaccaaaaatcagccgcacgattgccgaaaattatatcagggtttgaaattttggtaatttccgaatcccagcaagctaatatatggtccaagattttcaagtttctttcaaaattttaaataattccgtgcgaaacaccaccaagattcctgaaatccggtgaccaccgaaatttctaaccgatatacttctgtccatttcagtccaaatcaagtgtttagcaacagacaaaaaccttctgcatttcctgtagatccttgatttttcgctgcaatttcttgttttcctcatcgaggcgcttgttctcttccctctttgtctcaagttttgtgttgagatattccttctctctctttgtgattttgagttcttccttggcatctttggtctcctttgtctttttttcgagctttgagttgagattttctttgtctctcttccattttcgttgttcttgctggagaagcttgtatccttcctcttgtttgatttgctttgactcgacagcttccttctgtttcttcatgttctgaaggtcctttttgtatcgatccattttcgccattagatcatcctgaaataaatgatgaagttagcaaaggaaatataatcagaaagattgaggcattaatcttgcaattaattaaaatctctgcatttagcacataccggcacaactgattcaatcttgacactggatgacattttcttgaggcgctcatagagcttcccgacgtcgacagtccctggcacgtccaccttcaaactgctgccatctacttttactttgaaattatcctggtcgacagattctaaaagtaaaaaaccaagatgatgagtactattagttattttctgcataattcacccttccgaacatctctgtccatttgatttggactgaaatccaacagcaggcaggattattgatccacaatttgtgaaatttccatcacccggagacaagaaaatacgagatgttaaatggggagtatatctgctacgatcattacaacctttgaactcttgacgaagtacgctcttgacctctacgtcgtttgcaccccgaaccttgagcttcgtaagtttcttgtctccctgccaagagttcgatcgtacataagaagaaatccttcaaacgtttgttgatttgaaccagcaaaacaaacgagtgcagaaacaaaattcaagaacagcacataccatttgcttcagatatatatggtgaaaagagatggggaggaagtcagagactagagcaagatctagtactgctgctccaagaacaacatcgccatgggctaccaacttaaataccgtgattcctgaggaacagaatctggaaaacgtgttcgtcgttccatctgaatacgcgttctttcatgcagatgtcctcgtctccgtgtaagatgcaaatatggatttgattacattcatctcgaaaggtaagaaggatgatcatcgcatctgtatcttttcccttgacttatcgtagcttcattccgtcaatgaatataatatatactccttctctttctaaatatttaacgcaattgactttttaaaatatatttaatcattcgtcttatcttaactaattaaaagattcgtatttttcctttagtcacatcatccgtgcggtgtttttttcgtccgtctaggtttttttttgcgcgcgtggtttttttcgtacgtggtcttttactgagtccgtctgcttttttttccgcacgcagttttttataggcccgctcggtttttttgcgcttacggtttttttaagttgtccgtctccagttctcacatgatgttttttttgggcccacagcccaggaattacatacagagtctaacctatataggaattacatggagtccaaacatagaaattacatgacaagtagtatacaaacaacttctcaacctatatagaaaaactgaaagcacatagaagactaatatatgctcctagaatttgatgtggatactaagcaatctctcgctcgacgctactcatacatgcacccagatttttttaaaaaaactgagaaattcctgttcgccgtgagacttaatgttcttttactgcatttacgatgatagaaggtaattcttcagtccttaatgatgtacacattattaatggcatatagcgaacaattagcacaaatcaatcgatcttagagggaaaaaaatacatggaaataaaactaccaagctcagcaaggaataaatatcaaaaaccagattgattggatctcataccttatttaagtggcaaccatattttattagtaatttcgaagaaaaaaaaccagccatcttatattagtaaaaaaaaactttatcacacaaaactattaacccaaataataccactattacttcattatatttttatttgctacacttatttttgatttcagatgtataataagccccagtctgtcaatcaatttcccttaactaagggcgcgcaaaaaaaaaagacctacatatataattgtgcttgaggtcccctatttattcctagggccgtaacgtgaaatgtatttcatataacataagtaaagcattaaaaaaaaacttacagtatttatatatatagagtatataaaagagtattatggaacattagtaaaaaaacaagaacaaagatacttgcctagaaaattcagtggaacctctctcgcatattaggacaactaaagtttctaaacttcagatcaaataaaagcatcttgcataacaaactaagacttgaaagctcagacaagaactgtattttaaacaacaagattactgattactactatgcaagatgatcccaaaatttcacatggacagcatgatatattgtcttaaagcaaataaagcacctgggcagcaatggctggaactgacggcgagtcaaggacgtcggtcgttggtgagcacggcgtgggtaaactcttctcgaactctgccgtccgcagcccggcctcgaaagaagtttagtataatgtggacattgtttctctcataagctctcgcctatcagtacagctccagtaagccagatgatgtttatgaacagttgaagaatctagattaataccgactagaaggggatgcgcggcataatgctgtgctcagctgtgcatacaaaacaaatacggtttaagcaaaattttaattccaaatagtttttattgatcgagtgtttcccttcgttcatttgatttgaaaaggtaatatcaaatgtattaggtacataattagaagcttgtaattcgaaagatgacaaacttgaaatgcttggacactctgactacattaccaccataacaattttatttaagcagcatatctagcaaccaataaagagcttataaaacaaagcactatttctttttttttcatttttacagattgcatgctaaaaccagaaccttctccaatcacccgtcacatatgaatctgagcacttcagaatattagtttcttccactttctaggaaaaccgaaggttcttaacaatgacaacaggtgagtgataaatcatcctaagtacgacttcacaggtgagtgataaaccggcacctttgtttctctgcatcggtgccacctatggggttcccaaccggctcccatttatgagcaactaggtcccgatcttttgataggtattgataactctcgatatggtgaaaacttgacaaacacgatccggctttttgatcagcacgatccaaaccctacaatcgcagcaccacatcttatctggttatcaaccgtgcactacccagttaaccccgccgataaagctaatccttgcatgtgaatttgaagaacacaagaaagacacaaggtacactgcaattcaattaagctctcaaatttggggttacataaaccgaactagcatgaaactacaacaataaaaataatataagaaaacttcagtataagctatgacgactactggataaatatgattagggatattctagggttgccctagggcgccaaccccttgggcttagctcatgacccaattacaaggctcgaggcctaaattagattcggactggataaggtacgtagattgttttgcagatttctgatagcctaggaggaattttgatgtgggactaaaaccatatgaaagtagaatccataagctttccaataagtccttatgggccccaagttttcttctagcacgagatcaacggctagtctcgaatccgaatataaaacgtgcgaaatttcatctcttgctttctatggactaaaagtgacgtggtgagttaagactagacttggagaaagtcttggtttggcccccagtgaactttttttgatcatccattattcctttgcccaaataagtacctctacaaatggaacacataaaactcatggtgcagtatcgtctgtttaaatatataacatgtaaattgtacatagaaaacatgcacctttggttgctgaatgaataaggtatccatggtcatatccgatctagtgatatcctaatcatttagttttatgtagtagtgagagagtgcgcaacagaagaccgagccatggatctgccgagccagttcaccatctcctgtagggcagcctatatgttgcactgtatgtacaccgctgtctgtacaaggtgtgacaccaacacataagtcttattggattttataggagcagttatacccaagtacaacataaacgttagaggtgaacaacgtttgcagaattctttgccacattagccaaattatctttttcaacgcatatccaattttagatacggcaccattgtagcatacatttaacaaacttgtttcctaagcaatcctgattgccagagagggtagccacactttactgcttttcgtgaactttcaaggtgtggagattatggatatcccatatctacacggcgatggtatttggactgagtacaggataccaaatatagatagaatatcttatttgtgtctcgggtttgtttcttaacttgtacatcaaggaaataccttgagacttagtcggttacgactgtatttaatctgtatctgcatattccgttagggatatatattatcttttgtaacacggactccttcccatatataaggggggtccgggtgcctctaggggcatatgttgattttcccaaatcatacaatcaataatacactcggcggatccatccccggacaggagtagggtattacttcttgaataagaaggcctgaacctgtataaatccattgtctccaaacccatacacttctcaagcttgatagccacccccttttattattgccgaaatctagtttcgacagttggcgcgccaggtaggggttgcgtcaagcttttcgccgatcagtgcaatgggttccatctccggcatcgacgacctcgtcttcccacccgggcagatgtttcggttcggcagcctcgacttcgtcaccaacaacttcggcaagatctctctccttgactcggagtcataccagtcgggagagaaccggatttcagtcccgtttggactcccaaacgcggctgaaagttacttcaagaccatctcaatcgagtcggcttcaaaccactcgggagagatcgcatcttctccaacgtcaccagatcaagatgatggggcttacccaccgatcctgatggagctccctgacgatttggcgaccgtctccatcatgacagcgccttcatcccgtaggcctaggcggaagtcggcttcaacaccgatttcgcctagcttcagggaagtcggcgtcatcctccaaccactcggcacggtttcgacggatcagctggatggctactacagctctcccaccgtcgactcgcgtcccaccgacatcgtggaatacgacgagtttggctctcgctactacaacgacccggatctcgacgacttcgacggaagcctagaagacaactacacccctctctacttcggcgtcttcatggccgacaatgagacggaggagcaatgccaagcccgggaaaccgaagcacgtcgcgagattgagcgtcgccgactggagcaggagcgtcaagcacaagaacaagaacggctacggcgtgaccagcatgagcgtgagcgaaccgcgaaggaggctgaggaccgacggcagcgagccttggaagcagggcgccgagcgcgtgatttcattggccagcaagatgttgaagggataccggttttccgcacccctcagcagaatgcggttgccgcgatcaccctcctcgacaccctcctcaaggaaaacgagcacaatcaatctgatcacgtcgtcaacatcttgaaccagacaaagaccatgattgcggcttcggttccagttaactccgaaagcgtccacacgccgactggcagccgactcccccacttccgatctcatgattatcgtcatctgagcctcagcatcaccggcgcaggatccaaccgcaggagcaggggccacgacgagcggtccgtccactcgcctcccgaccaccatggggagcgccgagtggaatggcctcgctcaccacctcgtcgccgccccgtcgatcttcgtgacacaatcatacagcgccgagcagctcgaggccgtcatcattattcgccagaccgccacgacgacgaccttgatggagtagcagccttcaccgacgacctgcgtcgagtggattggccagccggcttcaagccgactggaatagagaagtacgacggtaccactaacccagaatcgtggcttaccgtctacggtctcgcaatccgcgcagcaggaggagacagcaaggccatggcgaactatttaccagtggctttagcggattccgcccgatcttggctccatggattgccccgtggtacgattggatcttgggccgaattacgcgaccgcttcatcgccaacttccaaggcaccttcgagcgtcctggcacacaatacgacctttacaacgttattcagaagtccggagaatcccttcgagagtatatccgacgattttctgaacaacgtaacaagatctccgatatcaccgacgatgtcattatcgccgcattcaccaaagggattcgccacgaagagttggtcggcaagttcggacgtaaacctcccagaacagtcaagcttatgtttgaaaaagccaacgagtatgccaaagccgaagacgccgtcaccgcatcaaagcagtcgggtcctagttggaagccaaaaaatacgccggctacgggaggaggtggaagtaacaatcataaggaccgcaagcgtaagcctgaggaacttgttgcaaccgccactcattcttctcgacagcgttcgcgcgtcaacacgttcgacaagatcatgaactcccaatgcccgcaccatcctaactccaaccacgtggccaaagattgtttcgtttacaagcagttcgcggagcaatacaccaagcctacacggaagaactccgacgaagaacaaagcacgtcgaggaagaaggacgacggcgacaccccggcaggatttcaagaccaccgcaaggagctcaaccatatcttcggcggccccctggcttatgagtctaaaaggaaacaaaagttgaccgaacgggaaatcaatgctgttcagcccgacacgcctcaatatcttcgatggtcagagattgcaatcaagtttgaccgctcggatcatcctgaccgagtggtccacccggggcggtatcccctggtactagacccagtggtccgtaatgtcaagcttcgcagaaccctcatcgatggtggcagtgcactcaatatcctcttcgccaagaccttagatgatatgcagatcccgcgctccgagttaaaaccaagcaatacgccttttcacggagtaattccaggattatccgcaactccactcggccagatcaccctcccggtcacttttggcactcgggaaaacttccgcacagagaatatcagctttgaagtcgccgatttcgagacagcataccatgccatactcggacgcccggcgttagccaagttcatggctgtcccgcactacacttacatgatgatgaagatgccgggtctccgaggagtcctaaccctacggagcgacatcaagcaagccgtcacatgcgacaaggagagttgcgacatggcccaaacccgcgagatagcgtctgcccgagaggatatccgactggctgcaaccacggtgagcgaaggagaagtgcccgctaccaagatttcaaaaagtggagaaagcgaagccaagactaagaagattcccctagatccttctgatcctactaaaactgctgtaataggcgccgagttagattgtaaataggaaagcgcgctcatcacctttcttcagaacaataaagatatctttgcgtggaaaccatctgatatgcctggtattcctagagaggtgattgagcactccttacaagttaaagaagatgccaagcgtattaaacaacgactccgccgattcgcacaagacaggaaggacgcgatcaaggaggaattgaccaagctgttagcggcaggcttcatcaaagaagtccatcatcccgactggctggtaaacccggttttagttcggaagaaaacggggcaatggcgcatgtgtgttgattatactgatctcaacaaatcttgccctaaagatccttttgggttgcctcgcattgaccaggtagttgactcaaccgccggctgtgagcttctcagttttttggattgctactcggggtatcatcagatctgactgaaggaatcagactgcttgaaggcttcattcatcacgccctttggagcatactgctatgtcaccatgccgttcggactaaaaaacgcaggagcaacttatcaacgtatgatccagagatgcttctcaacacagatcggccgcaacgttgaagcctatgtggatgacgtagttgtcaaaaccaagcaaaaggatgatttgatcttggatctagaagaaaccttcgcaagcatccgcgccttcaggatgaaattaaaccctgaaaagtgcaccttcggagtaccgtcaggaaagctgcttggttttatggtatctcataggggtatccaagccaacccggagaaagttactgccatcctcaacatgaaaccgccaagtacccagaaagatgttcagaagctgactggatgcatggcggcgctcagccgattcgtttcaagacttggcgagcgggggatgcccttctttaagctactgaagaaaacagatgatttccaatggggacccgaagcacagaaggcctttgaagattttaagaaactcctcaccaagccgccggtcttagcctcaccatacccgcaggagccgttgttgctgtatgtgtcagccacctcccaggttgtgagcacagtcttggtcgttgagcgtgaggaagaaggccatgtccagaaagtccagcgaccgatttactttgtcagcgaggtcctagccgactccaaaacgaggtaccctcaggttcagaagctgttatatggtattctaattactaccaggaagctatctcactactttcaaggtcactcggtaacggtggtcacatcatttccacttggcgatatactgcacaaccgtgaagcaaacggacggattgctaagtgggctttggagttgatgtctttggacatatcattcaagcctcgaacttcaatcaagtctcaagcgttggctgactttgtcgctgaatggaccgagtgccaggaggatgcccccacggagaagatagagcactggaccatgcattttgatggatcaaaaagactttcgggcactggagctggagtggttttaatttccccaactggagaaagattaagctatgtgctttggatacatttttcggcgtcccataacgtcgccgagtatgaagcgctccttcatggactgcggattgcaatttccctagggataaagcgtctaatagttcgaggcgattcacagttggttgtcaaccaagttatgaaagagtggacctgccttgatgacaacatgatggcatatcgacaagaggtacgcaaattggaagacaagtttgatggactcgagctcaatcacgttcttcgacacaataatgaagccgccgacagacttgccaactttggatccaagcgctaggcggcgccctctgatgtctttgtcgaacacctttatacgccgacagtacctcacaaagatgctactcaagttgcgggcacccatgacgtagctatggttgaagccgactggcgagagcccctcatacgatttttgacttctcaagaactcccccaagacaaagatgaagccgagcggatttcaaggcggagcaaactttatgttatgcatgaagctgagttatacaagaaaaacccttcaggaatcctgcaacgctgcgtatctttagaggaagggagacagttgctgaaagacatacattctgggatatgcggaaatcatgctgccgcacgtaccattgtcggcaaagcttaccggcagggttttttctggcctactgccgtgtccgacgccgacaaaattgtgcgcacgtgcgaaggttgccaatttttcgccagacaaattcatctaccagctcaagagttacagaccatcccactgtcttggccgtttgcggtttgggggctcgacatggttggcccgttcaaaaaggcagtcggcggttacacacacctctttgtggccattgacaaattctccaagtggattgaagctaaaccggttgtcacaatcacagcagataacgctcgagacttcttcctcaacattgtacatagatttggagtgcccaatcggatcatcactgataatggcaggcaattcactggcggagtttttaaagacttttgtgaagactttggaattaagatttgctatgcctcagtagcacatcccatgagcaatggacaggtggagcgagccaatggcatgatacttcaagggattaaagcgcgagtttttgaccggctaaaaccttatgccggcaaatgggtggcacagctgccatcagtactttggtctttgcgtactacacccagtcgggccacaggccagtcaccttttttccttctctatggggcagaagcaatgttgccgagtgaagtcgaattcgaatctttgcgctttcgtaatttccgcgaagaacgctacgaagaggactgagtggatgacttgcatcgactggaagaagtccgcgaagcagctttgattcagtcggctcgatacttacaagggttgcgacgttatcataatcgcaatgttcgatctcgtgcctttctagtcggcgacctggttttgaggaaaattcaaactacacgagatcggcacaagttatctcctctatgggaagggccatttatcatctccgaagtcacccggccaggttcctatcgactcaagcgcgaagacggcactctcatcgacaactcttggaacattgaacatcttcgtcgcttctacgcttaagcttatcattgtacttatctatcttgactgtcaacatcaagttttcttcttgaagttgtcagtcgggggctatcatcataataatggagtgtgattttttttttatcaattcaatttgcttacttggtctatcattgccttgtttggtttttctacttagtctgcgaggactgaaagtttttaatagcttctttgggttttaggctcaacaaagctggacaaaagcttttaagaaatcaacgacttggctagaattatcaagcacagcataaatacaccagtaattgtacaagttgagcctccatttgttacatctatgctcagtcagaatcagtcctttcatcatcagagttattgttacttggctgaaggtcgttgttgcggaattgctctacaacgtcacttgcaattttgtcagccgcattttgagcattgctgataagatcaagagcagcctctacgcttgtcccgtctgcaaagccatcaatggcatcaatttcaatcctcgggtacaaggacttggtcatcgccaatgccgtgctagctcccatacttccagctttcttgatgttcttgaaatatacatccggagcaactctcagcttgtcgaagatttcggttgcgtcgagtgcactcggaccactgttattgaggaacatggcttggatgagtggagtagcgacattagcgacttcatctcttgctccttcaagcttcttgatcttaccaaccaggacgtcgaactgagcttgcgatttgattttgcggtctacagaacacatttatgataagaatctgctgcattaaaaagagagaagttcagattgtcagctggcagtaccttcaacctccttcaaggccgagtccctttgtgcagccagttctgccttgtctcttttcagggcttcaatttgtttttccatttgagccatcctggcggcttgcgctgtttgaaatccaaatgattgaggatacagttacgacaacataaattaatgggaccgatctagagattaccttttgacgaaccactcagctcgaagtttgaatcctggagctgagtaattcgctcccttaattccttctccgtctttttggcgagctccttggcctcgtgtagctggtccctaactgcttcaagagttcccaaatgaggaaccagcttttctaaagttacggtcttggcctcattgcgaagatggattctctgcataatggttcatggtttagttctgctaaagagaaaacaaagtcatcaaaggcagtcgcccggaagatttacatttacaatacgagtggcttctccaagcgccttcttcagctggcacacttcctcatcttctttttgacgatttatgacgatgccggcagcttgtgagttctcatcccaccatttgagtaagataggaggacgagagtcatcagccgcctttatgcggagaatttcttcttcgtcatcgcctggtggccctgatgtatttccaagatgttaagcgaataagcaggagttgttcaaatcggcatcacttggaaagatgagttacctgaggatgttcccagctgagcgtgaggtgatccttgttctttatttggagacccaatcatcgagtcgttaccagcttcaggtccttgagaagtcgtcgtctgtgcttcaacttcgggaatttcttgatctggacctacatccgactggtttccagtcgggggctcttgggttgttgtagtttcagttgctgccgactgatttccagtcgggggctggtcactcgaatcggccttatcacctgaagtatgggcgccagtcggctggctctcgccagtcggctggctctcggcagtcggctcagaatccttggaggaatttggctctgtcacagccggatcaggatcttttccagttggatctatgtcagatggtttcctgcaaggtgttctttcaatactcagtattattttcatgaaaaaaacatgccgaagtgaaattataccaagaggttttatacctggaagatgttctaatctttggcattgggcggttagctagttttttcctaagcattgtacgctttgggagtttattaggcgagcccttgtccccagatctgttgtcgtcatcgccttcatcgtcgtcaagcactagttttctcttgcgagaacttgtctgcccagtcggattggaagtttgaggttgtggatctgatctgattgtcgattctccacctccttgaacggtgtgctggcgaggagaccggcgctgagtgattgggggatcagatttcatcaatacatattcctgaatgagatgcatccacggttagctaaatcaacatgaagacaagattatgttttggtcataggttgaatatttcagatacatacctgcggaggcggattgaatgcgttatatggcacaactggcagctgatgtgagtagctgacgacaatagcatttgagaagattttatacattctctccttcatgattttgaaatccagagaatctggttcttcacgattaggatcatgcttgccgtcgaactcgaacgctgtgcgggatctttctttaattggcgccagtcggcatttaatgaaatgccgagtaatctgctctccttgtaagccttgttctttgagttttagcatgcgatccatcaactccaaggcttgggcagcttcatccccaatcggaagagagttccaagtctcttggtataccggaggaaggcaagagtattcaggaagagcaggctcaggattctgaacataaaaccagttcgcatgccattctttgtttgaagtcttgaaaggcatagagaagtatttctggctcagagtgcccctcagctgaaatccggcccccccgactacgcatggcttactcttgttcggttggggcttgagaaagaagattcagcgaaacagagcgaagtggggcttaatccccaagaaggcttcacaaacatggacgaaattggcgatgtgaactatggaatttgggttcaggtgatgcaagctgattccatagaagtttaaaatcccgcggaaaaatttcgaggtcggaagagcgaagccgccatagaagaaatgggagaagactacaacctcatgtgtatcgggggacggaaaagcctcaccgtgcgctggccgccacccgatgatctccttggcagggagaacgccgtgcgccaccatctccttcaggttctcctccgtcacgtcggatgtcgcccattggccttcaaagctttctttctcttccgccattgatttcactcgaatgcgctgatttgattcgagggatggctagggagaggcaaaggattaaggcggtggatcacgggagagattttgatgcacttttcgaaggtggatttgagcggaatggtgaaccctagttcgccggcgctgctttgcactgttgcaaggagtggggaaaatggcgagagttccggcggggaagacgaagcgtcgcttggatctcgggttttcttgttaagggtatcggaggtgcaaatgggcctaggcctgaacagtacctcagcccagtatttttaacagcgtggcccattgtgttccttagggacttaggcattttttgctttggcaatttatgcgcacaatagtattgcccaatgctgataaattcctttttatgcggtcatataattctttggaattaatgctatgcaaattaaaaggtgcccgacagaaaggtattatgctgtttttgtaagcttttttaggctacaaaagctgtcagggttaatttggaatgacttgtttttatcatagtcatttccttggtatgttatatacctgttttcattatggtaaatagtcatagcctaggctattggacttattcattaccataatttttataatacttggtgggtaatttttagagttttttattcggatgcctgtcaagtatgttcattcgtgaaccttttagagtgtaaaccactcggattccttttattacggctaaaaagcagtcggctagaatgcctctttaggcgccgcgtatgcttttgtcatatgatgcataactgtgctattattttgttctcaactatatgtttagtttattaactaatcacatagttgggggctacacctaattaggtgcatctattcgatgcaccatattctttattttttcgccgtttacagtctttgtcttcgctattcagcagatcttggcatgaa

SEQ ID NO: 21477 - DNA, 9133 bp, Oryza sativa
tttaattatctaagctaagcaaaggtaatttcctatctgttgctaagggcaccgacccctgctggtctgccagcgtggttccggctatagctctatgatgtatccaacgtggaggattactaggatgggattcagggctgtcaccacctgccgcctacctctgacaaatccgtgggatacacaacaaacaaaggtaatctctaacctagacaccatgtctaagttattaattactactctaatacttgcgcaggaacttccttctctatccggagtcctagtactagagcacttagtataaatactaaacaacgaacctgcaaagatgtaaatcttacttaaacaaagtaattaaataacataagaaaggaacacgaatgcttactttatagaagtttccccgaacccggagcagagtgtaccaacagctccggtactcctccagaattcctcctaggaagttacactcgtcgaggtagaagtcggatgagcgccaaacttctaggcactcctccagagcttcccctcactctctaccttattctaatgtacaaaagatacaatagagcctcttgtaattcagcccaaagttgtgtgttggaaatgagagtgagctcctccttttataggcaggtatgacggttacagcctatgcgaaatgaccaaactaccccggaaccgccattaggatgcgatcagggccatccacgcaaaatttgacgatcaacgaccaccaaaacggttcggccgaactggagcttcggccgaacccgggacggctccgttcggcccgtttttcgtcgtggacactaattttgaggccctcagcccattggcatgatagttgggcccatttggagttgtttaattgacttatggggcctccaatccgtgtaaatgtgtcctgaatgcgcggaggtgcagtttgtcgcttgacggatgtgttttcttctcaaaatacctgcatacacatatttcaccaacactagtggaaatgattagtaataatgcctaccactacgttggataccatgttttatttcattatacgaaggtattgacggtcagatattatgatttaaggaccgtcaacaaccaccatgcagtaacactaataaaatatagttaaaatatagtcatgacggatctagttttgtagagttctttttttaaagcattacgatgcaaacggttcaaaaatataatagatggtgtgagagatatcattgtttaaagatgagaattcaaaagatatcacttgcacttacatttactggttcaaagtgggtggtaggtcatgtacctgtgtgtttggttgttaccacatgttttgcagtaacgctattaagaaattgcagtaacatgcactgttactgtaaaaattatagttgttactgcacacatacaataacgtcatgatggaatggtagtaactcacaataaaaagtagtaacaataatgaagtcgaagtcaggaggcaacccagcaaatggatcctcgagctcttcctctggctcatcgggctcggcttcaaaacccggaggggaaggagggatatcgatgtggtggtcctcattatatcgcgccttgaggtatttgacgtcgcgagccgttttcttcgccgaattccgcaatcggcggttattttttgcctccgcggagcaaagaccaaaaagactccacaaaatacggaataagggagacggctcacaatgagccacagaggaagggcgcttagaagtagaaggcggctgagtggaagaagaggggatgtccctagctgctgaggagcctacctaggaagagcggggggccttgacaaggcccaagtgaagctgggaatgagacacatcatgatgaaactgaagctgagtgacagtctcgatcatccacataatgtgaggaacatagaccaactccttcctgtactaaatggaggccatgcagatttcctcccacacaaagtgataaacatgaaagcgatgaggagggggatcgaacctgacaagcacggtcctggagaggtggttaatgctgctagcatcaccatccttaggcacaaaggaccggtgaaacatccggttcaagtaggcaaagtacggtttgagactgtcgaccttacccaacaccacattaggatcattaggaatgtaaagagggagtaaatcagcgttggcaggaattggaagattatgcagatcaggaaggttgagcaagtcatgcaaatcaaaaccccaaatctcagccaatcgcggataggagacagaaaaccaggatccttgggtcatccattgcatggcatgatatggatcaaagaaaacggtggcatagaattgagcgatgacttcgttgcaccaatcctgctgtaaagtcatgaaagagcgaattcccatgcactcacaattggcaatcacaaagttgagcaccggatcatcatgcgcctgcagctactcccagttgatccattgcatgggattggtgggatgagctttggacttgatcacagactcataaaagtcttgttgaaagagagtccaaaaccgcgaatccgtggcggtgcggcgaagggggcgcggatcctcatctcagcgaggagcaacaacttcagtcttccgcctccaatcatacacttggcgaatcaccgccggatccctctcgggggtatgaatgtgaagaggagcaatagggacattgggttggtgcggcggcgtttgcggttgacgagaggagccctcaccatcaccaccaccaccaagagcttgagtggaccgccgaggagggagagtgccgcctcgagccacccacgcatactgaggagccgcatcctctctcccggaccaatcactgtccgaatcatcatgagaggatggggtgggagagcggtccctttggcgcttggatttgcgggaagttcgcttgcggggaggcatccttcaaacaagatatagacaagggatcagtgaatggaagccaaagaagcaagaaccaagtaagtgaaggcaagaatcgtgcaaaaccgaggtgataggggtcggccagagattttcggatatatccgaaaacaattttccgaaccctatcatccggatgccgcacaaatccgccaacaaaaacttgggaaaatgaatctgcaggtcctagtgcactaggggaagaactccaccaaaggaaatcgcaagataagacttgaggaatcgaaggatttgattttagggtggatacctcaagaacgcgaagaacacttgaagaacgcggtgaagatcaacaatgtaggtcccaagtagtgccccaaatgcgctcccacgaggatggagaggaggggagccgcgggaggtcgtcggagaggaggtggtcaccggtggggagcggaggagggagtcaagcccgtggtgaaaaagagttgaaaggagggagaaaggagtccacggggtgaaatataaagaccccgatattttcagatatttccgaaaattttcggataagtccgaaaggatccagtaggttgcgcacgcttctgtagattttcggatatatccgaagattttttggaatgtccgaaaaatcctgggatagctttgaatgaagagcgacaggacaggagattttcggaatgtccgaaaatttttcggaaagtccgaaaattcctggaaaacagtttttcaaagggatttcgctgggaattttgaagaaacagttttgcaaactttctaaaggaattttgcaggggactagcaccgggaattttttttgtcaaaaacacttttcacaaggagttttgaaaggattaaaggaatggagggatggtcgagcactaaaggctccatttgaagttgcggctagcacacacaagcatacaaaacaatagccacaaatcaaatgatctatccgagggatcaaaagagagggaattaccatgagataagataattcaccctcgagagagggaatgtgtgaatctatttcaaattgtgttaggaacaaaattcattgaaaaatgagatccccatacacatagattcaagatctccacaaatatgactagtgtccatccatgagttgaatgtccattttgtcacaaagtggtatgcaaacctattctagcaaacaaacatgcatgcaatagatcaagccacattccgagaatccaagatatttagttcaattctcaactcacaaaacctagcttcatctaaaagcttggtaaagatatccgccaattgtttgtcggttctcacatgttggatgtctatgtcgtctcttgttgaatggtttctcaagaaatgatggcgaatatctatgtgtttggttcgggaatgttggacggggttattggctatcttaatggcgctctcattgtcacataggagtgtgattttggacacatttaggccatagtctctcaaggtttgcttcatccaaagaagttgaacacaacaactccccgccgaaatgtattccgcttcggcggtggatagggcgacagatttttgcttcttggaagaccaagaaacaagagacctacccaagaattggcaagtacccgatgtgcttttcctatccactttgcacccggcataatccgcatcggcatagccaatgagatcaaacctcgctcccttagtataccaaagaccagattaggtgtgtgcaccaaatatctaagaattctcttcacggccacaaggtaacactctttcggagcggcttgaaatctggcacacatgcacacactaagcataatatcgggcctagatgcacaaaggtaaaggagtgagccaatgatggaacggtataccttttggtcgacgtctttaccttgctcgttgaggtcgaggtggccatttgatggcatgggagtgtggattagcttggcattctccatcccaaatttcttgagcatgtccttcaaatactttgtttggcaaatgaaggttccttccttgagttgcttgatttgaaggccaaggaagaacttcaattcacctatcatggacatctcaaaacgtttggtcatcatcctactaaactcttcactaaaagacttgttagtacaaccaaatataatgtcatcgacatatatttggcacacaaaaatatcattatcatgtcttttagtaaaaagagttgaatcggctttcccgatttcaaagccgtttttcacaagaaaattttgaagacactcataccaagctctaggggcttgcttaagcccgtagagtgccttgtggagcttgtacacgtggttgggatacttcggattctcgaagcccggtggttgctccacgtataccaactcgttgataggcccggcccgttgaggaaggcttaaaaatgaggttagtagcaaaagcaagcaatatgcgaatcaactcaagtctagctaccggcgcaaaagtttcaccgaaatctaatccttcgatttgggtgaacccttgcgccactaaccttgccttgttccttattatgaccccggtctcgtcttgcttgttgcggaagatccacttcgttccaatcacattttgccgaggtcgctccatcaaagtccacacttcattctgggtgaaattgttcaactcctcttgctgcgccatcacccaatccggatgattaagagtttcttccacccttagaggctcaagagaagacaaaaacgagtaatgctcacaaaaatttgcaatacgagaacgagtggatactcccttgttgatggctcctaagatgttgtcggtggggtgatctctttggatactttggtggattcttgggtgagctagattgatcggtgagggtggcacttgctcgccatcttcaccttgatccacgtttgaagtagagggatcgtcggcttgggttgatgtagttggctccacttgtgtggaggaagaggccccttgttgtggctccctaggacgtacgtccccaagagccaacctcttgattgcttcactcgggtcctcctcttcacctaacacatgtgagtcaacttgctctacttgagagccattagtttcgtcaaatgtcacatcacgcgcgatctcaacaatgccggaggttttgttgaaaacggggtatgcgcattcatttgacccatacccaagcaagaacccctcatccactttaggggcaaacttagaggatctagccttcttattaagaatgtaacacttactaccgaaaacacgaaagtaagagacatttggtttgttactggtaagaagctcatagggagtcttcttaagaagatggtgaagatatagtcggttgatggcgtggcatgcggtgttgacggcttcggcccaaaagcggtccgatgtcttgtattcatccaacattgtcctcgccatctcgatgagagtcctattcttcctctcggctactccattttgttgaggtgagtatggggccgagaactcatgcttgatgccttcttcatcaaggaaactctatatgcacgtgttcttgaactccttgctgttgtcgcttcgaatgttcttgatcttgaggttgaactcgttttgtgctcttcttgcaaacttcttgaagatggcttgtgtctcactcttgtcatgcaagaagaacacccacgtgaagcgtgaaaagtcatcaacaataacaagaccatatttgttacctctaatgcttagataagcaattggcccaaagaggtccatgtgaagaagctccaatggtctcgtagtggtcatcacattcttgaccgggtgatgcgctccaatttgtttcccgacttgacacgcgctacacaccctatctttctcaaattgaacatttgttagtccaaggatgtgatcgtgctttagaagcttgtgaagattcttcataccaatatgggctagccttcgatgccaaagccaccccgtgttggatttcgccactaagcatgtctcatgtttggctttacttcaggaaaaatccacaaggtaaagctttcccttgagaacacccttaaagactaccgatgaatcatttcttctatagacggtcacatcaacatcggtaaaaagacaattctaacccatgaaacataattgagaaacagacaaaatattgtagtttaaagattttaccaagagaacgttggcaatagaaagatcattagagattgcaatcttacccaatcccataacctttccctttccatcgtccctgaagactatgttatcttgtgaagtgccatttggatcaagagttgaaaatattgattcttctccggtcatgtgattggtgcatctgctatcaattactcaacttcttccaccggagacatattcctacaagagatcaatttctagttttaggtacccatacttgcttgggtcctctcatgttagtaacaagtgccttaggcacccaaagcactctcttgatagaaatattcttgctccttgggcctacatacttagcaacaacacgaccactagcattcttcctaagaacataagatgcattaaaagaacaatgtgaagcataatcattaggaatgatacttttggccttaacaaagttgctaagaccttggggcctcttgatcatcacactcttgtccacctttccttttggtggaggaacatacccaagaccctcatggttgaagttgttcctttaatagcctaagtactcctttagggtcttactacccatatgacacttaagtaggccattgtgaaggagtcccataagcttctcattttgcttttgcaaagcactcaatgaaatagagttggtagtacaaccttgaatatcaacatctttgcatctcacacatggttcattacttgggacaattttggaacaagatggctcgctagggagagagacactattttttaaagtttcgaacttctcttcaagagagaggtaagctttgtccaagccatccactctctcttgaagttgagcgttcgccacctcaagattagcatgagactctttggtttgcttgtaaagccgtaccaaagcctcatttttctctctctccttagtaagctcactcttgagttcatgagaccgctctttctcacgaatgagcaaagcctcttgcctctcaagagtagcatattggttctcaattctcccaagcaactcactcaagtgtcatagggattccttagttatggatttgaacaattcgtcatccataacctcatcctcaacctcatcctcctcatcactaacaagatcaacattaaatgacttgagaggagaaggtaccttaggctcctttgccatgaggcaaatgggagcatcctcatcacttgagtagtcgaagagtctcggtggtgatgaaggcttgacagcgaacgtggcgactccttctttatcacttgagcttgactcagagtcggagccaaagatcataccaaggtgagcttggtcataatgttcctgcttgctatgcttgtgcttctccttcttctcacccttcttcttatcttccttgatgtgggaaccatccttgaggtgggggcaatccgcaatgaagtgcctgggctctttgcacacgtagcacactcttgtggagtgtcttccacttgacttgttgtagtgcttggaagaacctcccttgaagaggccgcttcgcctcatgaacttgccgaatttcttgacgaagagagtcatctctttatcatcgatctccgccttgctcttgctcttgcggttctcttcttcttcttcctttgccttcaatgccaagtcttccttcttgatgcttgcggttgagctttggttgatgtattggatgacatccttggactcttgcacgaacatgtcatgggcaaggatacgtccgagcaaatcatgaggtgtgagagtcttgtagtccggacgctcacgaatgatggtcaccaaggtagagttccttggagtgattgcccgaaccatcttcttgaccacaacctcatcggtattgtccttggagccaagtcccttgatctcattgatgatcttgctcaaccggtcatacatgttgcttgggctctcaccatccaacatcacaaacctctcaaattgccccttgaggatctccaccttggactcatgaacactatccgtgccttcatacatgttccgaagcgtgtcccaaatcactttggcactctcaatgccatccaca

SEQ ID NO: 21478 - DNA, 2504 bp, Oryza sativa
agttaacccctacgtgaggatccctctcctctctcaaaccaccctttagtaaccctgtattcctctggtagttcaagctgcaccacacggctaggtggagtagaacccttctggtgtctacccattctcttctggtgtctacccattctctgtattgacatctccttggtggttcctgtgagaaacgaatagatgtaaagcgaacaaagttagaaaatattgtgagaaaataaggattcatgataatcaaaatattcttaccatgaaattgtcgtcaagaatatttggacaaacaaagaaccttcaacccaaagtcgtaggctttatggaacgaagaacctgacaacgatcactgcatctgcatcttgtacgggcttcccatggagcgagtgccgtagttagcacccgccagttgcactgttgttcacgacattgtcgttcgtaagccgcttgtaacacacctaagatgacatgcgcatacatacatctcagatgcaacaaatgcacaatgtaatgttcatgtggtatttctgaacaccagttagaaaacatgtatgcttggtaaccactgacactgtccagtaatccttccaattttcccttataaacgtgcactctccagggacacccatctttttccttaacacacctaacttcatattgcgaccagttgaacttggcaacccaaaactctctatgtagtgacactgcaaaatgctttaccgcctccttcatatcttctgctctagtataaatcgcttcctgaataacctcattttctttgtgggatccacgcttcttaagttttgaatccaattcctttttagcgtggatgtgaacaattaatcttgaggctacaataaaatctttgtattgcttcgagtatttgttgtccgctaaccttttgcaggaaataaaaagacaatcaaggaggagtgtacaataacttcgaacacttatatcacgctccttatctatgagaaaagatatgcatagggaaccaagtagaacaaatgcaaaacttgttgtattcttgcattcggttcaaaccttggtaagacatatctggtaagaatctcatacaccatgtgcatcctcatctcatgtctccatcctgccagggtatccagcatatccattgttgccataaaaaaagataaaaaaaggaaaagaaaaggaaaaaaataaaacaaaacaaaataaatgtggctccttggtcttccaaccaagtgagtcctttttccttcactcttgtttttgtttttttttgtgtccaataaagcctagcagatacaaagacaagtgtgggggggtgatcttgcacattaacggcataacaaaagcaagatcaccccagaagtgatgagccatgatgaaccacacatggaaaattgatgcagtcagacctaatgaggggtctgccaaacctcctgttcggctgaaccacctctaccatgaatcgtcctctgttttatacagagtgcaggtttgcacaaattttcctttggacatccattctatcttgagtttaatttgattatcagttctaaaatatcaaagataattaaactcaagctagggatggtacaattagagttcatgatctccctgaaaataacatgcatgcctattattcttagctcattacttgttgcttgtggtgatatatccaatagggaccctatgttatccagacaattgatgaatgagatatagtctgatgatagaaatcctgctcttcatgttgcacacttgggaattttataaaaagaaaaaaatatataacgatgctaaactcctcattgatatttttattcccactagagccataggttgatcagtcatgattagcttgctacatacgttgcttgtcattacattgagcgttgtcaagttttgtgaccctagtgaaatgtttttcgtactctcatggtcaagatcatatacactccacatacacgcacttatgcttgacttctacattggaagttagcatttctcatttaccattcatttcatccatagtccacaaaataaatactccatgtcgtttatgcctcttcctccaaagttctttaaaaaaaagtgagagagaggcatggctatgcaaaaagaaaggaaaaaagtgttcatacaagtgtggagcatgatgatgaaaaaaaatggaagaaaaagaaaaaaaagaaaaaaaatagccatgcactctcccaaatatgaaaagagaaaataaatggaggatgataaaaggagttatagtattttcttccacccacaaatttaccatagacatacacatgcgcattcttgaccagaaagtatgacttgtatttccatagatcctttatttgactttgcaatatatgtgatgcaagtaatgctctactcttttccataccccttgagctccacataagccttattagatggtaggaaaagaaaaggcccaatcatatgcctttgtgaggaatcataccctttgagagatcaagagaatccattaagga

SEQ ID NO: 21479 - DNA, 4152 bp, Oryza sativa
cgaccgtcaatattactaaaacaggagagaactagtgatgcttgcaatgcataaatatgttagaacaataatattccactattattaggtctactaacctttttgcagagaatgacaataaagtgaaggagaatcaacatcaacaccaacgataaatcaatcagacgatgtcgaggaccagacttatgtatgaatgggcaaagaactcagaattgacacgatgaattgggccaaaattcacaagtctgaggagtggagcaatagaggaggccaccagccgaaattgggctggattgggccagccccaggttcggccgaacctggtggttcggctgaaccaatcccggcgccgttgggtccaggttttggcttggacgtccaggattgcatcccaatgacggttggagggcacttcggacaattccccttccacaaccgtcatacctacctctatataaggagctcactctcttcacttcaacacacacctcaagcaagagctctctcattcctctcaagtttagtttagtagtatctagctggtggaatagaattagaataggaatcaggagtccggaagtcttcggaagagttcgggtatggctctagcagctttcctttcctcttttgtcagatttgtaattttattagaatactcttctatatacatttatggtattgaaatactttctgagtatacgagtacctactttacattatgttcttgttatactgaatatactgctagcttatctgggagatgctttggtgcgggtataatgtttgcttatgcaattactctatgtcatgatgatgatattagagtagtatctggtagtttagacgtggtgtctagattacgggatatcattatttggggttatatattgcggatgagaggtgggccgctgatggtgacaactcagtacgggtattcctccgcgcctatatatatcctaagttaattttctggggagggtattcctcagtatttagccctggttggatggtcatgacgggctgtcgtaaggaactcggcagtcaggggtggcttctcgaagtaccaggagggcatcgaatagagggtattagctagtatatcagttaactagaatgtatgtatactatgtatattagaagtattggaatagattctctttctcttttctttccacctagtttagattatttattatgaggatgagtagaaatgcttgtgtgtcactctacccatggattatcttaacccctgcttagactatgattatcacaagtaatatataatttattagttgagttctctctacatgattttcccacgggataaaataaatacgatacccttggaatactctcgggtgaaatgctacaatggtatatccgtgcgcttgcggatgaactctgtaaccataatataccagaagtatttctgcgccattactgggaattatatttctagtaatgtcgttaagaaataccaataagcatttcttataataaaataaaacatgatatccaacatagtggtaggtattattactaatcatttgcactagtgttggtgaaatatgcgtatgcaggtattttgagaagaaaacacatccgtcaagcgacaaactgcacctccgcgcattcaggacacatttacacggattggaggccccataagtcaattaaacaaatccaaatgggcccaactatcatgccaatgggctgagggcctcaaaattagtgtccacgatgaaaaacgggccgaacggagccatcccgggagttcggccgaaccgttttggtggccattgatcatcaaattttgcgtggacggccctgatcacatcctaatggcggttctggggtagtttggtcatttcgcataggctgtaatcgtcatacctgcctataaaaggaggagctcactctcatttccaacacacaactttgagctgaattacaagaggctctattgtatcttttatacattagaataaggtagagagtgaggggaagctctggaggagtgcccggaagtttggcgctcatccgacttctacctcaacgagtgtagcttcgtaggaggaattctggaggagtaccggagctgtcggtacactctgctccaggttcggagaacttcttctataaagtaagcattcgtgtttctttcttatgttatttaattactttgtctaagtaagatatatttgcatctttgtgggttcattgtttagtatttatactaagtgctctagtactaggactccggatagagaaggaagttcctgcgcaagtattagagtagtaattaataacttagacgtggtgtctaggttagagattacctttgtttgttgtgtatcccacagatttgtcagaggtagtcggtaggtggtgacagccctgaattctgtcccagaaatcctccacgttcggatgcatcatagagctatagccggaaccacgctggtagaccagcagaggtcggtgcccgaagcaacagataggaaattaccttcaacttagcttaggtaattaaaatacatagaaagttctctgtagcctgcctacctatagttgttgtccttggatcgtcttagccttaggtagattacacacgttccctgagttcgatatcctttaggggtcacccgaaggtgaagtgctacagcggtattccgtgggtttccggacttatctgtggttgtaagaaataccaacaaaaactttcctgtagggattagtccacagaagatatatatccaatgtccatgaacatattaactctgaaattcattagtcaaactaaactttatgtccaatttgattaaagtagactattttgacctaagcaccatgcttaatttaaaaagcctatagatgtcttgcacgaacacccaaaatagagcatatgcaaatagacaaaagaaacataaccatgtaggatcaagtctcattcaaatgaagataagtatgagtaaaaggaatggtgaaccttgtcttatctttcacatacctaagtgtacttgccgccagcatgatgtatattttgaaatctcgggggcagtggcatggtcacatatgattgtcgatttctcctccatctccatgcagattgtaccggaggaaggtgctttgaccatgcaaactcaggcaagtagtttagtcatgcacacacctcgggtgcaagaaccttgtgccttgaattcgtgatccgttggcacattgctgtagagacgtaggatacatctctttttggaaaatgtgcaagtaccaactagggtggagcatcaaacgcctaaaaaaaagaaagggggcaactcatctttcttgtatgcacgtaagtgctgcgggagcgagaagttgtgcatagctaggagtggataaaggctaagccaaggcggcacatgagctcgagagagcgactaggtgtagccaggcagcacgattgctactagcgaggtgtatagccatatttcaaagatacgcacataatgcggtctttgatccaaatatagctcgtcagctctcttgctcttttcttctcctcccattttttcttcttttcttctgtctctcttttctcctctttctttttttataatccttttttttctagcaagctagtactaacaccaacttcaaactaagatggccctagttgatggaactcgtcatgaaaagctcgtcgaccttcctccccccctgccccacacacacacacttggacttttgtgtcgcaagacatcaaaaaccaagtgtgtgatgtcggattctcctatagagtgtgttccaataccaatggtcaccaaagtgtacagttgatgtagctaccgtgttcttaagcatcgcatgaccctcgttcttaatctcaacctaaaatggttagcgaccaagaatacctgaaggtgcatattatcctaaaaactggttcttgcttttattagaaagaaaacttaccatagtaatctgggctatctcccggcagtgctttgtttatggtcacaagcttgaccatggggacatcgctctgcaagattagtgccacaaatacgagatttgcagtatttatgataaatataagcatctacaaccattcttctaaatatgttagaaatgaaaaccggaagatggttgtggtcctcgcaaagcgacgtg

SEQ ID NO: 21480 - DNA, 56793 bp, Oryza sativa
  unsure (1)..(56793): unsure at all n locations
actttcatcacacatggaactcaacagtgtgatgcactcaccgatgctcacgaccctactcaaccgccaaaaacgtaatgattttcatttaggttcgaacccattcaacatcaatgatccaatttatggagggtttttcataagatttgaatcctatggaaagattttgtatttgaccctttggaacaaattgaggcttttagaatggtgtgaaatatctttcgaatggctccccaaaactagggattttggagaaccccaacctgatggggtttttttttctgagtttaatatctcctcatttttattgtgtttttttctatggtttgtctatacgcggctatccctgtattcttgtgtttcgtagtcctccattttacacattatttcctatcaaagcgcaatgatttccctgcatataatttaccattgatgtgtttaaaaggagttcctgtatatcttgtactagctttaaatttattagctgcgcaagatagggttaacttattgaaaattgttactccaactattaaatccagaaaattagagtttagttgttattgcaatatctgtaatgttaggaaacagcttgagaaattgtatataaggtttaggttctatatagttcatcaccacgcaggtttttatggcatctaaccgccaggaagattaaatttccacatccacatattatcactatgattccttgttttttcgcacttccctatatgattttgacccatcatgaagtgttaaagcacaccaatgtgacaagccacgtgtttatctgtatgtaataagtgtgagagcatttgacgaaagttatatcatgacacgtgctacggagctaattaatcaagaaactacaataaagtttacgagtgtagcaaaataccaaacgcacgaaagctttaccgtagtttcttgattagctctgtagctcgtgtcatactgtcatgacacgattttttgtcaaacgtcttcacacttatcacatacagagaccaacgcatggcttgccacgctggtacataaattatgttgcaattaataagtggctcttattaaacggttataaaaacatgttcttttggacatgtctttcaagttgaattttcaatactatgtatttctactaaaatatttagattgcatgtataaatatcaaacaagttgatcatgtgttacagcaagtactttcataacatagtattattagttttttttaagtaatacaaatcaatatgtatttggtgggactgccaatgtccaaatgtgaacgaaggaactgtccctttgattttagctctggtaccacaattggtggaatagcccaccctagaatgggtgcagttaaccaaacgaaaagaaaagcaactagctagtatattatatatatatatatatatatatatatatatatctcagaatctaggtactacatggtatatatatttcatcaggacttccataaatataattaaaaccgatgcctgatgatcctttgaccatcaatgttattgtactagatctgtagtgaaatcaatacatttttgctaacaactagggctgacttcccttcttcccaacctggccaccctcttaatatttcttgtcttgttccattgtttatataatccccacacacaaccattcactagtcagctaggtctctgctcatgcatgcacagagttttttttaattaattaaactcccctagcatgtgtatgtacgtgcaagctgtgattaatctaggattaatgcatgcaaaccaaggtcttttggtgtacttgcaatcaagaggagggctaaattaatcaaaagcaattgtccccatcctaagccatgagagcccctttactagatgtatgtgcctattttttttttccttttttgatgctagatgtacggtgtaggtgcctgttttctttttcatttttgatgcaaaatgtaggtgcctcgtttgaccagacattatagtggtattgtccatatgcatgctaagctctatcagattttcagagctcaggtcagaaagaagtagaaggccagtgtaacagtgttatagcagctagcagcactgcggcagtatcacccaatcaattttctgtggccaatttggccattgctgccattatgaattgccaatctgtattgtatagcattgcatgggagagggaacaaattgctacaccgaattgcttgctgcccagcccggacatgtaacgaggcagtaataacttgtgcaccagccctgaatttatacacctgtttgtctgtacatagtagtacatactactagtacaaaatacaacgaataatgctacacgcaccatggcgctgctaaaattacccccggtaaacggtggccgacatatgagccccctggtcccatgtgtcggccgccgaacgtcggggaggcgtagcgatttgtgaatttggagggatgactgtttggtaagtacatggtgcaaaattgaatgcagaggcagatgggatgggatggaggtggcgcagctgtatagaggtagagaggagtatctaacaattgccaatggtaggggaccggagacctctgaacaatttagtcccttgttgttgtagttgttgttcctaggatcggtttggagttattgccacggccatccagttcaccaaaggcactgggaattgtcttgctttcctcctccattgtctccttgcaatttcaggcctctctgcaaattgcaagagatacagcctacatttaaccacaataatacacgctgttggtgagcatagaacatttaagtgcttttcatttcatcatgtgttgttggagtaatctaaaaggacaagcgaagattttttttttttggttcatcctggattgatctccaattctccattttctccttgcaatttgaggcctctctgcaaaactgcgaaagatacacctacatttacccacaacacatgctgttggtgagcaaagaacatttaagtgcttttcatttcaatcatgtgttgttggactaatccaaaaggacaagtgaagatgactttttggttcatcctggattggtctctcttttttttccctgttaggtattgcattgtggtcttagaccaggccggccaatgataggagaagaaacggagcagaatgagttcaagagcgatcctgatagatagcttgtgttgtgtgcactgctgcaattcaaagcagtgttgttttgtcatcttggacgcatattgcctcaaaagactagaaaaaacgtcagtagcaaagatttgcagatgctaccatatcgagaggacggcagatgatctcatcttgatcatatcatgcaatggtccaaaattccaggccagaaaaggagttcagatggtcggtcactgtggcactgcctggccatgaaactggagcaaacagctcgagaacgcagcccattaaattccaagaaagggttaaatatgaaaagttttgcccgtacaggacaaaaaatacatgcacacatgattcagtgacaccatgcatgaaattgctggtcttatgatctttccactccagttcatgcattcagtattcagtacatgggacacgctggtgatgatcatgagtcatgacaacaactcagtaggaatggttaacaataagaatggggcatggtatgtttaaagttcgacattatcagctcggcgtgtcaatacacccaggccacaaccaagaatcgacaaaatgtcttgtgtatgttaaactgagaaagctggtgttattttgtgacattacagccaagattggtcctgaacatgataacttgtttgaacctattaccacattgggacttggcaaacagctaccaaatgcaagcacatagggagatgaagttactgggctgctgtaccaactcgggtacattgtcaccaagctccaaaaatttgcatggattcctctactcaactggtttcgaggccaagatcttgcagacaggcatggtctcgtttttactcagtaacctcaacgacggatggacggggatgtcattcattgataccctatctccaatgtcaagatttgccaggtccacctcaatttttggagggatgtgctcagcagggcagagatacaccaagctggtccttattttctgcaaaaagccgcctgtttttttcaattgaattaaatagtcaggtcaagcatagaaagacaacaattcagcaattagacacaaattacttcaaagaatagcaaagcaagagttagataatccacataaagaggtaaacactgccacagatattgaaaatgtgacatgccatagtatatactgcatccgtcccaaaatataacctaggaccggatgggacatttcctagtattacgaatcttccggtcctaggttcttatattttgagatgaaggcagtacttcagtatgactagttatatatattatccacatgtttgtgtggtgccataggcacaaaatcatggtatctagttaaaagaaaatgacgaagcaaagagcagatgtcctagttccacatgtaaaggcagaatcacaccagcaaatcagatacatcacgattgtgtcttgagaaaactagactgagagagcaccaaatatgactaagtaaagcaggtagatgagttgtcactcccatctaaagtgcaacgtgtgcactcttatcaggcagtcattaaaatgtgtcactgctcagcgtgaaatcaaatagtacaattatgatcaagaatatattagcaactcttcagattggccatatgaaattgatatatgtatgtttcacatgaaaacaaatatcaaaatcttaaataaacaggtttcaggaatgtataatttatagcaaatggtatatgtcacattgcaaagactgcgaaatgaaaacgactccttttcgtgactggtagcagtaaagatcatgatttgccaggtgtacacgaaaacactggtaaagcctttaccaatatcataaaccccagaattagatgcataacatagcatagcaccataaccataactcagataccaacaaatatgtaaatgcaaggacaggggtacatgttaaattttgaactcctgtgccaaccacttgtcctcccttggctaagagtgactacttgtgctttctcacatgttctcttcagctaccgtcagtttggcgctaacttgattacctgaaaactactcaaacaatttagggcattcttggaagatcccccaactcccaagcataatcttaaacctgctacaagcttaagatatcatgctccacaaacgaggagcgccattgtaacagagtttttgaaagattaaactacattttgttgaagttttaaattccatttccatttttgtttttgagaggctagcttaggtggcccagaagagatgataagctcattgaagccggcattgaggccagtggaaattgaatgtcggaagttgtccccctcataaatcgacccggccttacaaatggtaagcatattcgggacctattgattgcgatttatcattgcagaagtaccaaagtcacggctcgttccttacacgaggacttcgatataaacaatgggaggtggcagaaaaggaccacaaacccagtcgatgcggtagtaaataatagagaagatgtgtgccacctgcccacttgcattaaacaaactaacttccagaatgcagcagacttggtgtacagatacttagaatgcgtataggatagtaatacatcataatggaaatttcgtactgttcatcatttattttgccaaatcatggagctatccagaattattaaggcaagagtcctatatcttaaataagaaaattgatgcccctctgcaaaacttaggccagcaatacagtacaaataatatttgccaatttcactggaaagggtaattaattttccacttgatagaattatattttttttttatagaacagttactaggaacgtgcattcgagacaaaataaatatcttaaaagaaatctacctacacacaacaccaagagtaatttggtccctacaagtccaacatcttaacagaacttcagattaggaaacaaaaagaaataaagtaaattgcaccatgttattcactaatctgaattgaggaattcacaatagaatgcacatcttcagacaataagaaagtcatttttttattctgttaaatagaggaatctgagctttgcctggtaatggagggctcaacaaagcccattaaactcctgatttggatattggctttcaaaaatgttagctacttttgtggtactaaaccttgatataagacaaatagatgtgggaatctcactgcttacgcttagaacctccaacaaacaagctattttccaagtgaccacttacacaaggtcagcaactcagcacatctgcttggcaaaaatcccatgtttgctaccactcaattatgggctcatgtgcaagagcacctcattatttttttgtccccatccaggctccaatatcaactttgagcacaatgtgcttacatgcatccaaccaatgcgcccatactacaaacttgccaatcccatgggttgacacgataagcaaaccatgccgacaaccaagggcaggcccaggcctcaggcctcctgggccatggcccgaggcctaggattcaatgttcatcatgatgtgcatttttcaccatgcgagacacacagaacaaggtataatgggtcggctcagttcttgggccaatcctgggtccagcactggcaacaactccgttcttcatttttcttcataaatatcgataagcaagctaacacatttttcaatctgtggtataacttttcatgtcactgttgagttctgacacaatttcaaacaaatgtgcatacatagactcgtagaataaagctattcaaattcgatagtttacatggaatcacaaaaaatagggtaacctggatctattgatccttagccgtggcatttgggtatctactatctggcctgtacttttcagcttattcactggattattgaaacagattatttgttccacgcttcaaaaaatatgttttctttaaaaaaaaactttcttcaactgcattgcttagagccttagaccgcttactttaaactatttgttaagtttatttcgtaaaatatttaaattatccctataatcaaggagataatccgtggcaataatccactcaatgatctaaataaaactgggcctagttacagaagggcagagttttgtgccaagtgttaagcatcatgcaatgcacatttctatgttgagattccataaaaacataagctatcatcttgtatatagcacagggattttgccaaataaaaagaaaacctatacctttcttcaacccagggcagacgtcctcccccttgaactctacaggcaagttcaccttcagcattgttccttcatctgcctccaccagcaccaagttcaatatatttcctgttgtttcgtctctatgcacctgcaaaacacaagagcatccacatcaaccacaatccattttatgcaagatagtgcagacccggtcctgacgcacaacatatctgaccaatttcttctagcactctcgcatatatagttgcgaaaccacaccagtggttcccccagctttctcaggataaaactgctcaagaacagtaaacaatcatataaaaagaaggattggttctctgcactcctaaactataaggactgctacgtatctgagcaatttctccaaagtaagcactacaaaatactaggaagtcgctaacactagtaacaaataacctaacagccagcaatttgccaggagaaactacactaataatgcgcatttcgtacacagggtgagcaaacgaatcgacacggccaacgccaactgagctgaaatacgaaaagatttcctcgatgcgcaagaacgaatgaacgagatattttttggtgggtggaaaggacaggaatggagaggggcgaagaccttgatagggaggacagtgccggagtgcacgacggcggtggatcgctcgccggcgcggacctggaggcggacgggggtggagaggaagtatggggactgcttcagaatctccccgagctgcttcctgtcggcggtgaggagcttccggtgggccaccccctccccggggccggcgccggcgagggcgagtagcacggccgggacgcggccgttgcggcgctcccgcgccgccgcgcgcgggccggccgtctcccgcggcaacgcctggatcgtgtggtggtacgacgccgaggccgcccgcctccacggcgccgtcgaagcgccgcggcggagcgcctctccgacggcggcggcggcggcgcggcggaggcaaagcgccatgtgtgggggtttagggggacgaagagagttgggcttggctgctggttgctacttgctgggccgtcttttgtatcctacagaaaatgggttgggaaatcttatcccaccttctaaaaggataacttttaatcttagccattcattcttcatatctcatttcatctcaaccctccactcatatctttgtcccaatcccatccctcctaacccattatctaaaccgagccttagggctttcttgatttgggaggctattttatcccattagacggcagacgcacacgcccacacaccactacacaacatataagaccattctcaacccaatgactagaattgtgtccatagtattaaataaactatcatctacgatgaaaaatgatgtggcaagtgaataaatgagaaaagagaaggaaaccatgtcttccacgagacttggtttctacccaacatccaagacatcatgtaagataagtagcattaaatttaagtatggagtagtggtgtttgcattggaagagtagtgtctagtactagtttcttgacgatgtggagtttatgaaaactatgtgcagtgtcttaggttggtaatggcctaacaccacactctcacatatccgtaaatgcccccccccctccaaccaacacatgtctagtggcatattcctgatttcactaaaattttattgaaaatttacgaatgtgtgcataatattagtggatgttaagatttgaaccatgtcactaatgaaaaaaattggaagtatcaaattggtactaaattgtttgggctaggctagtgctaaccttaatgaagccactgaaaaatttggcatttgccaaatttgtagctacaaaatcaaatgagcgacaataaatttggatgtgtcaattattaataggattaaaaatggtataaaactaaataaccgcttgaggagaattgttagatggaacgtgagtttgaggggtggattgttaagtaagatatttggatggtctacgtagaagttttaggagagattggaaagaggagtttaagagcaaacatccatcttttcaaaataatggcctacatatatttatctgatagtttaagatggactttccataagaatggcttgttctcggtgaggtctatgtacctagctttaattaataatggctatattgagagaaataaatgtatttggaagcttaagttgccacttaagattaaaattttcatgtggtacttgtttaaaaggggttgtgttaactaaggataatttggcaaggctgttggcgggtgttaaatgtcgattctataccgccaacatccgcataaagatagataataaaacatccaacatagtgataggtgcttaatctcatatattccacaagtgttggtgtatatttgtatgcagatgataaaccccggtgttgggaggaaaatcagactaaagtgaggagaattatgcatccatacaaggaggggttgtgaacttcatcaaaacatcagtgaatcaacccaaaactccgagaaatagacagaggagagcccaaggagtccaccgactgaaggccaggccaggagggcccagcccaggttcggccgaacccccccgatcaccgttgatcctggggtttggcgtggatgctctagatgctcttccaatgacggttgcggggcagttcggacatttccccttcgccaaccatcatacctacccctatataaggacatcatctcactcacttcaacacacacttccaagcttgagctaaactataagaggctctattttactatattgtatactagaataggaagagagtagagtagaaagagttggaagaattccggagttgtcggtaatcttctcctatttcttttattctgtttattactctgaattcaatataatatttttcttgagtaatttagatttatcttgtgagaattatctcttggttagttcgtaaatagcatacgggattattgttcactataatcaactaaaatatagtgattgatttggtgagttataaacattaaagtagatagtatttgcttagacgtggtgtttaggtaattgttatccagtaattgctgcgtgtcccacagtacgttgaggtgggtgtagaggtggtgacaaccctcgatatcactgaagtcctccctgtccgggtacgtagtagagcgacatctgggaacaacgggttgccagtgcctgaagtactgtgttaggattaaagttaagctttccctagacactgtttctcactagtaaatcctctctatcctggcctatcatttgcttggtgtccttggatgaaccggaggaagcgctgatcacacacgttcccttggattcgatacccttggaatactccataggggaagtgctacatcagtatatccgtgcgcttgcggattttatctgtaaccgtatcaaataccaacaagcatttctagcgtcgttgccggggaacggttactaatcatttccgaacccagttcatcctcgtatcctttttcatttttttattctaccttcacccctgctatcttagagaagtattcctgtcaactcttctcgaccatggagcaacctttgtttgagctgtctgctcctcggggtgaattctatgagccacctccttcatcggagcccatttatacaactggctatgaaattcgtcccgagctaattagtatggttagggaaaatcctttttctggccttgatctagaaaatccctaccatcatatgcgagactttgaacaagtctgctcatgccttaagattcgtggcatgagacaagaaactgtgcggtggaaattgttcccgttctctcttcaagagagagcaaagcaatggtacacctctaccgttggatatgtaaacggtagatgggaaaagcttcaagacagattctatcttgacttcttcccagttacccatattactgcccttcgagtagaaattctcagtttcaagcagatcgaaaatgaatcaattggtgcagcttggtccagattcactaatttagtgcagtccggaccaaccctgtccttacccgagtatgtgcttctccaacatttccatacggatttgggtaaggaatctgcattctatctggacataaccgctggaggatcgttcatacacaaaacaccgtcaggaggaaaaacgatcttggattgcattctagaaaatacttccttcatgacgcagtccaatgaacctcggccggaggcatccgtgtccaagatagaggagcctctaacgatcgagccacttgctaaaccatctacttctgctagctcgattgatgagaaggttcctgagcaccgtctgtcgagaatgaagaaattcagactccggattgtgccgcaattatgttcagggaaggttttgacgaagactacggcaataccctgaactattttagcaagaggaaaccacctgttccgttgtcacctcccgatcctatggaacttgggttcctgcgagaaactgtccaggagttgacatccataatgagagacgaatggctaagggaggcagagctttcatccgaagtaattcggataaataccgctcccgaatcattccttgccatctggaagggaacgatgtcggtattctctacagtccaactgtcggggccaacctcgtctctgagtcttttgcattcgcttatttaagtgataaggcagtgacctcgacaaacaaattcttcaagcatccgaatggaaatatgatcgaaggatttgggattgtgcaagatgtgcttgtctgctttgaagacagggaggcgatcttggatttccacgtctttgaagtccaagactttgatatcctaatcgggctgtccattgagaaacttctcatcaacacaccccgattaggtagcctcaaaataacactgggagagaatgaattctcaattctattttcgcgggcaaggatcaccttgaccgaccctctcccagaaattgagtcagcggaagaggttactgcagttcctcctcatgagtctcccgaggcccttctggaagatgatgtccccgacttcatcaaggaagaagcagatcccggtgagactctcgacctgccaatcatggaaccgtcacctcgacctccgcttgagcttaaacctctacctccaggcctacgatatgccttcctacacaatgacagagaagcccctatcataataagtgacaagatctctgaagacgagactcaacatcttctcaccgtgttagagaagcatcgttctgttcttggctactcgcttcaggaccttagggggattaatcccgcactttgcacccatcatattcctattgaccccgagagtactccctctagggaacctcaatgatggctcaataatgcaatgcgagaggttgtaaagaaagaggtcttgaaactcctgcatgctgggattatctatcccgtaccatacagtgagtgggttagcccagtccaggttgtgccgaagaagggaggaatgacggtcgttgcaaatgctcaaaatgaactaattccgcaacgaaccgtaaccggatggaggatgtgtatcgattacaggaaactcaacaaggctacaaaagaggatcatttcccgctacccttcattgatgaaatgttggaacggatggcaaatcattccttcttctgtttccttgatgggtattccggatatcatcaaattcccatccatccggaggaccagagtaagactacgttcacatgtccatatggcacctatgcgtatcgtaggatgtccttcggactgtgcaacgctcctgcatctttccaacggtgtatgatgtctattttctcggacatgatcgaagatatcatggaagtcttcatggatgacttctcagtttatggaaagactttcggtcattgtctgtagaatctagacaaagtcttacaacgatgccaagaaaatgacctagtgtttaattgggaaaagtgccattttatggtccgtgaagggatagttcttgggcatcgagtatccgaatgaggaatcgaagttgatcgtgctaaaatcgatgttatagatcaaattcgtcctcctgtgaatatcaaaggaatccgcagcttcttgggacatgccggcttttatagaaggttcatcaaggacttctctacaatcgccagacccctgaccaatctgctagccaaggatgcgccctttgagtctgatgacgcatgcctaaaatcttttgaagttctcaaaaaggcactcgtctccgctccaatcattcaacctcctgattggactttgtccttcgagattatgtgtgatgcaagcgatttcgctgttggtgcggtcttgggccaaaccaaggataaaaagcatcatgcaatttgttacgctagcaaaactctaaccggagcctagttgaattatgcaactactgaaaaagagctgctcgcggttgtttttgctatcgacaagtttagatcttacttagtaagagccaaggtgataatttatactgatcatgctgctttgaaatacccgctcactaagaaagatgctaaacctcgtctcttaagatggattttgctgctccaagaatttgacttagaaattaaagataaaaagggagtagaaaattctgtagcagatcatttgtccaggctgcagatcactaacatgccggaacaaccgatcaatgatttcttaagagatgatatgctgatgacggttcgcgactccaacccgtggtatgccaacatagtgaactacatggtattcaagtacataccaccagggaaaaatcaacgaaatctgaagtatgaaagtcgtcgtcacatatgggatgagccatacctatatcgggtctgctccgatggcctactacgaagatgtgtgccaactgaagaaggactgaagatcatagaacgatgccatgcctcaccttatggtggtcattacggtgtattccgcacccaggccaagatttggcaaagtggtttcttctggccaacaatgtacgaagactcaaaagaattcgtcagaagatgcaccagctgccagaggcaaggaggaatcactgctcgcgatgcaatgcccctcacatacaatttgcaagtcgagatattcgatgtttggggtatagacttcatgggacctttccctaagtctcgcaactgcgagtacattctggtggcagtcgactatgtctccaagtgggttaaggctatgccgtgcagcgctacggatgcgaggcatgccaagaagatgttcatagaaatcatcttccctaaatttgatacccccagaatggtcataagtgacggaggttctcacttcattgacaaaaccttccgagacctcctacgagaaatgggagccaaacacaatgtggccactccttaccatccacagaccagtggacaagcagaaacatcaaacaaacaaatcaagaatattctgcaaaagacggtcaataaaatgggaacaggatggaaggatagattgccggacgcattgtgtgcatactggatagcatacaagacacccattagaatgtccccatatcagatagtttacaggaagccatgccgactacccgtagaacttgagcacagagcatactgggccatcaggaattggaacatggattttgagggagctggagaatggagaaaaatgcagatcgctgaacttgaggaatggagagaaaaggcttaccacaacgcaaagatatacaaagaaagaacgaagcgctggcatgacaaaaggaaaaagatcaagaaattcaagccaggagacaaggtactaatgttcaactccagggttaagcttttcggccatggaaaactgcgcagcaaatgggaaggaccgtttgacgtcatcgacacctcttcgcacggggcaatcacactccgcgacgaattaggtaacatatttaaggtaaacggtcaacgcctaaagattttccttgagccaaatgaaactttagatgaagaagtggatgttattgaattaattgattatgaaccatgttgatctcatctattgcatgcttaaaaccctgtatagttgtcatttttgtgattaaaataggttttagtgggcctaggaaaaatttggtggcctgccggacccaccagggttcggccgatctagggcggcgcccgatcggccccaattttgaaccttagtctcccccgctcgtccctagtctgtttagatgcgcgtttggaggtagaacgttcggatcacaccagaacactccttcttcctcctttcctccacctttgcacactctcctctccaattcctcgaatttccactcatatccaccaatggctggcaaatccctaatcccattcatcggctcttcctccaattccacttacaacctcaccggagaactgacaccggcgaatcaattgatcccggtggaagaatacaccatggaaggggtaaatgcactatgggcgcagcccctcgcagcagtgccgggctcccctgcgaatctggagcccgtcggcgagctccctggttcggccgaaccttgcttaatgggcccccaataacctgcactatgttttgacccaattctaaatggttttcattgacttatggggcctccaatccgtgcaaacgtgtcctgaatgtgcagaggtgcattttgtcacatgacggatgtgttttctcctcaaattacctgcatacacatatttcaccaacactagtggaaatgattagtaataatccctaccactaagttggataccatgttttatttcattatatgcaagtattgactgtcaaaatattatgatttaaggaccgtcaacaatatgcatgtcgattgtctttagatttcaacacgcaatatgtataatttcattatcctcatcacaccttttgtagttgtgactggaactggagccagtatgttaccccctacatataagatttcattggggatttgtcaaaaatcatatcatatctactaagccataaagctcaacatatggcagatgcttttactagaatatgtttctttgttttcgagtcaatgcccacaagccgattcccaaaaaacggggaagtactatttaaaggtttcaaaccgaaagaaatatgaactgatgttcaaaggaatctagcaaaatggcactaaaaaataaatgatgtataatttcatttttcataaaaaagaacatctactatttgtcatttcaattccttcttgctaaattatccttagttaacattactcctttaaacaaatacctcataaaaatcttttttaagaggcatttttaatttttttttaaattttattcctttcaagatggctgttatttattagagctaagtacatagaacaatccaagaattgaccatttctgaaaattccatctaaataagtcacactcatcattcaactgaatatacacaatagagaccactaaattatgccaatttgccaagttctaacctaaccttacaaaactattctaagggaaacattttgaagagacggatatctctatgaaggaagtattttccaaccatttatcctcctcaaatcctacctttactttagaaaaattagttattttttttgtaacattgctataacaacaatatttttcaaagaaactcttaatgctattttcgctttcaatgtaacccctatcctagaatattgtagagagaagaagagaggccaatggacatgcaaaaccaacaaaggcatctaggatgggcaccgtaattagatgcaagaaatgcaaacaagttggtaagaacaaaacttcctgtgataggcaccatgcagctataggaggtagtaccaacacagccccacaggaagataacaacttggtgctattgaacactccacggagttttgtgcagagcaaaaaaaggaaggcaccaactactgctacaacaagttctgttagccaaacacacaacaacagttcaactaagcagaaggttagatgttttccaattgttcttactttaatttgcatttcccaattctgaacctatatgcttattcacactgtatgcataattttttcaggggcaacatgatcaaattgttaggatgaatgctaaggcaaaggttgcaacacagccaggtggttctgcaacagtcaacctgcaggcaattgtgccatattcctagggttgtacatcagcttcaattcagatcacatctaggaatgcatctgtttcagtctcagctcaagaaccagcaaagaagaaaacatctgctgggcctgctccatccaagaaggccaagactccaggatcaattctcatgctgccaccatgggaatctgacaaactttgaatcaatctatgtgtactgctaagtattgacatgccttagctaattatcctatttgtgatgtaatgtcgttcatgccatatgtcatgtaatggttagaatgctgctatgccagacttgtaaggctcatgtgtgctgctatgcctgactatttcttcttttgctgaaatatctatgaaatgcctaaattgatttggcttatgtcatattgagctgaaatttgctgagttttgttgatttggcctatgtcattgagctgaaatttgctaagttttgttcaactgaattggcacctgctatgttggtctgaaaatattgccttacaatgatgccagactaattggttcattctgcaatttgactacaattttatcatatgtggcctactacacaactgatttgctcaaatttgtatcaaactaatcatttccttattacctacccattttcataatattccattttagagttcaaataacacacatctttcaaactctaacctactattcgtatccttcaacacccctactatagcttccttctcaccaacagccttcctcgatgtggccaactcattcctagctaataccagctctgattgcgcaaatcttccttcttcaacagcagccggaaaatctcccttctccctcctcagcttccacacttcatcgcgcaaatcgttcagcacttctctaaggaaactgctcaacggaccatcaacccaagcaaaataatcgcaacctccactctgcaacagtgaaccaatttaaccctagaactcagctcaacaaaatcatggaccccttgaaccctagaacttagctcaaaaaactcacccttgcattcacacatttgaagtaccagcgcccgggattgtccgagatccgcgaaatccacctcaccgccttgttgccgcacttgcatgccaccgccggctcatactccaaagggccaacccgatacaggatgggggaagcagatgtgtgcctagaagacaccgacgagccctcactcctcgagctcgccattcaccgccactcatcgtgctagcagcttcaccaccgtcaaccgtgccgtcgccgtaaccccccgcgccgtaccgctctccgccgccgccacaacccactcacaacaacaatggagaacaaacgagcgacaaagataacactagaagagcccccgctatttattcccaactaccgtcgctgagtcagcgatgttgaccgagtcaagcggccacgtcagcgaaaaccgcccgcaaaacagccatgggagtcggtttgcccgggatttcaacgtttaggggtcaagatatctggttttgcggtttagggtcacgttttagattcggatcacttttgagggtcacgaagtgaacttattcctactagaaaatctatgtgcctattaacgcacccactatatagcatgtttatttgtttatcaatgtgcctattagtttattgaatatactttactttacaaaaattagttaatttttttgtaacattgctataacaacaatatttttcaaagaaactcttaatgctattttcgctttcaatgtaacccctatcctggaatattgtagttaattgtgttgttttgtttttaagaaaacatataaaacatgttcttctaattttcctaatgttcacacttctttactccatattttttttgttttctttacttttcctcttctgttttttcttttcttaatgaccaaactaataaatatgtttgacagattttctgtcagatccctaagatcgtctatagtatcactactaaatgatgggacccgtgagggtttctgtcacgatctttcgatgagaggcggaagatgacaacctggccacgagggcacttgtcctgcaagcaatcgaaaaacaagtagtaacaagtagaacaagcactgaattgctagatgaagatgatgtttcattattaaaaacacaatatggcggagttccgattgcaagcaggcaggcggtttagccaacacgcgtgttgcgagcaggtagcaagtagctaactctaataatcaaaaaccgattgttcttagcggcagctaagggtataagagagggggagaacgaccacagaggtgttagggtcgtgctctatataaactaggtgaaaccccgcgcattgctgcgggaatttagtataaagatatacatcgaaacattatgtgaattatgttggatgataatttaacaagtttgtgtttgaaaagctcttaaattataaaaactataaagatatagcatgtttgcatgatgtttaaatgtgatgattgttagtggatgatgatgtggcatcttgttaattagtggatgatgatgtgacatctttgcatgaagatatacattgaaacattatgtgaattatgttggatgataatttaacatgtttgtatttgaaaagctcttaaattataaaaactataaagatatagcatgtttgcatgatgtttaaatgtgatgattattaatggatgatgatgtgacatcttgttaattagtggatgatgatgtggcatcttgttagtggatgatgatgtggcatctttgcatgttaaacttaaggaattagtgggggataactttatagtaagataggatgagggggagaacgaccaatctagcttgatataactatatagggagatatgtctatataagtggcaaatataaataaaactttagtaaaggagcatgtatattaggtaagatcggctgaaaccccgatactatccttactaacaatcaagaagcaggctagagattatggttcgaaacacgacttagtacatcgaatgtattgatgcaacacttagtatgaaaagaaacatgatatctagacaatcaagccattgactgaatttttagggtggtagatgtctaagctaatctaatctagcaatacgatttagcagataccggcagaaaccctaaagcgagaagcagccaatagagctaaattgatatgctaagactagattagcggagacatataataaagatggtcacgatataaggactaaaatatctaaaacgacatagtagccccgatagcacaagccatcgagatgggttacctcttgcgaagcgaactcgtcgaaaagtaaaagcgaaaagggtggcgatgcgctgaagttgtattggattgtctcctgtattacaatgttatgaggttcatatttatacccgagtacaaacttagtccattatggacacgactcgaacctttctaaagataaaatacaaacaagactataactatcctaatcaatagatacaattaccttaattgagctctatctctgtttgggaattgtttgggaatgatggttatcttaatataggcccatgtcgaccccaagttatctctatcggctgtttgccatatcggccaaatcaagcctttgtccagtttttagccgatacgatactcagctgatgcacagtccgacttggagataaactcgaatccacaccaaatctgcctcgatctccttccttctctgaatctgatgcaaaattccagtgttaacacacatccatcatagaatctgaagaaccaatctttgaagccctcaattgattaattttctctaggatacacaatggcagcttccccaaaggacatgcaccttcttgtgctgacatcttcatcatcagtataagttgttgggaaagctgacaaagctaatgatggccttgtgtacatgttaatccacagctgcatgaaccaccaaggacctccataattgattactttatcttctaaatattgcaagcaacagagtgaagcattcgataaactgagccaagcagatatttccttagaggaatatgcttcttctaaaccaaaaattgagcaaagtgctgatagtttgcagttggcccataggttgaaccacataatacatctctttctaaccacatggccaggaatgcaacatgttcccttaaggaaacagatcatgtgccttgatattctgctatgtatcctttccaacctccatggatctgttttacacttaatgtccagtttgaaggggttgatggaagtcgtgacattcagacttgttagcatcttgacatgtaacaacgatggagtcatggggccttgccagaataagaaacaattgagtgtatttgaccagaagtaggccgcagcagatagcatcggctcattcttcttgacgtgtaataccccagaaatatccacaagcctaggatgccactaaagaaacctataaaagtgccaaaacaaagaaatttcggcaacacctctttatacacacacacaccatggtgccccatatgagtgtcatatatatatatatatatataggtatccactaacccaccgtggcagaaaatcaaatattgatttttcttattttgcaaaaatatgttcactgcgcggttttcgtggcgctatgttctgcatgcaaggccatttgaaagttctgcatgcaaggccgtttgatcagggaagtgttgaggttgttaccgggatatctatttaaaacggcggcgaggtaggtcagaagaggaggaatttgtgagcagaagcagatcagttctgcagaaatttgatggagcagaatcttttggggtagagggcagaaactcgtcggcgagttctgttgcttcgccttccgcggcgacagaaggcggaacctcgtcgacacatgatgtcgcatgcagaaggcggcagtagccgttggtgcgtcctcgccggcgagttcaggcgagcaccacaagccgacggtggaagaatgtggaaccgcgtcggcatctcggcgagtggtgacatgcagcagaagccggcggtggcgaaaggctgatccttgccaacgagttcttttgctcagcacaagcgggcggtgccggaggacggaggtctgttgaatggacacgaatgtgtgcagaactcatcaactgattggtacatatcgaagattcgaattggttgatgtgctctttataattttcctcttgtttgtgtgtttggttctgactgtgtgttgcgttatttggtcaggaatggttttgtgcaactgtgcattgcatggctactggtgacaggagtgaagtgatgaatcgctctctccagagatatgacatccatttccagaaatagtcacgcagcttgcaacatgaatttcagaagttgcggagcacccccggcgccgcagaagttgttccgatcgaacatgtaaccaaggagaacatttagccggttgtttaatgagcagatcatatggaataatggattgctttctgcatgatcgttgattagtcgtacgaactatctatactcttttatgatattttctatgagagaaacgcgactaatatttgagttgagttttctgtaacttctgcttgaaataaaaataagaagttttcctttgtttttttttgggctattttagcttattgtgttatccaaattctctgttgtcatctttgtccgctatgccccatcctttttttcgtagttgctgactgtcgtgtgaactaagagcagaatatgcctcgagtctgtggtgtagttttttgtcggacaaatccgtgaattggagcagtacaagttcttctgcttcttctgcggatgtagcagaacatggatcatagtttctgcttgtgtttgtatttgggtttagagatgtagcagatcatggcacagaactgggagcagaacatcacttctttttttggtttagagatggacatgcactgctttggagcatagcatgatctgctctctgatttctgaggagcagaacatgtggcagatttggtagtttctgtttgtgtttgtatttgggtttagagatgtagcagaacatggcgaacggcagaactgggagcagaacatgacttcttatcgtccagcgtgatcgtttctggtaaaaacataaacgagagccaccaccacctgatacattcgcacatgctgcaggactgccaatgcaaaatactccctccgtttcgttttatttgacgtttccgacatctttgtcaaaattaaggaagctgtgaaattacatatttgcccctgtgtcttctcctcatcggcgcaggaggaatccccaaaaatcgaccggcctccgacatgccgccgcggtgggcggcctcctctccgacctccgtgcccgtgtctcccaggtgcgggcgtgcacgccgccacccgccgggatcccctccctctcgtttttgccatcccatcccgccgggcctgcttgaccccgacgcctccttcctcgagctctcccaggtcggaaacgccggccgccgcgccaaccaccggggctcaccccaagacgccggcgaggccctcctgctccaagcaccgtgctcctgtgccttctcctcgtcaagccgcaacatcaagccgccgccgcggaaagaaagaggcggaaacgccggccgccgtgccagccgccggggctcacccccaagacgctgccgccacccatactcgtcggagccgtcgccgccacccctccttgccggagccgccggcagcaccattctcctgagccaccgaaaggtacttctttttttttagagtaaagtccatcaccggtccctaaacttgtaccgctgtgttatcccggtccctaaactcgcaaatcaaccattcaggtcctcaaacttgttcgactatgtcatccaggtctctaaacttgcagatcactcgtttagatccttcaacttgttcagttgtgtcaccacggtctccaaacttggatttgaatatcatctgggtcaaataggacggtctaaagactttatatttaaaaataattcataattttttcatgtgaaatctaatgaaaacaaactttatatcaaacttgtagccctcaacgcgatctacaactttgtagttgaattttttttattgtaagtcatttttttgtcccaaaatgtaattttaaaattataatttcaaaatctataaacatgcaacaatattttgggaccctatacagttttaattcaaaaacttttcaactacaaagttgtaggtcgcgtcgaggattacaattttgatataaagtttgtcttcattagagtttacatgaaaatgttatgaattattttttatataaagtttttagaccgtcctgtttagggaccggggtgacacaactgaacaagttggagaacctaaacgagtgatctgcaagtttagggaccgggatgacacagtcgaacaagtttgaggacctgaacagtcgatttgcgagtttatggactgggatgacacaacggtacaagtttagggaccggtaatggactttactcttttttttatgcagagttttctgtgctccgtggcttgctcattaatgccatctttgttcatttattcagtgtgtattatgaagttcataggactagtattatttggttgctgtttgttcatatgccttgcttcaaagtttcagagcttgtattttggactgtgttcttgtgatcaggaaggtacagaatgcggcaaatttgagttctctctgctatttggagttccctaaatccacctgctgtaacaatcctgagcatatgaaatcagcaatgttacactttatgctccctagcattgtttgttaaaacttagactgtaaagtcttctgaccaaatgcttgatgtgtattgatcacatattatcggtgtcttttctctacaggcaaggagagggagaatcagtgggagaagaatgatagaggaaaaataaacatgtgttcaagtctccttcatgtgtaatttattctaagattaatttattcttggattatacctaagtattctagcttaacatattgtgctactctacattgtactccctggtactcagtgaatgttgagctcagtgactacccaattttactcatgtgctgatcatttattcgttgccaaaattgtgcttcagattgctttttggtaattgaaattgctaatctgaaacactatccagattagcaattgctggtgctgttgttgatatgaacatgtcactgtctcttgttcactactgtctcttgttctgcatgattctccactgtctcttgttccatatactcctgcttgctgtgtgagctgggattcttgattcttgattccggatcggtgactactgatgcttatttctgaccttgttatatttggagaaaaaaagttggattgtgtaaaaaatcttagttcatttgcattcaacattcagtattccaatttgtaatttgtaactgacaatacagacagactacagatacagtatatgatttcttccaattgacattattcagccattcatattgccattattccaattgatattacagacacaattccaaattgtcttacttacacaatacaaaattttcaagctcacaggattctattgaaaactactccaaaatttctaccaaacaatttggcactacacaaatgctcaaataggcatgctcacatctcaaatttctaccaaaagttctgtgttaggtgaggtatcaccatctgtgtgttacatttagcaccaagagttccagattccattgtccaacattgtccaacgcattgacaacagcatccaggctctcccaaaaggcatcgttgaacacattttcagtctcaggacttgctctgttctgaagggaggttgggattattgtgacttcatagcactgaattgcagttgcagttatccaggtaacccaaaatgaactgcaatcagaaatcaagaacatgttcctggaaaaagaagagaaaaaatcgtctgaaaaggatttaggtgaagttgataatttgtcgacgaacaacaaacaaagaacagaaaccacaccagggcaccaggagcgtatgttctcctcctcgccggttgcgggcaaagacacatcggatgagctcgtgcatggcgtgccgcgagaatcgctgcaggagctcgcccttggcgccggcgtggtggacgacacggatgcacgtgttgacggcagtgcagacgtgctggttcccgagggcggtggcggcgggtgcgcgcaggcaggcgagcagcgactgcagcatccgcatcagcacggcctcctcggcggcggcatcagccccggcctcgaaccggcagctggcgacaggcccattcacgcagcgcggcgctcgtgagggacggacccatgagcgccatcacctcgtggagagcggccagcgacgccgaggtgaccgcggcgccggcgtcctcggagcggaccgcgtagaggaagggccgcagcacggcggcgggggagaagacgaggcggcgcagcgccttgagggaggagacgagcgggtggtccgccgcggcgtcgtcggctacggcgcgcgggtggcggaggctgcggcgcatgacggccagcacggcgctggcctcagcggatatcgcgcaggcgaggccggcatccctcgcggcggcggcggcggccggatttgaggaatcagggcgaggaggagggcaaagatggaaaccagcagtatgactgaactacagcgtcaaataaaaagaatgatttcggattgacttagcgacgtcaaataaaacgaaacggagggagtataaagaaaacgaattaggaatagaaacgatcaagaaaagaatccaaaggatggaaaataagcagcaaatcttagaactggaattctccatatgctagagctttcatcgttatctacaacacagccaccggtgaggctactaatctgagctcagttcagttatgaaccatccaaacgcagagaacgattttagatagataatgttctgctcttccttcatgatgggagaaatatcctgctttctcgctgtggataaacaaacataagtgcgaaaaaaccacccggatatatctcttgttagctcgtctccgatcaaatctcatatatacaacaaactagggaggctacgttcaatttttgaatctgctgtagaagataagttaaccaccgagaaaaataaaaacgggtgggagtattcaattcattagacccgttaacggtcattagcattatctagtgctagcgatcgaattgagggaggatagggagggagtagctactcctggtagtagtttctaattttcctactccctccgtttcaaaatgtttgacaccgttgactttttagcacatatttgaccgttcgtcttattcaaaaaaaattgtgaaatatgtaaaactatatgtgtacatgaaagtatatttaacaatgaatcaaatgatatgaaaagaataaataattacttaaatttttttaataagacgaatggtcaaacacgtactaaaaagtcaacggtgtcaaacatttcgaaacggagggagtatatatatagcccatttggggcaccatggtgtatgggctccaattctaatcaccgttagatttgatcctgatcaaactagttgatgtgggtatgatattaacgggtctgcccattagtagcttatgatatatggaatcagatatacttagatgaaaaggtaccggattcataggcgtaattaattatggatggtaatgatgtttaatcacatgcacacgattgagtatgtcatttatttccgtatatagtgtgaaaaggttataaatgaaacttttttatagtatttttttttaatgaaaggaaggtaaatatactcaggcaattcgtgtgaacgtatctgaaataataattttcttcgtgactttgggtacacgacatacgcatgtattccagagtataatcgtgtcaacatatctaaaacaaatcggttgtgtttggtgaacaaattaattttacgtgacatatattccaggaatcatgtacctatattttaggtacacccatgtgttttccaaaaaaaaaaatgtttgtttaaattctataccgtaccttatttcttttgctatatatgcacgtcgagtatgtgggaccatctccataatattatactggtatagagtatgtgtgacgcaccatgactcttattattgggtatataacccatttaaagacttgtgtatatatacttctcatcagggtatatacccaaatattttgtatatatccaattttacgtgtatgtatccaaatattgaacatatacccaaatattgaatatatatacccaaatattgggtacgtacccaatttgcacgtaaacatgtacatatacccaaatattgggtatgaaccaaaaaaaaatcccggagcatgaaaaataattctggaagtacacatacccaaatattgggtatgagaacacagaaataaataccgtagcatgaaaaataattttggaagtgcattagatcctaaaattcgaaccaaaatttgaaacagtatatatacccaaatattggatttggaaaaaaaaaatccttatccatgaacaaaaccaacgacgtattgggccgacgaacgagcttgcggacgaaaggcgcggacaaccagtggctgcggcaaagctcgcagacgaccagcggcggcaacgaagaagctcacggatatctggcagcgtaacagcttgacaacgaagattgtggaggcctggttgggaagaagaagctcgcggacgtacgatgtcaacgacaaatctcgcggacgacgatcagcagcctgcgacgaagaagctattgcatatccggtggtgcaatagcttcgcgacgaatgttgccgaggactagttgcaacgacgaaggtcacggtcgaacgtcgtcagcaacgatgctcgtggacaaccaacggttgcatcgaagaagattgtcgacgtccggcggtgtaacggcgtggagatatgaaattggagtgtgtaaaagatggaatgacatctctgcccgtatatatatatacactagaaatagaaaagtattaatagtatggatgaaaataaagcaattacatcgaaattagtgggtttgattatgtacatataatttggaaataaattgtgttcatgcaatcacgatcatattcatttggaaagttgacgcatgcaagcttatatggaaacagctagctgtgcgcgaaccatgcacgtatagtacaaatggaaagctggatcttaacccgctaatatatctataatatgctgttttgagtagcacggatcctaaagcagataaatggtggatacaattggagcccatacttcatggagcaccacataatttacctatatatgtgaaccaaggttcacttcaccttaaatctggaacgttggtgtgctttaagatgtgtgctacctaaatattcattgctctgtacttgtgaaggctttgctgtgtacttgctcttgacctcactttctaatcttccaactttacccctgagctaaattatagctctctttcatgctaaacacagttaatattacttttttttcttagtgttgttttaagttcttcatcccacggtgtgtaactgtgcatggtacattttttttttggaaataagtacccatacttttttctataactacataattaacatttacctaataaattgatcttttaccaaatgaaatttgtaaataatacctctgctaagatccaccgaaggaaggatattatggcagttggcaggagaaaatttgcagctatatcatttttgaataaaaatctaacgtgcatatataagataatatgaattataagattatgccacgtgtacattactccaataaagaggtccgggacaactcacatgatacttttgtggtgcattttaaattttatacacatttcaaattcacatgaaatgtcatacatattcgaaataatgacatatagctagatttacattaaatgatgtacctgtaatatagaaataatacatgtcaatttaccataataacattttacaaaaagaaagtttgatctatatatctacatacaaaaaaaattcaacatatctatatatctacatttacaagaacagtatatctccattcaccaaaaaatgacagttacaaaatgaaatgttgatttgttatatacacgggttgacattttttttgttaaacaaattgatgtatcgcaaaacattatgagaactcatgagaaatcaaaatcaccaaaagaaattatttgaggtgaaatgccgaaacataaacagatacttagccaattaagtgctaacaacggttattaatgatatgacttaatcaagtgatttgtaccttatagcactaccatgcgcatgggtcaacagagaattgtgagtgagtgatgagtcatcattgtccaatatgagtggagtactacttcaagtgcattttggtcttggcaattagatcatgtaccaacccctgctcacactataaggatacaaagctagatatgtacatcttacagtgattataatgtgtacacatgtcacacaaatgagtgaggtgcatatgaaccaaggttcatattttatatatatatatatatatatatatatatatatatatatatatatatatatatatatatatatatatatatatggcgccgtaggcgccacgtattagatggcgcctgacacaacacctccctaccctaccccacattcctcacatcccgcctacgccaaccatttatgagtcatttgataacttatgagaataccgcgtccaccccacacccaccactgcaccacattatctcacatcccacccgcgcccaactttcatgagtcatttgttaacttatgaccatgcccgcgcccacataacgccatgtgttattttttaactaaaaagcgggcatgcatgcgcaagtgagattaagaagccagttatttttcaactcatcagtacatggcacgtatcgacggtgtcacacgacttacctgtttttttggtttatattttaactcatgtggtgcgacaaggtgtgcgtgggggggcattcgtcgtgctcgttccggtgaggtattcgttaactccgtctgaacacacgcaactccattgcgtgttggcacgagggcagttttttttaactcgtttgcgcgtcactgcgcggtgggggcacatggcattggtcgttaaattgagttactttttaactcaagtgatcggcggtcattaaatgcatgcccgtattttttaaatttttttgtcagttacaggcagcgaatcttcagagattagtcacatcaaaaccgccgtagttatcgccgcccactcctcttccggacagttcttttctcttccccgttcttgagttcttagagatcgctcctcttctcgccgattcagttctgtggacccccgtttttataacaggaatcaatcgtgtaaacagtaccatttccctggatcaagtagtctggtacacacaagttcatagctgaaataccaaatacacatacatgagagtctagtgcgaattattacatcataagcccgcaggcatagtcttagatcatcggaccgagcggtccggaatacattccaaaagcagaagtggataaggtagcagagttaaggcagcggcacgacattgccacaggcaacaatcgtaactaagacctactgagcgccatcgtcttcatcaccctcctggtagtatgcgtagggatcctccgaagcttcatctccggcctctgattaagtttatatattgcaagggtgagtaccaaccgtactcagcaagccatcatagcaacaatacacatgataggggtattcaaaggatggctatggttctttgcgcaaagccagttttgtaattcttttcacaagcctaagacctagcattgactgatcaaattttagtaccagtgttcacatttaaacaacgacggttctgtccaccatccattgtgatcccaaggatagcttcccgctattgagtcgtcatggttttctgaggacgtccaccttcccgcctctcaggaagtggctccaacagcataaaaaacatcatgcaatatcccatcccacacaagttaagaatttagagtctagccaagtgtaatacacgtcccggtgctcaataaccgcgagcacggctatttgaatagatttggtttactcacactgcagtggatgtacactttacccgcactccgcgactgcccaacacatgagcctcgtcccaacacatgagacgcgtcacggcaaagcttttcgataacctcgcattggcagtacccgctccatgaacttaaatcctcatgcactctaggcgtccatgtttctagcagtgagaggagttctggcgctcccgggaaagagaagtctcacacacatattaaattatggtttaagttaagttctctctctcacacactcatggcagtcctatcaatggcgacaccgatgtagggcacgactctcggccctacctcaacagctgtcccactgtagagcacctgcctcactcaatgagaaaccactatgcatggatagtgcctccgctcggctatctaatccgctaggtctatacccattcgagaagtacggttgtacgggggtcgtttcatgcttaacttcatggctcggtccttaattgaccagggacggcactagcccttttcggataccactcaaatcctccatccgccccagtcgaaaacatttgtttagttttattttcctttcacaaatcatgtcatcaatatcatggcaatgtggcgctcatgtctccacatgccgcatctcaattaccttcccaaaggtaattgcccaagcatatagtatttgataaatatgtgtatgcgtaaatctagagtaacatttctaagtatttgtcatagttgactagggacttatacgtaaatcatggttacaaggatttaagggtaaacaataatcaaggcatggcataatggcgacgcgatggcggcgcacggggctcgggacgacggcgcggggcgcgaggcggcgaggggatgggtgcgcggcgacgggacgggcgacgcgacggcaacgggcgacgcgacagcgacggcggagcggggctcgaggcgacggcgacgcgtggcgacggtagagcggggctcgaggcgactaggggacaggcgcgcggtgacgggatggcgacggcgacagtgacagcgacggcgatgggacagcggcgcggcgcggcagcagcgagtgcgcggcagggcacggggcgcgaggcggtaggcacgcgacgcggcgacgggatggcggcgcggcgacaggcgacgcgacggcgacggtggcgcggggctcggggtggccaggcgcgtgcggcagaggaggggacaggactagggaacctcatcgaacacctatgcctgaatgaataatgttttttcctatttatccctatttcagcctatttcctatataaattttattctataaatcctaatttttgcataaatgaagtttacttaatatttgtgttattctaaccaatggattcaccctagattaatattacccatattttataatttatttgaatttttatattagggctaattcttattccgtcgcacttaaatttagttgatgcaaatatggttgcaataatatttcatttatttctatcctcaccaaatcattattttaaattatattctaattgtttattttgccaatttaattttagggtttattcctaattaattattctttattcgcgatctaagaactccgaaatcaaaatccaatgaaataggcgaataatatcggcatgatgcaatttatttaaaaagtttttgaaggcccataattttagggtttgatttcgttggtcgaattttcagggtgttacaaacctacccaccttaaataaatgagtaaattccctgtgtacccctgaaaactcactcaatccctttcatacccctaaaatttacccgaccccttctatacccctgaaatttcaatttgatcccttccatgcccctaccgttacattttccatcattttactgttacgtttggttgcaaatgtcttttttgcccttgatgctttaggtttaaatataagcttcaaaaataattgaaaattttgtttgagtgcacatcgtgtgcattttataaaactaatgagactaaataattagtgcagaaaattttgacataaattttgaaaataaaataaatgtaaaaaattaaaattcttatttgaaattttaataggacaatggatttttttatcaggagcattcataaaaatgttgtgaacattggtatacctatctttatatgaatgctcctcatttttatgatctttttttaaaaaaataaatacgtattttttttatttcattatctaaaaatatttttttgggataaataatgcatcgcacaacaaactcataactataatagtctcatgcgagaagcttttatatttttaataatgtaattcatgaatttctttgttcatccaagggtaaaatggtcatttttatagaaaatacacggtcaactaacgggaggggtatgcaagggatcaaaatcaaattttgggggtatataaggaagtaagcaaaattcaggggtatagaagggattaggaaaaatttcaggggtatataagggattttctctaaataaatctcgtcccgagatttcttaccggttttcgaatagatgcgggtattccgtcttcaagaattcttcgctttcccaagtggcttcatcctcagtgtgattactccattgtaccttgtacatacgccacactttggtcctagtcctcttttcagcttcatccaatatccggactgggtgttctggatacgtgagatcattgctaatattaatttcttccaacggagcttgttcctctggcactcgtaagcacttctttaactgagacacgtggaagactgggtgcacatcggcgatattttctggtagctgtaactgatatgcgacttctcctcgtctagccatgatttgaaaaggtcccacatatcttggtgttaatttccctttgaccttaagcctttttgtgcctctcatcggagaaaccttcagataaacataatctccttccttaaattctaggtttcttcttcgggtgtcagcgtaacttttttgtcgtgattgtgccacttttagacgttcacggatcaggcgaaccttttcttcggcctctttgataatgtcaggtccaaataccgcccgttctctagtctcggaccacatcagtggagtacgacatcgtcgaccaaacaatgcctcattgggcgacatctttaggcttgcttgaaaactgttgttgtaggagaattcggcgtagggcaaacatttctcccaatctttgctaaaatccaaggcacaagctctcaacatgtcctccaagacctgatttgttctctctgtctagccatctgtctgtggatgataagctgtgctaaaagcaaggtaacttcctagggcttcatgtactttctcccagaaatgcgaggtaaactgtgtgccttgatcggatataattctcttaggcacaccatgaagacacactatcctagtcatgtacaactcggcgagtttggcaccgctatagtctgtcttgacggggatgaatcttgccgtcnnnnnnnnnnnnnnnnnnnnnnnnnaaatggaatcataccctgttgcggtcttgggcaatccaacaataaaatccatacctatctcatcccatttccactcgggaatcctaaggggttgcagcaaacccgctggtcgctggtgctcagccttcaccttctggcatacgtcacagagtgctacgtattctgccacatctctcttcatgttgggccaccagtatccttccttcagatcctggtacattttcgtacttccggggtgcaatgaatatgctgattcgtgagcttcctttaggattaatcctttcagtccaccctgttcgggtacatagatcctctttttataccataagacatctttctcatcggtcgaaaattcctttgcaaaccctgcagctaggcgttccttcacctcttggatttcttcgttgtccttctgagcttcttctatttgggttctcaaaagaggttgaatatccagggtgtttatctgtccacggggtactatatgtaggtttagctgggctatttcctctttaagctcaggagccatcccttccattctcaaatgattgcaatggctcttacgactcaaagcgtcggccacaacgtttgctttgcctgggtgatagtgaacctctagatcatagtccttgattaattccaaccatcgcctttgcctcaagttgagatctgactgggtgaaaatatacttcagactcttgtggtcagtgtagatatcgcaatggtttccaatcaaatagtgtcttcaaatctttagtgcatgaaccacggctgctagctctaggtcatgggtagggtaattttcctcatgtggtcgcagttgtcgcgatgcataggccacaacctttccatcctgcatcagtactcctcctagtccttgccttgatgcatcacaatatataacaaagtctttcctattgtcgggaagaactagaataggcgcagaggtcaacttttctttgagctgttcaaagctttcctggcactgttctgaccacacaaacttcttttccttcttgagtagttgtgtcattggtcgggctatcttagagaatccttcaatgaacattcgatagtatcaggccaaacctagaaaactccgaatctcagtcacagatttgggtgccttccattccgtgacggcctcaactttagcaggatccactgccaatccaccggctgagattacctggcctagaaaagtgacttcttttaaccagaactcacatttactaaactttgcatataatttatgcttccgaagtttctcgagtaccaatcgcaagtgcttcacatgctcttcctcgtctttggagtagattaaaatatcatcgatgaatactaccacaaatttgtccaagtaatccgtgaacactttattcataagattcataaagtacaccggggcgttggttaaaccaaatgacattactgtgaactcatacaatccatagcgcgttgagaacgtggtcttgggtatatccccgatcctaatcttcaattggttatatcctgatcgaaggtcaatcttagagaacactttcgctcctttaagttgatcgaaaagatcatcaatccgtggtagtggatacttgttcttgatagttacttcgttcagtgagcggtagtctacacacattctcatgctaccattcttcttcttgacgaataacactggggctccccaaggtgacgaactgggacgtacaaatcccttctcttgcaactctctgatttgctttttaagttcctacaactcattgaccggcatctgatatggtctcttggatatgggggcagttccgggtatcaggtcaataatgaactctatgtcacgatctggtggcattccaggtaaatcttctgggaacacatcagggaatcgctgcactacgggcattcctttcaggggtagcatggtaaatatgcctccggcacgttcggttagtctaggatcttgatccatggttgctctcatatccgatccccagggtgtggccagggtaacttctctacgtctacagtcgattactcccctattctttgttaaccaatctatacccaatatgacatcaagggtctgaggcatcagcaccataaggttggagggaaacaccatatccctaaggcgaataggtacgtcaatacaagctgtatccacggttatttcacccccaggtgaatgcactaacattggttgccttaatttaactctggtcaaattgtgttgttggcttgctttcaaagatataaatgaatgcgatgctcctgaatcaaagagaagtttaactggaatggagttgatagaaaacatacccatcagtacgccctggtcttcctgggcctcttcagctcgaacgtggtgtcacgcccggaaattcactagtaatttccgaacttatttgtgcataaaatcctcgtccaggaatcagccgaggtacacaaactgacaatttaatatacaaatccatcataataataacgttacacacttacaaaagaaaagaaaacagcagcggaataacggtctagcgatggcttcagctccactcccacaggcagctcaactggggtataagccaaacgtcttctccttctggatcctttttcttcaactgaggttgattgattattgcaagaatgagcatatgacatactcaacaagccacacagcaaatatgcaagtgcacaaggataccaaaggatggcataatataggctcatttgcaaaagcagcatttagcaaaatatttaagagaagtaaaacagtggagtaattaatcagaaattttaatcaacactgaacaacacacccatgctgcacggcccaaccatcctgaacaaccatacccggctgtacagatctaactccaaaccaggagctaagcaaattattaccaggtataacatccataattattgtgagaggtgtgagactaatcacgaaaacattgctcaacccgcccataaccgcgggcacggctattcgaatagttttactctggccagaggtgtaccactgtacccacaagacacagcctcaacatcatgtctaccatgcgtcgcgatactggaaagtacccgaatagaggctgtgacaataccctctgcacaacacaactcaccacagtgcaccattcgaaagtaaatgcacagttgaaataaatagagaatttaaatataggatcaacatgctcaaaggattgtgtttaagatctgtgtgacttgccttgcaataatcggtcttcaattaatcttctgaacactcccgacgcactcacgaaccttcgtaacgacggaaacgacaagctaacacgcaaaacgaagaaaaagactaataaaaaccaaataaacagtacatataaagtaaacaaacatgtagatctcgattttagatgaatttagcaacttgaaccactcaaaaccgagttacgatgatttagttatgaatttccgaagatttaatctattagaaaaacagtaaaaagaaaaacgatgatgacgtcatgatgacctcatcaatagccggaccaagatggcgacctcgccggagattggatggtcggctgcgactttggaggacatgtacacgtagaggacgacgagaggaacccaacggtactcaccctcgaaccaaacgacgaacgacgacggccggcgacgaggtctagcggcggcgcggcttcggtcgacggcggcgacggggctccggtgaccggtgacagcggggagagagcggccgagcttgcccacacctcggcgcaccttacggcggtgacggcgaccggcggcgacgacggaggcggcggcgcgacgcggatggagctcggccggcgacgacggcggggtggagcacgtggcggcggcgctacgaggcacgggagatcacgggagagggggcaaacgaaagaggaggactagggggtcctatatatagccatgggaggccgggatcgagcccacaacgacgggaaaaactcgggaaagtttagatcttcgccggaaaaaggaaaggttgaaccgcgaaattggaaaggatttccatataaacttttggggatttcttggggacaaggaagaggagattgagaggattccattcccgcaaccaattcggaaataagagcaacggagaggttggattttggaaggggatcggcggcaacaggcacggcatggctcggctctggctctggctctgtccagagctggaagatgaacagtagcgcagggaaggaaagtagacttcttgccgggcttttcttttcacagcctgattagaagagggagcaaaaccggactttggctgagagaagaagagaggatgcaggctcgggttgggccggcggaagagagaggaaggaaaggaatgggccgattcagcctaagacaagggaggagaattttattactttcccaattaaaataatcacttaaatgatctttgaattgttaaaaatacttccaatgcgcaaataatttcaagaaaaatcctgaaaatacttggacactcaaagtacttaacaaaattacaattagaccatttaatgattaatttaatatgtgggtaattactgaaatgctctttgtatgattaaaattaggaattgagctccgaaaaatccgagaatattccagagagtataattaactatggagaatttaataaaaaattaaatccatccatgctttatatttaggaaattttatttcccacatttaacttcacttgtaaattaatgaacatttaatataaattctaataatcatttattaaataatttataaatcctgaaacaaaaatcaggatgtgacaaatctacccccttacaaagaatctcgtcccgagattcggaacggctagaaagaaaagggcataggtaaactgcagtctaccttattattccataactcagataattattctaaggctttaaagaaaactactgctgctttgaaactggtggctgagctgtaacacttgaagacgcaactcttgaagacgcaactggcactgcattggctcctgtgacgacaatgttgttgacttgcggctgctgatgctttggcttcggacactctcttgcaaagtggcctggcttgtaacagttgaaacatacctgctgctcccttccactactgttattctcttgagtctgatcctgctgaactagcaccggctgattagcttgctcgatgttaactttattgctttcattagtctctgatttgatctcaccaccgatgttcaactgttgcgactgtccttgacctgcagaagaaggttcaccaatttggagtggcttgatacgctgcctctggctactaccttgtgcctcctggaatacagtcattttccttttacggttatctatcctgttcttcttgtcttcaagtcgaattgctttgtcaaccagctgctgaaaatcaacatagtcatgagagatcaatgtaactgacagttcatccttcaagccttccaagaacttctcctgcctttcctcgtcagtacgcacatcttctggagcataacgtgccagacgattgaactcatgaagatactctgccacggtacgatccttttgcttcagtgtcctgaactcacgcttcttcaaagcaacaactcctgcaggtatatgtgtcttattgaatccttttgtaaactcttcccaagtgattggttgtccttctgctctgttcatccggaaatgatcccaccattctgaagcaggtccttgcaactgatgtgaagcgaaaacaactttctcctgatccgtgcactggaggagttccaacttctcaacaacgtgcagccaatcacctgcttccactggcgcgagtgttcaccatctgttgcagattagagaagataggaggataagggttacactaaagacaagatcttaaccagtttaacactgatctgatgtgtgtagaccattatattgttcaagttgattaagcaagcaacctagtatagttacacgctcatcattgaaccccaccaatgacgggaatgcaaccatacctacacacaagcaagcaacaaacgttctaccctactaactattcttcaaggatagtttggcggcataggttctaaggtaggattcaaacttcattccatcttgaccacttggcacttcggtccttcctcgatccacttgactgacctccataagttgaccacatcaacatcttctagtttcaacaactagtttcagaactactcaagttgaaagcaggaggggagaggatgataaaatgatttatagagaattctagagaaggaagaaaggaaaattttcacaaatcatgttttcggaaaatttgtccttaaggttattttcacaaatcatgttttcggaaaatttgtccttaaggtttgaccatttggcttatcctacagtcgagatggctctgataccaacttgtaacgtcccgccttcccccaggccgggcccacttacatctgatagctttcataggtcatagactgccctcacagaccaacacatgtcttttctgcacactttgtcctcactcgtgtgcagcacgcttaaccctggagttctttggagattggcttccggaaaagaagttgcaacttgttgatatgagtattctattaatcctattaagccctagaccgggatgttacaccctcacccccttaagagagatcgactcccccgtcgatcaaccctaggccaggaacgtcctctcttggccacgtccatgtgtccagtgccagcgcatgtgccatgctgtgtaaccactcccggtctacaccagacgtgcgcaccatgcctgcgcaactgcgacacacgcgcccgtgaaaccgcgagagtcggctctgataccattttgtaacgtcccgccttcccccaggccgggcccacttacatctgatagctttcataggtcatagactgccctcacagaccaacacatgtctttatcctcactcgtgtgcacccgggaagaatttcccggtcggtcacccatcccaaattgctccaggccaagcacgcttaaccctggagttctttagagattggcttccagaaaagaagttgcaacttgttgatatgagtattctattaatcctattaagccctaggccgggatgttacacgtggttcacttgcccgcgtccaaatccggtagaggtcctgttagtctgcggagtcctgaataaacctcgtccagtagcaggggtagcagtcccgtgaatagccattgcgttagctccggtgcgaatgggtgtcttgtttggatgggggcacttgttggcgaaatgcccgtactctccacagttgaaacagcttcctggcctcactgatccagtagcggcctgatttggtgtaggagcttgggtctgagtggtaaccagcctgtggaagttgctaggtgcggtaggacgattggttgttaccaccgttggtctccatcctgatgaggtagttcctttaggacactggggtgcgacctgaggcgggcggttcatggcaagcctcctcttacgattgtgctccacaaccttccggtcgttttccagtctaacgaccttattgattaaactctggaaactatcgtggtcctgtccaatcatgggcccacgcaactcgtcgttcaggccttcgatgaacttgtcgatcttttcctcctcgtcggcaagatctccagttgcgtaacgcgccagttgagtgaaacggtttaggtactcttgtatagtggtatttccttgtcgtactctcctgaactcattcttcttcattcgcatcacagcggcaggcatgaagttgtcacggaaggctgtagtgaattcctcccagcttggttctccagcatcttcttctcgagcttctttgtaggtgtcccaccagtctccggctggtccttccagttggttcaccgcaaagatcactttatcggcttcacgtactcgaacaagggtcagcttcttctcaatgatccttaaccaatccttagcatccataggttcttcagctgtggcgaatgtgggtggcttagtcctcatgaattctccaaagcttgatcctccacggttgccttgattatttgcgatggcttgcagaagttgggtttgagtagccatgactccggccagggtgtttaggtcgggtgtttgagtttcttcattgctggttgacgcccgatgtcggcttgccatctgtgtaggccgatgaggtaagtatcctaatttcctaactagcccttatggttttatcccgttaagggagttgttttgatgtgaactttgttttgcaagcatggtggaataaactcattcataacccaacagtaataatatcataaataacatcacagagttccacagataatacataagtcatgatgcaatcgactgcacatatacgtagtccaaataaagtttatctaaaagatacatcgaactaatcatcaagctacccgtcaatctaggtagggggggtgtgtctcgcatgctatccaaaaaccatctgaagcgagatcgaagctgcaatagtcctccagtctagtcatccaaccatccgcaggatcctggggcaggtagagggtggttgctggctcgtgcaaacctgagtccccatggctcggaagtagtggcctctggatctggcttgggcttcttgcccgggggtcgtgtgctcttgcgagcagtgctgagggtgcgagggcctctgataaaggtgatgcggtggacaggagtctcgtcctctgaaggatcagtgatgtccggctctatctctggctcagtgtcggtcccctctgtctcggagtcaacctggatcggagtctccaaactggaacccagctgcggtgacgaagtagggatcagtggagtgtgcacaatctctggggcaggtggctgtgtcactgtcgggtccaccaggtaaggtgctgactcagtaactagcatatcaacctctcccaaaagagcgtggagcgctggtgggtatggcggagtaaggaagaagtagcggtcacgccctattgctgaggaagtagaagctcctgtggtgctgactatagctgctcgaagctgctcctcaagctggctgacgtgctcctgactctttctcagctgctcctcgagtgtatccatcatcccgcggcgatcattgtactgatcagatagctgctggaactggtcgccatggacctagagctctaccttcagtgagtctatctcactgccccaagcctggtgctcctcctctagctgaagctgctgcactgtgaggtcagtcacctcggtctccaactctcccaaacgcctctgctggtcgtcgatctctaatagcgcctcctcgtagaagtcgtctactgcctcagcccatcgggacagtcgagtcaccatcgggttgtagcagcaaggtgtatcctagactttgtagacatagttgctctcctcccgaaacggatggtaagcaaagtcggtacttgccaactcagctcggtgaatagagctacgtcggaggaaggcctcccgggctgcgtcctgcatcgcggtctctgtaagtcgcgacggtggcgtgtcggaaagctgtagtctgactctgaaggaactcgtgtatgaacctcaatccgagcctcccaaacgggtccacactgtctcactcggtagatcggaaatctggggtaccgtaggcgcctcatcaaccgatgtagctcaatgacatatccctctgagcggggtacgcccatctcccagatagtgagtgaatcctgatctcccatctaattttaagaaaaacccaaagtcagctaagagtaaaactcgttttgggaagaaaatagttaagagtaagatgaaaatcgtatatagttttgtaaacatagcgtctttatttttgaaaatattactaaatgggaatttctcccttggccaactaggaaaggggtggggcgccttttggtcttttcctacagttgtatggctctgataccagctctgtggacccccgtttttataacaggaatcaatcgtgtaaacagtaccatttccctggatcaagtagtctggtacacacgagttcatagctgaaataccaaatgcacatacacgagaatctagtgtgaattattacatcataagcccgcaggcatagtcttagatcatcggaccgagcggtccggaatacattccaaaagcagaagtggataaggcagcagagttaaggcagcggcacgccattgccacaggcaacgaccgtaactaagacctactgagcgccatcgtcttcatcaccctcctggtagtacgcgtagggatcctccgaagcttcatctccggcctctgattaagtttatatattgcaagggtgagtaccaaccgtactcagcaagccatcacagcaacaatgcacatgataggggtattcaaaggatggctatggttctttgcgcaaagccagtttcgtaattcttttcacaagcctaagacctagcattgattgatcaaactttagtaccagtgttcacatttaaacaacgatggttctgtccaccatccattgtgatcccaaggatagcttctcgccattgagtcgtcatggttttctgatgtcacgaccagaaataacccaacgggcgttccttacgtgcgtgcattattccttgtcccaggaggcaaggtacaccaaaagttgatacaattcagagtttaacaagcggaagcgtaattaatttattacatgggcagtgaagacccagcacacaagaagacaaacgaaaaacagcggaagactagggtgacgaccacaggcgcttgacggcaggcacgagctagacaccaaagccttcatcttccaggaactcctcttctgggtttgggaaaaattgagcaagactgagtacaaccaccgtactcaacaagacacacccacaagtgcagaataaatgcaagggagtacaagggagccataatatagggggttagggtttgcagtaaacagcattaaaagacacttagttgctcaaagctattttgtaaacacggtcctagagctatacaatattattaatcaaggccgtgaacccacacgaacctgccttaacccaaggcctacgatgattcagaccaaactggcaacccgaccctgggtcccagctcgtcccaagccaacccaggccaaccattccacattttagttgttaagccggttttaggaattaaaaacactaacttgggtacattgctcgacttgcccataaccgagggcgcggctattcgaataggttatactctgatcagaggtgtacatctttacccacaagacacatcatcctcacgtgtaaccacgtgccacataccaccatggtatacggacggaagacatgacatagtttccaacccatcctagccataaacaagagtaccgacccaaccccacctacggccgaaacccccgggacaggcaggcaggactgagcccctagcagcaggacaccggccctgtgccatgacatctcgactaccgggccgcagctcgtgtagccttcatttgccctagagatgtccatcgacccccgacttcgtccatctccatccgtgtacttttgtttataaccagactgagccacaaactaagccttacccactagacatatggaagtacggtagtgctttgcaacagaggcccgaagaccggtccttatatggccgaggtgctactatcaaaaccatgcaccctgagcccagcctaaaaccattttgagggttttgaatagagggggaggtgtgaatccaattccacaataatccatccattccatagtgtccaggtgatgagaatattcccaaagtctagagttgtaaaaccacctaatgttgcctaattaaccagcgaagcatctacctaaaatcatactagtggtaccatgagtagagtgtccactagttggggttttgtttattctagggtgaacaaggtaataataacaataacaataataaggtcataacaaaggtacataggcatggctagataaaacagtgataacgcgggaatttaaataaagcgataatgcaataatttaaatcaaaataattttataaactgggattcaatatgttcaaggatgatgtgacttgccttgctcgctttcccaaacgtcggcttcaacctccacaaagagcggatcttccgaagctgcagcgtctacacgaccaacggaaaagaaaaggcttttacgctaataaactccatataacaagcaggaacaaagcacaaaaatgggttcttgacttcttaaggaaaaattagagacttgaacggtccaattccgagttcaaatggccaagttatggccatttgaagtttatatgctctttaaatgaatatttgcgaatttcttcatttaaaatttaatttaaaaagggtttattgcgtcagccgaggggagggggcgcgcggaccgggtccacgggagtagggcccacgtggcagcctcacggtccacggtggaccgggcgcacccgggctcgcaccggccggcgccgtgggccccacgcgtggtcgccggcgacggccataggcacggcggagcggcggccgagagaggggaagggaagggggaaaagaggcggcggtccacggctcaccctaggtcgacggcgacgatgaaaaaggcggccggagcggaggaaggcggcgcggctcgggtcgacggcgttccggcggtcggcgaccgaaacggagaggtggacgaggtcggcgaggatgcggtgaagccgaaggaggcggcaccgaggtgggaggtggtccggggcgacgacggcggcggaccggagctcggcggcaacggcggagagagagagcgacgtcgcgagctcgaattcggcgaggaggaagggtggcgagaggcggaaacggacggaggaggtgcggggagggtttaaatagggccggggcgagagagggcggccggagaaggaaggaaaccggtgcggcattctcgggctccatcaatggcgccagcgggattaggggaggggtttccaaacgaatccaagggagagagggagggaaaaatggggggaaagggagaggggatcacggggagtgattccccccactttattgcacgcggggacggcgggaggcggcgggatttgcggcggtggcggcgctagggcgcgggggaggcggcgggagcggcgggaggtcggggatgacgggtgggccccacccgtcagcaagggtggcgggcgggcccgcccgtcagcggcgcccgcgtggggagaggccgagtgggccgcggggagaggagagagagggggagggagatgggccgaattcggcccattagagagaaggagggattttagggtttttctttttataaaatcattttaactttgtttatttcttaataattattatttatgctctgaaaatttcactaaaatttatttacacattttaggcttttaggagatatacaaaaatcgtctaagccttaattgacttttagctttgcacattttaattgttggaggctttcacacggtttttaattattctaggcataatttagaggatgtattttagagtcgttttgggacgtgacatctgaggacgtccaccttcccgcctctcaggaagtggttccaacagcataaaaatcatcatgcaatatcccaacccacacaagttaagaatttagagtctagccaagtgtaatacacgtcccggtgctcaataaccgcgagcacggctattcgaatagatttggtttactcacactgcagtggatgtacactttacccgcactccgcaactgcccaacacatgagcctcgtcccaacgcatgagacgcgtcacggcaaagcttttcgataacctcgcattggcagtacccgctccatgaacttaaatcctcatgcactctaggcgtccatgtttctagcagtgagaggagttctggcgctcccgggaaagagaagtctcacacatatattaaattatggttcaagttaagttctctctctgacatactcatggcagtcctaccaatggcgacaccgatgtagggcacgactctcggctctacctcaacggctgtcccaccatagcgcacctgcctcactcaatgagaaaccactatgcatggatactgcctccgctcggctatctaatccgctaggtctatacccattcgagaagtacggttgtacgggggtcgtttcatgcttaacttcatggctcggtccttaattgaccagggacggcactagccctttccggatactacccaaatcctccatccgcccccgtcgaaaacatttgtttagttttattttcctttcacaaatcatgtcattaatatcatggcaatgtggcgctcatgtctccacatgccgcatctcaattaccttcccaaaggtaattgcccaagcatatagcatttgataaatatgtgtatgcataaatctagagtagcatttctaagcatttgtcatagttgactagggacttatacgtaaatcatggttacaaggatttaagggtaaacaataatcaaggcatggcataatcacaagtaggatgttcatcattgcatgcaattttattagtaaacaaaataattttgtaaatgggatcaacgtgttcaaagaatagtgatgacttgccttgctcgtagtcctgcgggtcttgaccctcgctcggatccgcaactccctcgggctctagaattacgtgcgaagaacgatttgaattcaattagaattcaaataaaatccaaataaacttcaaataacagtcgaacgcgaatcgatctttctatattgattacaaagtttgcaaaaccacgctattccaattttaaggtcatttaatcctaagtcattttgtgatttagaagtgtctccattaaaaattcaacgaagaatacaattcttagtaactaaatccgattatctccgcgagtgagttacttatagagattactgaaaataatctattttcatattaaactttgcaattctatgactataaataatctataattaatttctaattattctaaattttctaatcctccttaatctccatctaatttctatttatttatacttttttttattctatttctctcctcttctctttcttttcttttcctctctttctttctcttctttttctctcttttctttcttttctttttctctcctctttcttttctttttctctcttttctttcttttctttttctctcctcccccaggcttctttcttcccccctctctctcggctcatgctaccggggcggtgacggcggcggaacggggaagggcggcggcgacggcgaggcgacgctcggcgtggcacacggcgcggcgcggtggcactgagggcggcggcgcagcggcacgaaggcggcggcgcagtggcacgagagcgacggcgcggtggagagggaagaggagagaaggagggaaatggagtggggagaatggagaggggtggggtttttataggggagagggggaaagagagagaggaaagaggtggccggcttaatggcgacgcgacggcggcgcacggggctcgggacgatggcgacgcgcggcgacgcgacagcgcggggcgcgaggcggcgaggggatgggcgcacggcgacgggacgggcgacgcgacggcaacgggcgacgcgacggcgacggcggagcggggctcgaggcgacggcgacgcgcggcaacggcggagcggggctcgaggcgacgaggggacgggcgcgcggcgacggcgacagtgacaacgacggcgacaggacgacggtgcggcgcggcagcagcgagcgtgcggcaggcagcggggcgcgaggcggcaggcacgcgacgcggcgacgggatggcggcgctgcgacaggtgacgcgacggcgatggtggcgcggggctcggggtggcaggcgcgcgcggcagaggagggggcagggctagggaacctcatcgaacacctatgcctgaatgaatagtgtcttttcctatttatccctattttagcctatttcctatataaattttattctataaatcctgcataaatgaagtttactcaatatttgtgttattctaaccaatggattcaccctagattaatattacccatattttataatttatttgaatttttatattagggctaattcttattccgtcgcacttaaatttagttgatgcaaatatggttgcaataatatttcatttatttctatcctcaccaaatctttattttaaattatattctaattgtttattttgccaatttaattttagggtttattcctaattaattatttcttattcacgatctaagaactccgaaatcaaaatccaatgaaataggcgaataaaatcggcatgatgcaatttatttaaaaagtttttgaaggcccaaaattttagggtttgatttcgttggtcgaattttcagggtgttactagttctcggggatcgtcagcgccgtcgaagtttctcccaagtgattcccttcccacaatgttggccggcaggtaccagcaatatcaccctccacacattcctcttcctcatcccatatctttatcccccgccgcatgagtttgcctcctcacccccattgccgggctaaccttttttgttgttgatctagagccatgtccaatggagatgactgggaaaatgccggctagggtcaagcggattaggtttgccgattcgcaaaacgagtgcgaggtcgtcctgccccaaacacttgctagcggcggagcgtcttcgtcgagggaggtcggtgaagcagcacagagcaagccaaaaaggagacggcgtgctatgtcggccggcgagggcccatgaggcgacgaggtgagcaccacattacttttctttcccttataggttttttcctcatccctttttccaccaatactatcaggaactagattgtaatgtttgtttttggcattatagtgcaaccattggtcatgctcacatatcatgggttgcctacggggtcacttgtaaaaagtttactgggttggtgcggtttatcagacaattaaatgcatatgtcaaagcatactatagttgtccaaatcgttttagttaaaaaattgctgctatgtgtatagcctgacgcgttcagcgctctggtttgtcatttatgagctatattttgaccttgtacacctgcttggtgggtggagcccataatttattgagttaaaagtttattgtttttttggagtgggtatagtcagactggtgatcaaggtatagtttgattcgcacacacaccagttgcccaaatattatgtcagtaaaaacaattgctgctctgatatatcatgatcacctcatgtaactctgtatccttaagagctaccatttggtactgacaaccctcccacggttttgctgctcgtcatatctattcacttgttgtttactttcctctttttatgtttgcagccacctgagacaaagggtcataacctcacatgctgtagcgccgctctagcggcgcaggcttgtagagcgctattagccgtacaccatgagaaattggaggagattggacttgaagcggtagcgtgcatgtctcttgaaagccttgagcagccagacctaatacgatggctcatggacaggactaatcccgtgtcgcgcccggaaaaataccttctccagaacgctagtgtattaatccccgtcctaggaaaagccagggtacaccaaacaaacatgataaaaaaggcacatctttattatatcgataatatttacattattacaaaggcatttcaggcctgacaaacaaaaataaatagcagcggactagtgggcctacggctctatcttcataggcgctcaactggggtataagcgaggactccacccaggacttcttcttcagagcttctcttattgaaggggggggggaagatagagcaagaatgagtacaaccacagtactcagcaagtcacacaaggagatgcatgattaatgcaagggagtacaaggggtaataatataggggttaagttttgcagtaaacagcatttaaaagtcacttagttgcccaaagctattttataaagacgattctagagctacacaatgttattattcaaggccgtgaactcacacgaacctgtcttaacccaagacctacgatgattcagaccgaactggcaaccagacccaggtcccagctcgtcccaagccaacccaggccaaccattctacattttagttgttaagcaggttttaagaattaaaacactaacttgggtacattgctaggcttgcccataaccgagggcgcagctattcgaatagattatactctgatcagaggtgtacatctttacccacaagacacgtcttcctcacgtgtaaccacgtgccacataccaccacggcatacggacggaagacgtgacatagttcccaacccatcatagccataaacaagagtaccgacccaacctcgcctacggccggaacccccgagataggtaggcaggattgagcccctagcagcaaaacaccgaccctgtgccatgacatctagactaccgagccgcaactcgtgtagccttcatttgtcctagagatgtccatcgagtcccgacttcgtccatctccatccgtgtacctttgtttatgaccagactgagccacaaactacgccttacccactagacatgtggaagtacggtagtgctttgcaacagaggcccgagcttaatccttatagtagcctaggtacgactaacaaaacccaaccccgcacctcgagcctagcctaaaaccattttgggggttttgaatagagggggaggtgtgtgtccaattccaacataagctagccattccatattgtccaaatgatatgagaattcccaaagtctaaagttataaaaccacctaatgttgcctaattaatcagcaaagcatctacctagattcatactagtggaaccataaatagagtacccactagttggggttttgtctatcctagggtgaacaaggtaataataacaatagcaataataataaggtcataacaaaggtaaataggcatggctaaataaaaccgtgataacgcgggaatttaagtaaagcgataatgcattaatttaaatcaaaataattttataaactgggattcaatatgctcgaggatgatgtgacttgccttgctcagagacaatggccttccgaaccttcggcgatgaccgcgaaccacgcttcaagaacctccggaacgacagaagctacgcaaagcacacaagcaaagctacaaacctataaagaagcaataacaatacataaaaaggaagcacagggttctttaggttataacaaacattaagagacttgaacgggtcgatttggggttcgtatgaccaagatatgatcatctgaagtttaatgctattatatggagatttgcagattattataattaggctttgcaactataaaacatgcgtaggcgctagcctagaaaagacaggaaggctacgccgttaacatgcagaccccacatgtcaacctaaaggaccacggtagaccgagtacacagagactgtccacgagtcaatggaaacggaccccgtgtgtcaaccgaagcgagtggccgacaaacggactccactagacacgtggaaaccacgcggctaccgagcgggcacactaacacggtcaccacacgcacaagcgaacgactaccgacaccagtacacgggtaccggggtcgacaaccgcacaacgggtacggggcgacaccgaaaggacgaggatggtgcagcgaaggagagatccttaccaccacgcaacgaggtgtgagaacgacgacgacgaacgggcgcggcagagacggacgggaacgacggagacgaacggcgaggggacgacttcggcggcgatccttggacgaaggcgagacgcggccggtgcaacgcttgacgacgcggagctgaggacgaagacgaagaaggagctgcagcggctcactttacggacgcggacgatggacgagaacgacttgacggagggacgaacgccacgacgatgaggacgatgaccgggaccggcgagaaggcgacgagggcagccggcagcagctgcacggagacgaggacggcttggaacatgccgctgtgatgacgatgacggtggcggcgcagcgagacgacgagccgggcgaccgacgggaggtcgatgacgaggacgaacggtgacgatgacgacggacagcagagcggttcggatggaggggaggtgaggccgagggcaaccttgacgcgtccgttcccgatgattgggggcacaaatcaaggggggaatatgggggaaagagagaggaatcaatgggtattaattcccactaattaattttggaatccaatgatttaatcacacggatttgagggaggaaaggagctatgttttcgggagagagaagg

SEQ ID NO: 21481 - DNA, 16740 bp, Oryza sativa
gtgattgctttggtgagttataaacactaaagtagatagtaattgcttagacgttttgtttaggtaattgttatccagtaattgatgcgtatcccacagtacgttgaggtgggtgtagaggtggtgacagccctcgagatcactaaagtcttccttgtccgggtacgtagtagagcgacatctgggaacagcgggttgccagtgcctgaagtactgcattaggattaaaaataagctttccctagaaacagtttctcactagtaaatcctctctatcctggcctatcaattgcttggtgtccttggatgaaccggaggaagtctgatcacacacgttcccttggattcgatacccttggaatactccgtaagggaagtgctacatcggtatatccgtgcgcttgcggattttatctgtaaccgtatcaattaccaacaagcatttctggcaccgttgccagggaacggttgctgatcatttccaaacccagttcatcctcatatcctttttcattttttttattctaccttcacccctgctatcctagagaagtattcctatcaaactcttctcgaccatcgtgcaacctctgtttgagctgtctgctcctcggggcgaattctatgagccacctccttcatcggagcccatttatacaactggctatgaaattcgtcccgagctaattagtatggttagggaaaatcctttttctggttttgatctaaaaaatccctaccatcatctgcgagactttgaacaagtctgctcatgccataagattcgtggcatgagacaagaaactgtgcggtggaaattgtttccgttctctcttcaagagagagcaaagaaatagtacacctctaccgttggatgtgtaaacggtagctaggaaaagctgcgagatagattctgtcttgccttcttcccagttactcgtattactgcccttcgagtagaaattctcaatttcaagcagatcgaaaacgagtcaattggtgcagcttggtccagattcactaatttagtacagtccggaccaaccctgtccttacctgagtatgtgcttctccaacatttccatacgggtttggataaggagtctgcattctatctggacataaccgctagaggatcattcatgcataaaacgccgtcagaaggaaaaacgatcttggatcgcattctagaaaatacttccttcatgacgcagtccaatgaaccccagctggaggcatccgtgtccaagatagaggaacctctaacgatcgagccatttgctgaaccgtccacttctgctagctcgattgatgagaaggttcctgagcagccatccgtcaagaatgaagaaattcagactccggattgtgccacaattatgttcagggacggttttgacgtagactacggcaataccctgaactattttagcaagaggaaaccacccgttcctttgtcacctcccgatcctatggaactcgggttcctacgagaaactgtccgggagttgacatccataatgagcgacgaatggcaaagggaggcagagctttcatccgaagtaatccggataaataccgctccccgaatcattccttgtcacctagaagggaacgatgtcggtattctctacagtccaactatcggggccaacctcatctctgtgtcctttgcattcgcttatttaagcgataaggcagtgaccccgacaaacaaattcttcaagcatccgaatagaaatattatcgaaggatttgggattgtgcaagatgtgcctgtcttctttgaagacagggaggcgatcttggatttccatgtctttgaaatccaagactttgatatcctaatcgggctgcccattgagcaacttctcatcaacacatcccgattaggtagcctcaaaataacactgggagagaatgaattctcaattccattctcgcgggcaaggatcaccttgaccgaccctctcccagaaactgagtcagcggaagaggttaccgcagttcctcctcatgagtctaccaaggcccttctagaagatgaggtccccgacttcatcaaggaagaagcagatcccagtgagactctcgacctgccaatcatggaaccaccacctcgacctccgctagagcttaaacctctacctccaggcctacgatatgccttcctacacaatgacagagaggctcctgtcataatcagtgacaagctctcggaagacgagactcaacgtcttctcaccgtgttagaaaagcatcgttctattcttggctactcgcttcaggaccttagggggattaatcccgcgctttgcacccatcgtattcctattgacctcgagagtactccctctagggaacctcaacgacggctcaataatgcaatgcgagaggttgtaaagaaagaggtcttgaaactcctgcatgccgggattatctatcccgtaccatacagtgagtgggttagcaaagttcaggttatgccaaagaagggaggaatgacggtcgttgcaaattctcaaaatgaactaattccgcaacgaaccgtaaccggatggaggatgtgtatcgattacaggaaactcaacaaggctacaaaaaaggatcatttcctgctacccttcaatgatgaaatgttggaatggctggcaaatcattccttcttctgtttcctcgatgggtattccggatatcatcaaattcccatccatccggaggactagagtgagactatattcacatgtccgtatggcacctatgcgtatcgtaggatgtcctttggactatgcaacgctcctgcacctttccaaaggtgtatgatgtctattttctcggacatgatcgaggatatcatggaagtcttcatggatgacttctcagtttatggaaagactttcggtcattgtctgcagaatctagacaaagtcttacaacgatgccaagaaaaggacctagtacttaattgggaaaagtgccattttatggtacgtgaagggataattcttgggcatcgagtgtccgaacgaggaagcgaagttgatcgtgctaaaatcgatgtgatagatcagcttcctcctctcgtgaacatcaaaggaatccacagcttcttgggtcatgccggcttttatagaaggttcattaaggacttttctataattgccagacctctgacaaatttgctagccaaggatgcgccttttgagttcgatgacgcgtgcctaaaatcttttgaaattctcaaaaaggcacttgtttttgctccaatcattcaacctcctgattggaccctacccttcgagattatgtgtgatgcaagtgactttgctgttgctgcggtcttgggctaaaccaaggataaaaggacacatgcaatctgttatgctagcaaaattctaaccagagcccagttgaattacgcaactacagaaaaagagctgctcacggttgtttttgctatcgacaagtttagatcttacttagtaggagccaaggtgataatttatactgatcatgctgctttgaaatacctgctcactaagaaagatgctaaacctcgtctcttaagaaggattttgctgctccaagaatttgacttagaaattaaagataaaaagggagtagaaaattctgtagcagatcatttgtccaagctgcagatcactaacatgtaggaacagccaatcaatgatttcttaagaaatgatatgctgatgacggttcgcgactccaacccgtggtatgccaatatagtgaactacatggtatctaagtacataccaccaggggaaaatcaacgaaaactaaagtatgaaagtcgccgtcacatatgggatgagccatacctatatcgggtgttctccgatggcctactacgaagatgtgtgccaactgaagaaggacttaagatcatagaacgatgccatgcctcaccctatggtggccattacggtgcattccgcacccaggccaagatttggcaaaatggtttcttctagccaacaatgtacgaagattcaaaagaattcatcagaaggtgcacaagctgccagaggcaaggaggaatcactactcgcgatgcaatgccccttacatacaatttacaagtcgagatattcgatgtttggggtatagacttcatgggacctttccctaagtctcgcaactgcgagtacattctggtggcagtcgactatgtctccaagtgggttgaggctatgccgtgcagcgccgcggaagcgaggcatgccaagaagatgttcacagaattcatcttcccaagatttggtacccctagaatggtcataagtgacggaggttctcacttcattgacaaaaccttccgagacctcctacgagaaatgggagccaaacacaatgtggccactccttaccacccacagaccagtggacaagcagaaacatcaaacaaacaaatcaagaatattctgcaaaagacggtcaacaaaatgggaacaggatggatggacagattgccggacgcactgtgggcatatcggacagcatacaagacacccattggaatgtccccatatcagatagtctacgggaagccatgtcgactccccgtagaacttgagcacagagcatactgggccatcaggaattggaacatggattttgagggagcaggagaatggagaaaaatgcagatcgctgaacttgaggaatggagagaaaaggcttaccacaacgcaaagatatacaaagaaaggacgaagcgctggcatgaaaaaaggataaagatcaagaaatttaagccaggagacaaagtactgatgttcaactccagggttaagcttttcggccacggaaaattgcgcagcaaatgggaaggaccgttcgatgtcatcaacacctcttcacacggggcaatcacactctgcgacgacttaggtaacatatttaaggtaaacggtcaacgtttaaggattttccttgagccaaataaaactttagataaagaagtggacgttattgaattaattaattatgaaccatgatgatctcatctaacgcatgctcaaaaccctgtatagttgtcatttttgtgcttagaataggttttagaggacctagggaaaaattagcggccagccggacccaccagggtggttcggccgagccatggcggttcccaatcggtcccaatttcgaatgatggtctcccccgctcgtccttagtccgtttagatgcgcgtttgaaggtacaacgttcggatcacaccaaaacactccttcttcctcctttcctccacctttgcacactctcctctcctattcaatccaattccttgaatttccactcatatccaccaatggctagcaaattcctaatcccattcattggctcttcctccaattccatttacgacctcaccggagagccgaaaccggcgaatcaattgatcccgatggaacactacaccatggaaggggtaaacgttgtatgggctcaaccccttgcagctgtgtcaggctcccttgcgaatttggagccgatcatcgagctccctggttcggccgaaccaggggttcggccgaaccaggggttcggccgaacccttctcggccccaatcggcccccgttcagcagcgcgatccctctccccttgccatgttacaagaacaaaaatccagggggattcgcctgcacaacggccgactacgggagagctcggcttgttaaaggcacgatgccttttccaagatgacgggaaggccgcaccgcctcccgccgagcgctttgtgggcaccctcttcaccaaggcaggggatgaggtgctccacaagtacaccacacccaccgctactccatccaccccaaagggggagcgtttccgcattcagggagtacgaactcccggcggtgggtatggtaagggtttactccggcctttaatggcatcggagaaggagggggcagcggagtcccgtagccctccacctatcaaggtgaagcttcatttgacgccccctccaattgtgagggctcctggccaattccaagaggatgaggtgaaatcgccggagccctcaatccacaagctcgccgctcaagtgaagaaactctgcaaggagaacatagagcttagggatcgcaatgcggagctaggggtagaactcgctaaaattagaaataattttgatacccgtagtcgcggtttgtgcgctaagatcaagcgtgcattcatagtgatggaaaaggaaaataagtattatgctaattagatgtttcctttcccatgaataaaatagcagtaggtgcttggttttatttttccaatcatgtaagcacttgctacaaataatgtggctcattggtgttaaccccaatgtttgccaaggtttttttttgttttatatttaataaagtttaggtttttaataagtgtgggggagatatcccagcttctgacgtgtatacactgaaaattgctgaatatctgaacacctggaaggcattgaactctacagaaaattgcaaaggtattgggcaccatagtggttcggctgaaccaccaggttcggccgaactagtgttggccccaatacctcctagttttcacaggtaagcaggtgagcatgtcttgtatctgtatatctccaccatggtatagtactagagctgaaaattgagaaacaattggttcaagcataagtaagagataaaatttccaactaatgaaattcttcatgtgattgatcttgtatattcattattctcagctgaactttgcttgtgaacaaccatccatgttttgggaaccttatacatctaagtaattgctttatgtgagatgattaagatgaaaggaatccttgcaacatggttatgactcttgggaatttattttcaaaaataaaattattttaagaaggctcaatcctccaattgactttaccttatacctaccaaggccatatgcaagtacattaatgatcaaccttatcatgcatatgactgcttgacattatattgagctttgtcaaaattgtgtgacttgtgttaaatatctttcatactctcatgatcaaggggtcactatcatttccactttccagttccacatataaaaaaaattggctaagcttctacactggaagttggctttccacaaaaatatccattcaaataaactcctacattggactatgctttcttctcctggaaaagttcttggcaaaaaaagaatgacaaaagggggaaaggcatggctatgaaaaaaaagagaaaagaaaaaaaagaaggaaataaaatttgctctcaaaacattgagcaaagaaaatatagccatgccccctccacaatcatgccaagaaaaccaatttggagagaaagtataggaaaaaggagaatcatttctttattccatcattccacaacatatttcacttttccattttcaaccacaaataaagatccttgatctaggagtatgattgatgatcttcttgagtccatatttttggctttgcaatatatatgatgcaagtatgtcaccagtttatccctaccaagctccacatatcagccttagaataggggtaaattctggcacactttgccttggtgaggatccaaaagaaaatatacatctttgagagacaagagagaaaagtcaatataaggaaaagagctagtttgcgaaaattcataaaaatcccatgagtatggcagagaagcaagaaggactggaatcaagattgttccatttatcaattactcaagatggtaagatagccattgatatagttcacaagtgcaggtatgggtgtgaatgatttatatgcttaattcatatcatgaagaaattcattctacactaacctttactcagggacgagcaaagggctaagtgtgggggttttgttggtggctattaaatgccgattctataccgccaacatttgcataaagtacagataataaagcatccaacatagagataggtgcttaatctcacatattccataagtgttggtgtatatttttatgcagaagataaaccctgaagttggaaggaaaatcagactaaagtgaggagaattatgtatccatacaaagaggggtcatgaacttcatcgaaacatcagtaaatcaacccaaaactccaagaaatggatagaggaaggtccagggagtccaccgaccaaaggccaggccaggaaggcctagcccaggttcggccgaaccccctggttcagccgaaccctggtgatcgccgttgatcccaggttttggcatggacatcccagatcactccctgatggcggttgcggggcagttcggacatttccccatctcacaaccgtcataactgccctataaaaggacctcacttcattcactctcacacacacttccaagcttgagctgaattataagaggctctattgtactatattgtatactagaataggaagagagtagagtagaaggagtcggaagaattctggagttgtcggtaatcttctcctatttcttttattctgtttattactctgaattcattataatattcttcttgagtaatttagatttatcttgtgagaattatctcttggttagttcctaaatagcatacaggattattgttcactataatcaactaaaatatagtgattgctttggtgagttataaacactaaagtagatagtaattgcttagacgttttgtttaggtaattgttatccagtaattgctgcgtatcccacagtacgttgaggtgggtgtagaggtggtgacagccctcgagatcactgaagtcctccctgtccgggtacgtagtagagcgacatctgggaacagcgggttgccagtgcctgaagtattgcgttaggattaaaattaagctttccctagacaccatttctcactagtaaatcctctctatcctagcctatcaattgcttggtgtccttggatgaaccggaggaagtctgatcacacacgttcccttggattcgatacccttggaatactccataggggaagtgctacatcggtatatccgtgcgcttgcggattttatctgtaaccttattaattaccaacaatcccccctcctgaccgatgatatgatgggattaaaaaagggttacaaaatcatacgtgttattactcatacgtatgcacgggtctaaagctaaaaaaacaactcaataagcacaacccacccaataaatcacgcagtaatataacgcggctaccgtacataagtaaatatttaactctaattgccatcatagcatcatctataatatatctttattcaaatctacacctcgaaggtctcatgtcacatggtttaactacaatgtagttaatttataacttgttacattgtagcaacgtccaatatcgccacattgtttgttacagaacatttcattcggtaccaaaaaaaaaataaacgggctgagcattaatcggacaagccgttatcacacaattaaccccacgatccgtttttttttaaaaaaaaaacccaaaaaactgggcgtgcaacacatgtagatccatcattatcgccagtgcttacgtccaaggcgtaactccacacagaaagcaaaaaaaaaaaagaatcagcaaccaagctagcttcaagttagtgggggctctcggagcacatccttccagtcactccttcatcttccttggctgctcatggcatcgccggagatcactagctccacgtcgttttgtccgccactcactcctcgctcatcaatgggttgccctccggcgagctctccacaccaacaatgtaccccaacgcgccaagcaggagatgctccctctcaatggatgccgccatgcttggatgataacgacattgcaacccccacgccgaatagggtctacaaccatgtaagttccactccttcaatcccactgtgttctatggtgaatattatcgacgtctagtttgcgatagtgatgcaccaaaagcacattatttcgagccacgattattttttttcgttgctatcgccgtgtgacgatactaactactcccactaaaaatataccattttttatattttatatatggtttgccaatatttcatgaatcacattcaccgattgattcttttaacgacaagcaattctcattgcattcaatagttaaaaactaactcaactcccattcctagaacaactaggttcaacaaacatctatgcacgataacttcgatctataagtaattttatatctctaaacctgacactcttgctacgtaattttggatgttttatatcactaccttcatgaatacgaaagttatttttaaactatcacaatgatcccgaacgcacgtctctgttttattaaccgaattaatcccatacctaaggaatacactagcaactggatacaagccattttttaactggcaatccacgtgctatactcagcagccataataattttagaaatggtatctaaactttcataatgtttccagtatttcatcgataatttattaacaaaacttatctttgctatataacagggtcctagcgtgccaccgcatatggtgcccaccgaaggcatggctttccctacatacgacaacgcatacaacttctaccagaggtatgcatgtcacgctggatttgacatcaagaagagccgtacgcacaaagcgtttcgcgaggtgtgttgtacgagggagggcaagcacgtgtcgaaggtcaccgatggtgatagacaacggaggagaccgtccaagaaaatggggtgcaaggcttttatgaagctgaggcacaactacgacggtggtgcgctctcatcggtggtgtatgatgtggtcgagctacagcacaaccaccctctaacgccatccccttcggcggtaaagcacatgcgtgcacataagaaccgcgacgacacagttatgcaatttgtggacactatgcaagaaagtcacgtgccgcaaagttgtatcatgggcgttctatctgatctccatggaggccaagacaatatccctttcacttcacgcgacgttgagaacaggtgatttttttaaattattccgtttcttggctttgtgatgttgctttcatgaaagtttcttttcgtgctttcttgcacgaagacacaaatgtggattgtaattaggacgttcccatctgaccgatgcaggaaagtagccaatgtccgaaaggaaaatgcgaatgacatcaacaagttgttggagtttttcaacgagtgcacgttgcaaaaccctaagttctactgggacgcccagcttgatgaaaatggtgtcattaagaacttgttttggagtcatgctagcagccaggttgaatttgctgactttggagatgcggtaacgtttgacaccacatacaaaactaatatttacgaaatgccacttgcaatgtttgttggtgcaaaccaccatatgcagagcacactcttcggatgtgccttgctcagagacgaaaaggtgcagtcatttgagtggttattcaacaccttcaacaagtacatggctaatttcccggctccgcgctgcatcctaacaggcaagtctatctacaaaaaactccctattgtcatccaccattaattttttccgtgtctccaatttatctacacttcctgtacgattgttttactgccatttacatcatttttttttcagatcaagatcctgctatggcagtcgctgtcgggcggtgcttccctgggataatacactgactctgtaggtggcatatcctcaaccgccactctgacccattgaacaccatttttgcacgggacgctcaaattgaaccagacatgatgttgtgcatcaatcaaacctacacgccttatgagtttgaaacatcatgggatcaattcataaagagttatgatttggagggctgtcccatcatgaaagctttatatgatatcagggaaaagtgggtgcctgcgttcttcaagaaggaatactgcaggaggatgacgtcgacgcagcggagcgagagcatgaacaagttggtgaagcacaagtttgctgaccaccaaaccgcgctgcaccgttttgctcggagaatgttggaggttataactgacaggaaggagaaggaggctgccgagacaagagcatgctcggttagtgatatttttactgggggaaacggtctgacatcactcctataattctactaaattttaactcacaccaactaattatatttctttttgtacatggaaagccaatgttggctgtacggtggccatctgttatacagatgtcgagactttacaccagggcggctttcagattgttcgaggaggtgcttcaggacagcactgacttcaggatcacacaagacgacaatttccgcaacgggtgggtagttgtcgacgttcgatgtcgcaatttcggtatttgcatagtatgggcatcgttggtacaaggatatatgcgagactaaggtaaaacagatagggacgaggatttttatacaggttcgggcccctgaattgtcaggtaatagccctacatactgttggccgaagcaggtcgttgctcttattcatcataatcacaccagtacaatatttggggtagcctatctaactgttgtcaacttagcagactgaagtatcatcacgtagtcgacaacagggtagtcttcctcctcgaatccatgcccggcgagatcaaagacagcgctagattcctctctttggttccgcaggtaccatatggggttttcctaggcttatctctgaaatcgatatccggcgtcttgtcttggcatatgttggcttgtatgttgatcttgtttattgatctattgttccgtgtcccctctcctcctagggggccttgtatttatacccctaggtgtccccttgtccaagtagaactagggaaaccaatatggatacaatccgagtagtccttatcgtttccatgtagaactctagtcatccttccttatgcggaactcctcctatatccgaaggttgtttccgtataagacatggtatgtggtgggtcctgccgagatttagtcaactactgctaggtatgtggtatccataaccctgacagcagtgtcacacaccaaacattccgaaaaacacaactagtgtcagaagcaattcaaggttattgcagatgtcgatgaaggggtatttacatgcaagtgcaaacagtgggagcatacaggtatttttatagtataaactcgatatcgatgttttatgtacgtttaacattttcagcattccgttatcacacatcgcaatactttggtttaaatgctctctcctttttttggatgtaatttaggcatgttctgcacacacatgctccgggcatttgttcatgtacaagttgagaagatacccgctgtctacatcctaaagaggtacacaatgaaagcgaagagcaacgtgccctttgataggcgggatcgagagacaactagaccagatggggttcaagaaagttacaggacaaatatgatgatgattgaagcgtttggagttgctagggcggcgtgcaaattgaaggtagcgtttgacagggctatggctgttctgaagggattgcgtagtcaagtagaggagataccgcgtgactctactgcgactgttgacaccaatacgcaagatggcattgctggacgagttcaaaacgccgaaataagcagggagcccccctcccccccccccaaagtcaagaataaaaggaaggacccatgacccggatgaggaagttcaacttggagccaagggcaaaaagttgtgcacacgggaatgtgggtggtgccatctgagggatgggcattacgcaaatacatgcccgacaaacccagcaaatttcgacaaggtgatgaaggctgctaataggggtaagggaaagaggggcaggccacgcggatccggcaggggtagaggacgtggtaccaatgttggatgcaaagttagtactgcagtccctagaacaacaaggagatcaagcaggaagggtccatcactgcgaagatgtttagacgacgagtgagctgaagatgcagctgaatctgctgggtatacagatgacgatcaaacaaatgcagacgatgatttcgggagttatgaaaacggttccgcacgattacagtatagacactccaattttatataacacagtctatatgatacttgtctttttttttcatctatgaatctgtattttaaattcaacagtgactagttccatccttatttaattatatccattctcactatccatcgtcgtatgttcagtttgatcaatgtggttctagaaactaaaattaaaaacccatagcgtctttgcgcacgagcgacaccaaaaccgaagttatttttcaacttacatacttgatcaaatcactcgagttcatccaataagagaacaagttaaattttaactcctttcagattttttcaataccatgttgaacacacactcatatatggactatgtgagttaaagtataactggcgtaccacgactgaccatatgtgatatttctaactcacccactgaatcaactcagccaaaccaacaaacatatcatgactaaacgattcattctttattatcttttaaaaagcggcagacataacaccaacatctaaaaactttaacccttttggactatgggtaatgtattcataaaaacatatggtctatcatatgtaatggtttgtggcaaaaattaaatagacatatcaaaactaatcacgtttatggcgcttgaaccgggttactggtgactgagcatctcttggcggggtctggtcatatcgaaagttgtaaatgtcctcttgtataatatcaaggtcaccgccgtcgtcgatgaaagctgggtgcagaataatcttgttgttggggtcttccggcggatttagatcgtcaacgtcagaagggggggaagggcatagggtagacatgtaccccaagtcctcgcgtagatcatgccatcatcttccatcgatggcgacagcgggtaagggggtggcgacagtggaggagggcttgtcaccccaaactcttcggggagatcactctcatgctcatcctgttgcagcgtggcatcggtggtggggttgtgagtgggatcgacaaaatgtgtctttgtggattcggtctcttgtttatcacccatggttgagttggctgcgtaatacaaatgatgagccgggcagtttatattggggaaactgacaggatggttgattcccacatatcagggcaaacaatctcagcgattttgtagcgattcttgtttgcatgcatgcgcgatatatctggagtaatgtgcgcatggataaacaaccataatgccaccacagcatagcgacgtaaagttattaaataactatatttaaatcatgtcgtgtaaagttattaaataacaatatgtaaatcatgtcgtgtaaaaaaatcctctgatacgtctttcagcatctataggctcattccagttattttttaactttgccaacgtttacttaaattctccccatggccctatagtactcccgaaacaaagacaaatttttaactccttacatgcgacatcgaaaggcaaaacaattatctcaatcagttaaactataacttctcacacacggaacgtcttcatcaccgatcggtctatgcaagttaattttaaactatttgacctcatatgcacaatcaaccaccaccgattttaacataaacatgactctgtcgtacgggtggaccacggtaaaaatttaacttgttatctgcaacatcttaactcatcaccaatatttaaaacagttaaatttttactatcacattcgctctccctttgacatgcgaactgcaggtatcgtttgcgccacaatttccgtcagttaatttttaactctctaataggttggtttggttttggtgggctgacattcctcatttgtgtgtggcgccatttaaaccgtggcgcgaagcgcatgtgagcgccactgtgtatatatatatatatgtgtgtctatatatagacatactataccgcatcctaataactaaaacactccccctcacactagggatgaaaacggagcggatagtttccgtccgctccggacaaaaacggatacggataactttcggatcggataattctcggatagttcggatacagatacgaatacggatattttctcccggatacaaatacgaatatggtaccagggtttccgtcggatacggataataattcggatatccggtgaacagtgctattcggatatccgcaggacccatgagacataccccatttctttttaactctataaccttcaatatacctttatagattttaatagtagtttatctctaacactagtccatactattaatattatttaaattttaaaaaatatttataaattatacctcattttatataaaatgagctaattatatatgttgatatttgtttctattagaagttgagttggttttcgtgttccgagaaaaatttatttccgtattcgtgtccgatcatattcgattcttattcgtattcgagataatccgtatttgttttcgtattcgagctatccgtattcgttttcgtatccggtaaaaaaatatgaaaacgaatatggtataaacattatccgtccatatccgctccgttttcatccctacctcacacctcacccccaacccccttcccacccacccaccct

SEQ ID NO: 21482 - DNA, 3017 bp, Oryza sativa
ggcggcggcggtttggggatgaggaggagcggcgaggaggaggagcagcggcgtgacggatccggcgatcgctccgcgtggactgcggcggcggcggatcggggatgaggaggagcagcgacgaggagcagcagcgtggttcggggatgaggaggagcggtgacgaggaggagcagcggtggtggaggatgagggaggcgagggagaagaggcttcgtgctcctcctcgcgttcgcccgcatctggctcctccctagggtcggagcactgcagcggaggtggaggatggaggaggatcagggacgcggcgatggtttgttccctcttcacttatgcttagtcccctgctctgccgatggtggtggaggtcctggatagggcggatatgacggaatcgacagcggcggagaggaggccacatcccggcgtccggttcacctcctccatgcggtggctggtgcaatccgagccatcgaggtgggcgacgatgccatcaaaggggtgggaagactggtcgttgccggctccatatccacaccagtgatgcggcggaccagatccaggtgcttcttgcttcttttccccacgaagagagacaaagagggagaagaaagggatgccagtgatgctgcaatgcaacgtctcctctgtgcgcctggcatcaaccccatcgatctgatcatcttctttctcctgttcgtcttcgttttctttccttcttttctctgacacgcccattgattttgcaaagatttcactgtggtgatgcctgctgagtactgttctcataatgcattcagacggttggtggtgctcccctccaaccgagtgaccgtcagcaggagagggcggtggcatcctgcggtggctggagcgacgactggtgctgctccactcccccaagttgagacctattggaggagcaggcggcagcttccggcggtggccaggcgtaggcatttgatcagagattcataatgtacacaacagtgcatcagatctttgttgggatacatacatctgttttgcattccgttttcattgatttgcaggtttcctgatcagagcagtagaacaccacctgcaacatgcacatactctggtgtttctctgcattggctatttttgccaacaagatcatcaacaccccaccctccaggtacaaatatgacccttcacatgctttgatctctctgggtgcctgcggtatgtttttcacatgcatccaaatatgttggtaactaggatttatttttggggatttttttcctcctgaatagagcagagcagctcgactgcctcttgtattgttttcattagtcttctgagaacatttagttgatatgctagcagtttctgaaattttctacctgataagtttctgaaattttgtagtagtagttgatatcttattagcttctgaaatttcgtagttcagcacaacacctagctgataggctaaacagtcctctgaatttttttaagaatacttctttgaatggctgaaagatggatggagaatcttcattgagagagatgtttttcagagctctgaatgtcattttgtccaagtgaagccattttaaaattttcattttggttggctggacagtttgatactctgttggcatcgaagctctgaaatattgtgaaagttgtggggtttggtgaggtcgaaggataacagctttggtgtaatttacaagcgcatacaaaaaacttactaacaactgcattaaggctgcgttctttcaggggagataggggggattgtccctcgttttccgcgcgcacgcttttcaaactactatacgttgcgtttttcgcaaaaattttctataggaaagttgctttaaaaaatcatattaatccattttttaagtttaaaatagttaatactcaattaatcatgtgctaatggctcacctcgttttgcatatcttcccaatcttctctatttccttctcctcaaacacagcctaagttcacaggtatattaacatattgtgtgcatggaaccatccactgaaaatatagtgccagatattgctgggaagcagtgcaaccagtccatagattagctgcacttgctgatcaggattatgaagcctaaccctgctgcttgcaagaatgatttcaagtggaatctctttatccagtttagaaatcagaattgaagaggtgcttaaattcatgctggagatgacaaatgcgtaatttttctatccatcaacacggcttgcccctctgctcgccgctggggaagattgatgcaccgacgaagtggcctctgccgactgctccctcaacaccagatccaacacgtaccaagcagtcacgccgacacattgtggatttagcttcatgtttccttctcttttttttttttgcctgtggatgtgtaattttttttacccatacagtgacatgttgatcatttactcctaatttggtgaaaatgttgatcgtttactcctaatttggtttctcctgagtgatccagtgaaaaatatacctgactaaaagtaaaagtattacttcacgtgaaaaatacacttgagtaaaagtattactacgttatgtggcagtatggttaaaatgtaaattttgtgccatttgagtttagtcgaagagtaaatctattactacatttgcaactctacctgattatacagaagtaatctatttactaagagaagatgcctctacaatctgtgtaagaagaatgagcagtaccatttatagaaccagtagtaatttttttactaagagaagatgcctgtgtaatatgtgcaagaagaagaacgagcagtaccctatatagaaccagtagtaatttttttactgatatgatatttttggggtacttcattgtaaagggaaaagcattgtctaccataaacccaattagtaaatttgttactcaaggaaacattgtatgtgtgggaaaaaaaactaaaaaaaagaaaaaagaggaaacgaacggtagttactgtgtgcgggcgaaaaaaagaaaa

SEQ ID NO: 21483 - DNA, 512 bp, Oryza sativa
taataaattgttctatcgtcatttctttaccggtcaccaacggctcgatctcctggtttggttgctctccaagctgagggactggtttggactttccagaagatgctttcttcagcgttcgctcatagtccgatagcttaatggcctccttgacagatgcagacatacccctgaagaagttcctgacactggggtctataggaatcttcttttctggacttcgaggcttgaattgtctcttgacttctgatgcaacgtaagcgtcaagctcctcttgcgtgcaatcgtaccccgggtccttgttcttggcggcgtcaactttcgccttctttgttgcccttgtgtgggcaggcggtggagttgggggggcccttgactttgaaggtgccggaagaggagcttgcgggggagtaggtgtaggagcacgaggaggagtcggtgcaggatcctgaggaggagtcgatgctggagcctgaggtggagacggtgctggcggagcatgaggaggagac

SEQ ID NO: 21484 - DNA, 2100 bp, Oryza sativa
  unsure (1)..(2100): unsure at all n locations
ttacttcaaatggcataccaaaattacctttcttttgttctaagttacttctataatatatgtaaattacttttagactttactgaatctacttttatatgtttaagaagtagcttagtgaaatctaaaagtaatttagacatatcataaaagtaatttatgatttttcatcaaaatataattatatgagatcttgttgtaaagatttaattgttaagaacacaacagtgtaatcggattacaaatcagatgagtaatttaagagaaaattttatttaaagcatagatgataagaatatttttcctacttatttaatggactagtactgtaaaagacatgcacgttgacataaaaggttggtacaaatccatgccaacctagccttaaactctggcttagatttctctcacactgcaagtggaccgtcgctgattagtactaaaccgagagcgctctcggtttagattttacgtaattttaaccattatatctctatcttaaaaaataaatctggtgtccccactttaaaaaaaattgccgtgtttgctccaacgaaaaaaaatcaggcagggtatttacgttctattctttttttccggtggcgtaaatacgttactacgtattatttgtttttctccctttcttggcaaaaacaaacagtactactacgcatatcgtacgtacacgtaccgacgtacgggagtttaggaggaattgttaatcgatataaaatcacatgttaccgatttaagtgaaaatctattattagatttttttctcataatttttaatatttcttttagtttagagatatgacacgtggtgacctaagatcgtttacacgagtgccatgtgacgacttaagagcatttatatcggaaagtaaacgtcgcaatgctcgaccaatatccacaagaaacagaggacaatctcgtccatctcctgaaggcgcagcattacaagacgttcatactgttgccatacaacacagagttagtttaattttactgtcttcctacataccaaatttcattcccgtacgaacttgctaagtgtttcatatgtaatgcatcccacgcacattgcagattccactgggtgcttttactcttcgacctggaggcctgcaccgtcaacgtatatgactcaatggataaaaaagagtctacgtttgacaaggttttcgaacttatagacaggtaccgtcataagttcctttgttaattaagaaaatcttgttatgttaattgctactacaaatcatagctttaaactccatgtagggcttggtatcggttccgtcatttggtccgcggcaaatggagagaaagacttaggcggaagttcaaatttcctgtgagtaaacatgctctacatttatatttctccgattcaaatacatacaagtgtatattaattagatctctcgttgtttgtcatttatttgtagtgcgcaaagcaaaagcagggaactaacttgtgcggctattacgtgtgcgagtattgccactgccttgcagaccaaatcatcaccacaagagagctcgatgtacgtacaaataaattcaaaatttcattacgtagcgatttcttgtttaattactaatcaatttcatacattcatatagtttattcgcatgagggataacctgaccacacacaaggaatttatcgcggcggttcaagaacaactcatgggattcatcaacgaagaaatccttgatcccaagggtgaattctactacgacggaaacacaattcaccggtccttagcttctgagctagcagcgagtactactacgtcgaaatcgtagctagctaggacatataatggattgtaattaatacatgactacatatgtttctatacgcatgtgtacacattttctataatgtaaatatattttggtcatatatatatctatatacatatgcatnggcataacatatatatgtataaatacatatatattatgcatgtttatacatataatataatataatatatatatatacatatatatatgtatgcatatatatgtattgaaacatatatatgcatggtttatatatatatatatatatatatatatatatat

SEQ ID NO: 21485 - DNA, 1120 bp, Oryza sativa
ccccccttaggatagtgtatgacattagtagtgacgacgaaccatgttcgtcgaatcgttccttagggagtggggattgctttgggggtggagacgtaatttatttgtaagctaggctgtaaagccggtgctatttgtacttgtatcatgttgtatgattgcatcctccgattatttttcgaagttaataaagatgtgttttatttccttttcgctgtttttcgcattgtcacctttcgtgctttcgttaggtcgaactgtgtcggcccctttgcgtatactagcgaaataggtatgctgacttttcagctttcgtctttcgttttcggtctgtggtattccgagctgaaggaagcgcttatgttttcacatggatcgagtgtaacggtgttggttagttatttcccgaaacaagctatcgcggtttcaacgcttggtgagcaatgcttcggccgatttgtttcgcccccccccggcgttttcgctgatcaggcgtttgccttggggtttttccacgaattatcattcacacaagtgcgaaagacacaaggcttttatactggttcgggcctccaaggtggataatagccctacatccagtttctttttccttttttcattttcctctttttttttgtatttttgtgccgaaaggcttacataatgagagatgccggaaggcctatacaatagtatgtacattttttacaagttggcgatttgggtgccacccgttctagacatagaaacgcttaagggaagcagcgttccaggaatggtcgaactctttgccttccagcgttgctaggcgaaaggagcctatcctggacctatgtttgatgaggtatggcccttcctacttcaattcaagcttcccgaccgccaccgggttcgccttcttccttaggacgagatggctaagcaatagctctgtcggtcgaacctttttgttgtaagttgccgaagtgcttgtggcgtatttgcgcatgtgttccaatgcttcgactctcaccccctctaggagttcgagcgacacctcgcgcccatcttcgcctccagagaacatcaccttggtgaattagcccctagctcagttggggtcattgcttcatcgccatag

SEQ ID NO: 21486 - DNA, 1416 bp, Oryza sativa
tgtgcaccacacagcccttggtgtatttctttcgccatttcttctccttcggcaaaggagatgcatcgaagcaagggttggagcaccccggagcgatacagctgccctgagaccagcttgtattttgtggctctgagctgtaaacgcttcgcttctgcttcatcttgtgggagctagcaattcttgaggtacttgatgtcgcgaccgggaaaattgccttttcccgaacgctagtgtattaatccccgtcccaggaaaagccggggtacaccatacaaacatgatataaaagacacatctttattatatcgataatatttacattattacaaaggcacttaaggcctaacaatcaaaaataaacagcagcggactagcgggcctacggctccatcttcacaggcgctcaactggggtataagccaggactcaacctaagacttcttctccaaagcttctcttactgaagggggaaaagattgagcaagaatgagtacaaccacagtactcagcaagccacaccggcagatgcatgattaatgcaagggggtacaaggggtaataatataggggttaagctttgcagaaaacagcatttaaaagtcacttagttgcccaaagccattttataagacgatcctagagttacacagtgttattaatcaaggccgtgaaccctcacgaacctgccttaacccaaggcctacgatgattcagaccgaactggcaacccgaccctgggtcccagctcgtcccaagccaacccaggccaaccattccacattttagttgttaagcaaattttaagaatttgaaacactgacttgggtacattgctcggcttgcccataaccgagggcgcggctattcgaatagattatactctgatcagaggtgtacatctttacccacaagacacatcttcctcacgtgtaaccacgtgccacataccaccacggtatacggacggaagacgtgacatagtttccaacccatcctagccatagacaagagtaccgacccaaccccacctacggccggaacccccgggacaggcaggcaggattgagccccctagcagcaggacaccggccctgtgccatgacatctcgactaccgggccgcagctcgtgtagccttcatttgccctggagaatgtccatcgacccccgacttcatccatctccatccgtgtacttttgtttataaccagactgagccacaaattaagccttacccactagacatgtggaagtacggtagtgctttgcaacagaggcccgagcttaatccttatagtacccgaggtacgactaaccaaacccaaccacgcacctcgagcccagcctaaaaccattatgggggttttgaatagagggggaggtgtgtgtccaattccaacataagccaaccatt

SEQ ID NO: 21487 - DNA, 538 bp, Oryza sativa
acttagtacgtaaggttgtgtagggttctaatgtacgacatttacacttagcatacatgacttagattgttaaaacataaatgtctcgtgacttagcagatgtttcttgtatcaacagatggctgaccgcgatgaggaacagatattgtacgatacaatcgcggagggaagcagccagtactggaatgaagaagaggggaacgaggatccaaaccagtacttgaacgaggaagggaacgtggagagggatgcggaggggaaccagcaggggcacgtggaaagggatgtggaggggaaccaggaggaggaggctagtggtagtcaaccctccgttggacagaagagggcacgcgggcaacgaggtgtagcgaagaagcttgagggtcggcacatcataacggaagtggaagaagatggacgtcctagtgccccggccgaagccgccaagaactatgtacgtcacagcggttgggttgtgcgggataacgtgcctgtcagtacggtgtactggcgaagaacaagggcacgctgagatcat

SEQ ID NO: 21488 - DNA, 1787 bp, Oryza sativa
cgaacgaacgcgaacgaacgcgaacgaacgtgactgaaacatgaatgaacgtgagtgttagtgaacgaacacgaacgaacgtgaatgaaacgtgaacgaacgtgattgaaacgttaacgaacgtgaatgcacttgaactaaaagtgtgagaacgaacgcgagcgaaatgtgtacgaacgagataattaaactattgttgaacttaccatatatatatgattatatatacttgaaaacatgaaatacattatatgttcctttgcatttagactaatacattttttttgcatgttgcagagaagacgtcgtcgttgtcgtccctcaagccgaagtggtagctagccctcgaaggaattcacgcaggcaagtgatgtaaagatgtgattgttagagatataatataagattgttagatttctaatataagattattagattattagagttagcatatgtgagtgttaaagattattagattattagacttagcatatttgagtgttagagatagttagagatttaatataagattcttagaggtttaatatacgaaacttaattagacttagcatatgtcagtgttagatatttaatataagattattagagatataatattcgaaacatatttgattgttagagatttaatataagattattagagatgtaatattcgaaacttaattagacttagcatatatgattatctaccgtacaaatacacgacacttagacttagcatatttgagtgttagagatagttagagatttaatataagattattagaggtttaatatacgaaacttaattagacttagcatatgtgagtgttagagatttaatataagattattagagatgtaatattcgaaacatatttgattgttagagatttaatataagattattagagatgtaatatttcaaacttaattagacttagcatatatgattatctaccgtacaaatacacgatacttagacttagcataaatgattatttgagttttaatacaagattagtagagtgttaatattacgcttagcaaatatttcttctatgaacagatggctgatcgcgatgaggaacagatactgtacgatacaatcgcatcgggaagcagccagtactggaacgaagaagaggggaacgaggatccaaaccagtacttgaacgaggagagggatgcagaggggaacaaggagggaaacgtggagagagatgcggaggggaatgaggaggaggatagtggaagtcatccctccgctggacagaagagggcacgcggacaacgaggtgccgcgaagaagatagagggtcggcacatcataactgaggtggacgcagacagccgacctagtgccccggcacaagcagccaagaattttgtacgccacagcggttgggttgtgagggataacgtgcctgtcagcaaggtgtactagcgcagaacaagggcacgcggggataatgacagctttgtcccgaaatcagagaaagagatgctgtgaaccacaatgctcgagacgttcacgctccttgcgggtacggagaacatagtgaaacagtggactcttaagaaaatggcagaacagttccagaccttcaagggagatctgtaccggaaatacatcctgaaggggcagacaccgaacttcgacgtattcccgaagctaagggatcactaggacgagttcgttgcttacaagacaggtcaacaagggcaggcgatgatggaaagaaacaaagaaaatgccgccaagaagaagtaccatcaccggggat

SEQ ID NO: 21489 - DNA, 705 bp, Oryza sativa
gtcccacacggggacacttccttcttccacacagtttaagatctttgaccagttgtcttagaaacacatcgatgtcgttaccagggtgcttggggccttgaataataatcggtatcattatgtacttcctcttcatgcatagccaagggggaaggttgtagatacacatcgtaacgggccaagtgctatggccgttgctcatctctccaaaaggattcatgccatccgtacttaaaccaaccgtatgtttcgtgcgtcctttccaaagtctttaaattttctgtcgatgtttcgccactgcgaaccatctgcggggtgtctcagcatcccgtcctgttgacgttcttcagcgtgccaacacatcattctagcattccccttgttcctgaacaaacgccttagccgtggtattatagggaaataccacatcaccttagcaggaattctcttcttcgttagctgcctgtcaacctcacctagatcatctcgtctaatcttgtatcgtagtgctttacaaacagggcatgcttctaggttctcgtactcctcaccgtgatataggatacaatcattcggacatgcgtgaatcttctgaacttccagtcctagaggacagactatcttcttagcctcatacgttgtctcgggcaatttgtttccctccggaagaatgttctgggtaccgagctcgaattcgccctatag

SEQ ID NO: 21490 - DNA, 664 bp, Oryza sativa
atgctcaaatcaatgataatggacacgtgtgataatgatatgttaatgagagaacaacatctgtattaccgtggcaagatgcagtcataccagttcactgctggaatctcatacaaaggtagtggcctgacgatttccaagaccttaagaacacttgtactcattgatgtctcaaataacgctttccatggtagaatccctagaagcattggggaacttgtgttgcttcgtgctctcaacatgtctcataatgctcttacgggtccaatcccagttcagtttgctaacttgaaacaacttgaattgttagacctctcgtcaaatgagctttctggggaaatcctttgaaaattagcacctcgagaaatgtttttgccacctttgaaatcgagccatagatatttgatcctctttgtcttgactgcttgagatttggtgtctgctctagaattacaattctagcaatatgttgaagtaatcttgtgagagtacttctatagacaatagactaaaagattatttttgttattgacccttgatcacctcagaaacaatcagaaagagaaggtcctgaaactatatcaaattaagcatctttgcctctgcaattctctagcttggaaagaaaacaatcgtgggtaccgagctcgaattcgccctatag

SEQ ID NO: 21491 - DNA, 966 bp, Oryza sativa
atgaatttatcaggacgtgacacttgtcgaatggggttcgccaatcttctgggtcttcgcccagctttgcctggtcgattgccatgatgtccaggctttctgtgggcacacttggtgcgtacaagacttcaaaaaagatgcctgatgaatgcgggcctccacagactgcagattttgccagggtatctgcttcctcattctggcctctaggtaagtgttcgaccgttatgccggtgaagcacttttccatagaccgaactgcttccagatatctcttcattccttcttcttttgcctcgaaggacttgtcaacatgacttgccaccagcttggagtccgttcggatgagcaagcgccgaaccccaaatgctttcgcctttcttaggcctaatagtacagcttcgtattctgccatgttgttggtcgtgtcgaactacagccttgcggcataccgaatcagcacaccccctggcgaagtgagtactgccgcggcgcctgccccgttgtgcgaccatgagccgtcggagtacatttacccaaggctattcgacgggctcgggttcaggggcgaatgccagtgtccattcggccacgaagtcagctaggacttgggactttatggcggtgcgggcgacaaaatgtaggtcgaagggggataattccgccgcccacttgctgagtcggccagtgatttctttgccccgtagcacttcgcccaaaggatactgcgatggcacagtaactttgcgggcctgaaagtagtgcttaagctttcgcgaagccatcactagggcgtaggcaatcttctccatttcgatgtatcttgtcttcgccccttgtaacgcttcggagatgaaatacactggtttctggcctggctccgtctcttgaacgagagctgcactgaccgccaccggcgaagctgctagataaagcagcagttcgcttctcggcgctggactgacc

SEQ ID NO: 21492 - DNA, 668 bp, Oryza sativa
agtatccagacggtacctttatgctctccaagcattcaaacatactttccttctctgccttgctaagagtgtagttggctggactcaagtaatggcttcctttctcctttggttccgggtgaaggtcgccgcgttgttccatatgcttcagatcattacgtgcttccagtgtatctttcgactttccgtatacacttaggaagccaagaaggtttacgcaaaggttcttagtgaggtgcatcacgtcgattgcgtggcgtacgtccaagaattcccaatatggtaactcccaaaatatagagttctttttccacatcgccgcgtgaccatcttcgctctctatatgctggcttccaggcccctttccgaacactactttaagatctttaaccatagcaaacactgttttcccgctgcgatgtttaggcttcgtacggtggtcggccttatgttggaagtgcttgcctttcttccgtaccgggtggtttgctgcaaggaatcgacgatgacccatgtatacaaccttcctacagtgcttaagatacgtactttctgtttcatccatacagtgagtgcaagccttgtaccccttgttggactgtccggataggttgctaagtgcaggccaatcgttgatggttacgaacagcagcgctcgtaggttaaac

SEQ ID NO: 21493 - DNA, 1300 bp, Oryza sativa
ccatctacgagtccgcgatcgaagccgctcacggcgatgaaaacaccaaggcaaaggtaatccatctcgctttagatggcatcacccgttcttggtatttcaatttaccagctaatagcatttactcatgggagcaattccccgacatctttgtccctaactttcgaggcacttatgaggagccgaagatgcagcagcatctactcggcattcgccagaggccgggggaatcaataagagaatacatgcgtcgtttctcgcaagcccgatgccaagttcaagatataaccgaagcgtctgtcatcaacgccgcttcggccgggctgctcggaggtgaactcacaaggaaaatcaccaacaaggagccgcagacactcgagcacctgcttcgcatcatcgacgggtacgcaagaggcgaagaggattccaagcgacggcaagcaatctaagccgagtacgataaagcctccatcaccacagcccaagcccaagtacaagcacaggtcgccgaaccggctcctctcaccgttcgccaacctcagctggcaaaccaaggacagccgccaaggccaagtcaagctcccatgacttggaggaaattcagaaatgaccgcacgggcaaggctgtgatggctatcgaagaggtccaagccctccgcaaggagttcgacgctcagcaagcagtcagcaatcagcagcctgttcgcaagaaggtcaggaaggacctctattgcgcattccacgggcgatcctcgcacactaccgagtaatgctgaaacatccggcagcgtggcaacgctcaagacccaaggctgcagcaaggggcagctgtcgaagcacctcgcgaagccgcccaagaacaagcacccccagtcgaacagcgccaggacatccagctcggagtaattcaagtgattacaagggccgatccaccagttcaacagtcgaagcggcagaagaagatgcagctgcgaacggtgcacaacatcaccgcggcaggccaaggggctctgaggtacttgaactagcatatctcttttgggccagaagacgccgaaggggtgctattcccacatcaagaccccttggtgatctcggtcgaagtagctggcttcgaagttcggcgaattttggttgacgggggaagctcgaccgatgtcatctttgctgaagcatatgccaaaatggggttgccaaccctagccctcacctaggcaccagcctcgcttcgtggttttggcggtagagaagttcaagttttgggccaagtacaactggtggtagctttcggcacaagtga

SEQ ID NO: 21494 - DNA, 1001 bp, Oryza sativa
ggtgatcaagatgcaagtcgatgacgccgatcccacgaatttttccagctagggggtgatctaggcgaagaggaagccaagaatatcctggaggtgctcaagaagaacattgacatcttcacctggagccccgacgaagtgggaggtgtttcgacgaacttcatcatgcatcatctggcggtcaagccggatgccaagccaagggaacagaagctgcacaaaatgtccaccgatcaccaagaggcagcaaagcccgaagtgtagaagctgctcaaggctggggtgatctaagagatcgaccacccagagtggttggcgaacccatttttggtgaggaagtcaaatggcaagtggcgcatgtgcattgacttcacagacctcaacaaggtgtgcccgaaagatgatttccccctgccgcggatcgaccagcttgtcgactcgacagctgactgcgaactcatgagctttttggatgcgtactccggctatcaccggatccacatgaatccggccgacatcccaagacagccttcatcacgctgttcgacacgttctgccacctcagaatgcctttcagcctgaggaacgctggagcaacattcgccaggttggtgtataaggtcgtttacaaacagttggggcgaaatgtggaggcctatgttgacgatatcatcgtaacaagccgcaaggctttcgaccatgcgtctgacttgtaggagaccttcgacaacttgcgtgcggctggtatgaaacaaaaccctgagaagtgtgttttcggtgttcgcgcgggcaagctgttgggctttcttgtttctgaaaggggtatcgaggcgaaccccgagaaaatcgatgccattcagcaaatgaagcctctgtcgagcgtacgcgaagtacaaaagctcacaggctgaattgcggcgcttagtcgatttctctcgaaggcagccgaaagaggtttgcccttcttcgagacgggtaccgagctcgaattcgccctatag

SEQ ID NO: 21495 - DNA, 5111 bp, Oryza sativa
ctaaggcaaaggtggtggcggatagaggagagctcgggggtccttttaaaggggctagcgagcggcgacggaggcccacggcgaccggcggcgagaaggaaaggtcggggattcggaggagagaagtcgatccgattcgagatcgaatccacgagtttccaaaccgaattaggcgacgcttccaaaagagaaaaggaagaggagatctcggagatcatttcccctctattgatttggccggagaaggaaagacgcggccgaatttggaaggagacggcggcggcttgcgctagggtttcgggcggcggcggcggcgcgaggaagacggatccgacaagcggggcccacctgtcagcggctgagagagagaggagagcggcggctcggcggactgggccgacttgggccgagggaaagagaagagagggttttgggtcggctttcggcccaaagccaaaagaagacttttaaaaccttttcaatttaaattatttcttaaatgcaattccatttattaaaaatacttccttagctcaaataaatcccagaaaaatctaggaattatagaattaagcaaagtatttaatgaaattttatctggcccaattttatattgagatttaacaaattaaaattagatcttctcttctaggcttttaaaatcatttctaataattccttttaaacaacaatttataatttaaggatttttaaacaagaaaagctcttaacaaatctaattagatcattaatgatcaaataattactgaactgttctttgtatcatttaagaattgagctctgaaaaatccgagaaaatttcagagagttgacttaatcatggagaatttaacaaaaattaaatccatccatgctttacatttaggaaattttatttcccacatttaacttcacttggtaattaaagaacacttaatataaattctattattaatttattaaataatttataaatcctgaaacaaaaatcaggatgtgacaaatctaccccccttacaaagaatctcgtcccgagattcggaacggctagaaagaaaaacggaataggtaaactgcagtctatcttattattccataactccgataattattctaaggctttaaagaaaactactgcttctttgaaactggtggctgagctgcaacacttgaagacacaactcttgaagatgcaactggcactgcattggctcctgtgacgacaatgttgttgacttgaccttgcggctgctaatgcttcggcttcggacactcttttgcaaagtggcctggcttgtaacagttgaaacatacctgctgctcccttctactactgttattctcctgagtctggtcctgctgaactggcaccggctgattagcttgctcgatgttaacttcattgctttcattagtctctgatttgatctcaccaccgatattcaactgttgcgattgtccttggccagcggaaaaaggttcaccaatttggagtggcttgatacgctgcctctggctactgccttgtgcctcttggaatacagtcattttccttttacggttatccatcctgttcttcttgtcttcaagtcgaattgctttgtcaaccaactgctgaaaatcagcatagtcatgagagatcaacgtaactgacagttcatcctttaagccttccaagaacttctcctgcctttcctcgtcagtacgcacatcttctggagcataacgtgccagacgattgaactcgtgaagatactctgccacagtttgatccttttgcttcaatgccctgaactcacgcttcttcaaagaaacaactcctgtaggtatgtgtgtcttcttgaatgcttccgtgaagtccgcccaagtgattggttgtccttctgctctgttcatccggaaatgatcccaccattctgatgcaggtccttgcaactgatgtgaagcgaacacgactttctcctgatccgtacactggagcagttccaacttcttctcaacagcgtgtagccaatcacctgcttctactgggttggtagtgctagaaaaggtaggtggcctcacacgaagaaaatcagttaacttgttctgcggcggtggagcattgttgttcccttggttgagctggttctgcatctgctgtatcatcatgttcattaactgagtctgttgagccagaacttgagcaagagttgggttcccttcattgttattgtttccacttccactggcgcgagtgttcaccatctgttgcttattagagaggatagaaggagaggggttacactaaagacaagaccttaaccaggttaacactgatctgatgtgtgtagaccattatattgttcaagttgattaagcaagcaacctagtatagttacacactcatcattgaatcacaccaatgacgggaatgcaaccatacctacacacaagcaagcaacaagcgttctaccctactaactattctccaaggacactttggcggcataggttctaaggtaggatccaaacttcattccatcttgacatctgggcacttcagatcgaccatcaccttcttattcatcgatccacttgacttaacctccacaagtagaccacattggcgtcttcaagtttcaacaactagtttcagaactactccagttgaaagcaggaggggagaggatgaaaaaatgatttatagagaattctagagaaggaagaaaggaaaattttcacaaatcatgttttcggaaaattagtccttaaggtttgaccatttggcttatcctacagtcaagatggctctgataccaacttgtcacgcccggaaattcactagttatttccgaacatatttgtgcataaaatcctcgtccaggaatcagccgaggtacacaaactgacaatttaatatacagattcatcaaattaactaaaacgataaatacttacttaagaggcacttagtcctcactaagaagaaaactgcagcggaaaataaaatctagcgaagctccggctccactcccacaggcagctcaactgggatataagacaaacgtcttctccttctggatcctttttcttcaactgaggttgattgattattgcaaggtgagcatatgacatactcagcaagccacacagcaaatatgcaagtgcacaaggataccaaaggatggcataatataggctcatttgcaaaagcagcattttagcaaaacatttaagagaagtaaaacagtggagtaattgatcagaaattttaatcaacactgaacagcatacccatgctgcacaggcccaaccatcctgaacaaccatacccggctgtacagatctaactccaaaccaggagctaagcaaattattaccagttatagcatccataattattgtgagaggtgtgagactaatcacgaaaaacattgctcaacccgcccataaccacgggcacggctattcgaatagttttactctggccagaggtgtaccactgtacccacaagacacagccccacatcatgtcaccatgtgcctcagtaccaccacggtacctcggaaaggggctgtgacagtaccccttgcataacacaatccaccgcagcgcaccattcctggatcataatcaccccctcaaaaaccagaggcatggactccccagcgacccccgtgggcttatctccgccacttctcagtctggtgccccgcaatgaaccatgctatacaaaagataaagccgttgcccacgctggcttgtggttggcacggttaatgtttcacaacagtagctcgcgaaccggtccttaattgtcatgagcacgactctcaaaaccatgtgctcacaacccaccattatcaagttttagttggcaagtaattaattaaccaatcacgattgaccatcgtgagctaccattaaatataaccataagtgatagtgaaacattagttatcccaattgtgtgctaaggtttctaagcatggctaagcaatcatatctaatatctagttgaaccaatatatataaaactcaactagtccaattataataacccaaggtatcaaggaataaagtaatcaatgcaaacaggccataacaaaggaataggttcacaccacccagtgacattcgaaaataaatgcacagttgaaataaatagagaatttaaatataggatcaacatgctcaaaggaattgtgtttaggatctgtgtgacttgccttgcaataatcggtcttcaattaatcttcttgaatacttccggcgcactcgcgaaccttcacaacgacggaaacgacaagctaacacgcaaaacaaggaaaagactaataaaaaccaaataaacaatacataaaaagtaaacaaacatgtagatcataattttagatgaattatgagacttgaacggcctcattctgacttcaaatgaatttattatgaattttacaagattaaatctatttaaagcccatttaaaaagaattaaataaatttaattcaatttatggacaattttaatatgtagatctttattttatacaacttttgcaacttgaaccacattaaactgagttaagatgaattagttatgaatttttaaagattaaatcggattaaaacctttaaactgattttaattgaattatgacgcaataatgaattatttttgaaaaggaaaagaaagattattgcgtcagcggctagggtttcggtggacctggcgcacgggcggcggttcacgcgaacggacggccgagatcgatccaatccaaaacggacggccgagatcgatcggtccacgaccggctcatgacggacgaccccgatgacgtcggcgatgacgtcacctaccagcggcggcggctcggcggagcggacggctcgggcggcgcacgctcgccggcgaacgacggcgcggcggtgcaaacggagagcaccaagacgtagatcacggcgcgacgaactcaccgatgaccaaaacgacggcggaggagcaaaggacggcgccggcgacgaggagaaagcggcgaagctcttcgggtcgacgacggcgacggcgctccggcggtcttcggcggcggcgaagcggtgggtaccgagctcgaattcgccctatagt

SEQ ID NO: 21496 - DNA, 897 bp, Oryza sativa
cacgtactttctcctcactattgttccctccttgtgatcgctgcatgagtaaggggtgtcttcatttgataggaggatgctagggtcaatcgtcaccgtgaaagggggttgcccatcaaactgatcgtaatcctcgtcagtcttgtcctctactccgacaatttttcttttgcctgggagaaccacatggcgcttcggctcgtcaggccctttgcccttctttcctttgctagacatgtccttcacgtaaaaaacttgtgttacatcattggcaaggacaaaaggttcgtccgagtatccaaccttgttaaggtcaaccgttgtcatcccactgtcatcaatcgttacgcctccaccagtcaacctaacccattggcaccggaacagagggaccttgagaggtccatagtcaagttcccatatctccttgatgacaccgtaatacgtgccagttgtaccatcgtgtcccatggcatcgatacgaacagcactattctggttcgtgctcttcatgtcttgggctcttgtgtagaatgtgtacccattgatctaatatccctggaatgtcgcgatcgagccagatggacccttcgccaggaaggccagttgttggttaatcgtctcgttacccatgagatgttgtcgcagccacgcggggaaagtatcaatgtgatgccgtgtaatccatgcatcggagttaccgatgtttctggcgcgaactagagccaagtgctcctcgatgtaaggagccaccaatgaagattattgtaaaaccgtgaaatgggctttacggaataaattgttgtctaccgtcataattgctttccttccgagagtcccctttccccgtagtctcccttcatggcgtgattcaggtaccccgattgtgcgaaggtc

SEQ ID NO: 21497 - DNA, 1772 bp, Oryza sativa
tagcagatgtttcttgtatcaacagatggctgaccgcgatgaggaacagatattgtacgatacaatcgcggagggaagcagccagtactggaatgaagaagaggggaacgaggatccaaaccagtacttgaacgaggaagggaacgtggagagggatgcggaggggaaccagcaggggcacgtggaaagggatgtggaggggaaccaggaggaggaggctagtggtagtcaaccctccgttggacagaagagggcacgcgggcaacgaggtgtagcgaagaagcttgagggtcggcacatcataacggaagtggaagaagatggacgtcctagtgccccgtccgaagccgccaagaactatgtacgtcacagcggttgggttgtgcgggataacgtgcctgtcagtacggtgtactggcgaagaacaagggcacgctgagatcatgagagctttgtcccagattcggagaaagagatgctgtggaccacaatgctcgagacattcacccttcctgcgggtacagaggacaaagtgaaaaggtggactctgaagaaaatggcagaacagtttcagagcttcaagggagatctgtaccagaagtatatactgaaggggcagacaccgaacttcgacacattcccaaagctaagggatcactgggacgagttcgttgcatataagacaggtgaacaagggcaggcgatgatggaaaaaaacaaagaaaatgccgccaagaagaagtaccatcaccacttggggtcaggaggctatagcgtcgcgatgccgaagtgggagcagatggaggctagcttgattgagaggggtatcgaaccggcaacagccaattggccggaacgatcgaagttctggtgctatgctcacggtggaacgctcaacccagctgatggctcactggtcttcggcgatcagatacgagaggctgcgcgacgactaacagatgcagtggaagcctcctctcaaggcacgttccgaccagacagagatagggacgagctgacactcgccctgcagactccagagcattcaagacgaacacgagggaaaggggtgattccttggaagattgtttcaaggaggacatcaacacatacaggagtcggatgaagagcaagagagataccgaggcgaagattgcagacctagagttccgggtatcgagctacgaactcaacatgcaaaaggaagtggcaaggaaggttgatgaacgcatggccgcacatcggtcccatgatccccagctgaccattccttctgcaatggtgagcccgtcaggaaacagtagcagctgcgcctcaacggggcaggtaggatcacagagcatggacgccatgcaaacacaggacaaatcgacctgtcccgttgatgacatcactcagcggacaccatgtgagctgcatattcctttcaagaacttatcaataaaggtaagatttagccattccgctagttgctgcttatatatgttgattactaataaataatctctcacaacatgaaggtggcgtcgggcatggccatcccaacggacccttcaggtacttaccactgcaggccgattccagtaggatactcgaaggtcgaagttgagttggtcgaaggcgcgtacgaggacctcgagctggattaccctggaggagacggggagacgcatctacgagacacatgccatgccattattctatggcgcaggcggtacatcatcctccctgggcgacaagcggcgtctcgtgcaccatctcctctggctccg

SEQ ID NO: 21498 - DNA, 543 bp, Oryza sativa
cttcgataaattctatgcaaaattcaatgacctcctctgtgccataacccttggcgatgcttgcctctggacgagcacggttacgaacatacttcttcagaacgcccatgtacctctcgaaaggaaacatgttgtgtaggtacatacgcccgagaatacggatctctttcacaaggtgacaaagcagatgcgtcattatattgaaaaatgaaggtggaaatatcaactcaaaactgacgagacattgcaccacttcattctgaagggcttctaatctatccggatcgatgaccttctgcgaaattgcgttcatgaatgcacatagctttgatattgttgcccggacattgtctggaaggataccccttattacaactggtagcagttgtgtcatcaacacgtgacagtcatgagactttaggtttgtgaacttcttctcctttgtgcttattattcgcttgatattcgtggagtatccagacggtacctttatgctctccaagcattcaaacatactttccttctctgccttgctaagagtgt

SEQ ID NO: 21499 - DNA, 2286 bp, Oryza sativa
ctcccggtgatcaccggattcgagcagctcaccgaactggtttatcttgatctctccgacaccaacatagcgggcgaggtgccaggtagcatcggccgccttacgaacctggtctacctcgacctctccaccagtttctatatcgtcgaatacaacgatgacgagcaggtgacattcgactcagactcagtttggcagctctcagcgccaaacatggagaccttgattgaaaaccacagcaacctggaggagctccatatgggaatggtggatctgtccggcaatggagaacgatggtgtgacaacatagccaaatatacaccaaagcttcaggttctaagtttaccttattgctcactgtcaggtcccatctgtgcatcattctctgccttgcaagcactcactatgatcgagcttcactataatcacttgtcaggttcagtgccagagttcttggctggcttctccaatctcactgttcttcagctatccaaaaacaagtttcaaggatcgtttcctcccatcatcttccagcacaagaagttgagaacgatcaacctctccaagaatcctggcatatctggtaatctgccaaatttctcacaggacactagcttggagaatctgttcctcaataacacaaacttcacaggtacgattcctggttccatcatcaatctcatatctgttaagaagttagaccttggtgcaagtggcttctctggatcactgccctcttcgttaggcagtctcaaatacttggatatgctacaactgtctggattacagctagtaggaaccattccgtcgtggatctcaaatctaacttctctcaccgttctccggatctctaactgtggattgtctggaccagtgccttcttcaataggaaacttaagggaattgaccacattagcattgtacaactgcaacttttcagggacggttcatccacagatcttaaatttgacgcggctacaaactctcctgctccattcgaacaattttgctggcacggtggatctcacctcattctcaaaactgaaaaacctaactttcctgaatctctcaaacaataaactacttgtggtagaaggaaaaaatagttcatcactggtattgttccccaaactacaattactaagtttagcatcttgcagcatgacaaccttcccaaatatcttgagagaccttcctgacatcactagccttgacctttccaataaccaaatccagggagctatacctcagtgggcatggaaaacatggaaaggcttgcagtttatcgtcctgaacatatctcacaataactttacgagcctcggatctgatccttttctgcctctttatgtggaatacttcgatctcagtttcaacagcattgaagggcccatacctataccacaagaaggtagtagcacgttagattactcaagcaaccagttctcatccatgcctcttcgttactcgacttaccttggtgaaactgtgactttcaaggcgtccaaaaacaaactttctgggaatgttccaccgttgatctgcacccctgctaggaaactgcaactcatcgatctatcttataataacttgagtggctcaatcccatcttgtttattggagagtttcagcgaactacaagtattaagtctgaaagcaaataaatttgttggaaaattacctgatattatcaaggaaggttgtgcacttgaggcattggacttaagtgacaattcgattgaagggaagataccccgatctctagtttcctgcagaaacttggagatcctcgacattggaagcaatcagatcagtgactctttcccatgttggcttagtcaacttcctaaacttcaggtccttgtcctcaaatctaataagttgactggtcaagtaatggacccttcatacacaggacgtcaaatcagctgtgaatttccagcactcagaattgctgatatggcatcaaataacttaaatggaatgctgatggaaggatggtttaagatgctcaagtccatgatggccaggtctgataatgacacgttagtcatggaaaatcaatattaccatgggcagacataccagtttaccgctacagttacatacaaagggaatgacaggacaatttccaagatcttgagaagccttgtgctaatcgatgtctccggtaacgcattccatggtgccatcccagataccattggtgaacttgttctgcttcgtgggcttaacctgtcacacaatgcccttacagggccaattccatcacagttttgcaggtta

SEQ ID NO: 21500 - DNA, 1873 bp, Oryza sativa
gcttcagatcataagtgcttttccagtgtatctttcgacttttccatatacacctaggaagccaagaaggtttacacaaaggttcttagtgaggtgcatcacgtcgattgcgtggcggacgtccaagaattcccaatagggtaactcccaaaatatggagttttttttccacatcgccgcgtgaccatcttcgctctctataggctggctgctaggtccctttccaaacactactttaagatctttaaccatagcaaacactgttttcccgctgcgatgtttaggctttgtacggtggtccgctgtatgttcaaagtgcttgcctttcttccgtaccgagtggtttgctgtaaggaatcgacgatgacctatgtacacaaccttcctacagtgcttaagatacatactttctgtttcatccatacagcgagtgcaagccttgtaccccttgttggactgcccggataggttgctaagtgtaggccaatcgttgatggttacgaacagcagcgctcataggttaaactcctcctgtttgtcctcgtcccacacggggacaccttccttcttccacaacagtttaagatctttgaccagttgtcttagaaacacatcgatgtcgttaccaggttgcttggggccttgaataataatcggtatcattatgtacttcctcttcatgcatagccagggggggaggttgtagatacacatcgtaacgggccaagtgctatgaccgctgctcatctctccaaaaggattcatgccatccgtactcaaaccaaaccgtatgtttcgtgtgtcctttccaaattctttaaattttctgtcgatgtttcgccactgcgaaccatcgggggggtgtctcagcatcccgtcctgttgacgctcttcagcgtgccatcgcaacattctagcattccccttgttcctgaacaaacgccttagccgtggtattatagggaaataccacatcaacttagcaggaattctcttctttgttagctgcccgtcaacttctcctggatcatcctgtctaatcttgtatcgtagtgctttacaaacagggcatgcttctaggttctcgtactcctcaccgcgatataggatacaatcattcggacatgcgtgaatcttatgaacttccagtcctaacgggcagactatcttcttagcctcatacgttgtctcgggcaatttgtttccccccggaagaatgttcttgacgagtttcaataaatcgccaaatgccttgtcactaacaccattttttgccttccattgcaagaactccagagtggtatccaactttttgtgcccctgctcgtaacctgggtacaacgacgttctgtggtcctctaacatcttgtccaatttatgggcccccttttcactttcgcagtcctccttggcatcctgcatcatctgaccaagatcatccgcaacatcgttataatctgcatctatgtcctcctcgcccgtttgatttccttcaaatctagcgtactaagcaaagtctgaaatattgtcgtcttccacttcatcttcttccatttcaaccccttgctctccgtgggatgtccaacaattatagcttggcatgaaccccgactcaaacaagtagaaatgaatagtcctgaatgcagaatactccttctgattcttacacttgttgcatggacaacaaataaaacccctttgcttgttagcttcggccactctcaaaaaatagtgcacgccatcaataaactctttggaccgccggtcagcgtacatccattgccgatccatctacatgagtcaaaaaaaccgtacacaaataattattcttacaataatgacagtcagacaataattataagatatctttatt

SEQ ID NO: 21501 - DNA, 526 bp, Oryza sativa
aaattcagtgatgctagttccttggggatctctccagaaagctcattgaaagagaggtccaatgactcaagttgatctaacctgcaaaactgtgatggaattggccctgtaagggcattgtgtgacaggttaagcccacgaagcagaacaagttctccaatggtatctgggatggcaccatggaatgcgttaccggagacatcgattagcacaaggcttctcaagatcttggaaattgtcctgtcattccctttgtatgtaactgtagcggtaaactggtatgtctgcccatggtaatattgattttccatgactaacgtgtcattatcagacctggccatcatggacttgagcatcttaaaccatccttccatcagcattccatttaagttatttgatgccatatcagcaattctgagtgctggaaattcacagctgatttgacgtcctgtgtatgaagggtccattacttgaccagtcaacttattagatttgaggacaaggacctgggggatcctctagagtc

SEQ ID NO: 21502 - DNA, 614 bp, Oryza sativa
atgggagaaccgcttcgcgccgtagacgaggaagaaaggcgtttccccggttgctcggctggtgtagttcggtttgcccagagcaccgctggcaactcctcgatccatgaatcgccgtgcttcttgagtatgttgaaggtcttggttttaagacctttgaggatttccgcattggcgcgctccacttggccattgcttctggggtgggcaggtgaggcgaagcagagcttgatgcccatgtcttcgcagtagtcgccgaagagttcactagtgaattgggtgccattatccgtaataatacggttaggtactccaaaccgggccgtgatgcccttaatgaatttaagtgcggagtgcttatcgatcttgacgaccggataagcctcgggccacttagtgaacttgtcgatcgcgacatacagatactcaaacccgcctggggcccgcctaaacggtcccaggatatcgagcccccagacagcaaatggccacgaaagtggtatggtctgcaggacctgggccggctgatggatttgcttggcgtggaattgacacgctttacatcgccggaccaggtcgaccgcatcattgggagctgtcggccaatagaaacc

SEQ ID NO: 21503 - DNA, 685 bp, Oryza sativa
gttaccagtaagaaaaaaaatgctcaatcccacaagatgactatcaatggttgggttttaatcagggattgataccacaagaagaaccatgctgcagtagcatagctaaaccacaacagaaaccagggagtaaaaagcagacgagtaataagggttttgcaaaacgcaaatggcaacagcatagattatgtatggataacgctttcactcatgataccaatcagagaaaaacacccagaattcatgtttcatttttacccaatatttgcaatacagaatccctaaactcaaggatctgtagcttcctcacctagcctggtgcgatgccattagaattgtagaaatatgtcttaggtctcatcaaaattccaggttattaaatcatcacagcaaagcaaaatcgtatatcagttctttcctcatcacaaatcttccagggctactgagcaacttttgtgttgcccctttgcctcgccaggcgaacacatgcttcaaatctcttgactgcctcagcacacttgagtgggtcctgtgcattgctcacgtaacactggcggcagtttgacctctcctcagtgcatggcgtggggttttggtacggcagcttgaactccttgtcacgcaggtcttttgatttcttgatgagttcatcacgcatcccagcatgctgcttatccagcttctc

SEQ ID NO: 21504 - DNA, 1733 bp, Oryza sativa
  unsure (1)..(1733): unsure at all n locations
cagcaatatgtaatggggttgctccaccagctctgatattcggatgtgcacctgcctgtgtagcagattatatgatcggttttttatacgaatcatagatgtaaggggtgtagaagcaacagagcatcaaacaaaaccaagaacagaaacagcatatgacaaaagtaagaacagacactttgatcctcttatcaaaatcttttgatataggtagcacacatataagaacgtgacatactatgatttgccatgcagcaatctaatcaataacacgaaaaatgagcttgtctgaacccccattgcacaagccagattactaaacaaggaaatatagcatacagaaaccatatgaccaatgaatggcatcgaagtggataatatcctaaagtaaaagcaacagattttggtattttactcttgaaattagatttgtgtacctgaattagaatatccaagcatgggagggaacccgctgcaacagcagacaacaaaggcgtaataccatcatcgttttcagtatttggctgccaagcaataactagcttcagtaaaaaagttaaggaaaggccacatgaacggctgattgaaaggtggttgagtgctaaacaaagagaagcctgtccaattcaaagaaacataatagatacagatgctattagaaccaaaagatagcatcttcttaacaatagcaagcttgagaacccttggtggttactgttaaagtgtcagttgctactagtatttgacaatattaaaaggcgacatattaaaatttcagcataatgaagatttctgaacagaatgactagaagctcaggttcgttaaatcagtgagatatgaagtgagataggagatagtggatttattgaggagcaaccttagcatcgtgttgaagcaaaagtttgactgcctcttgctgtccatgaccagcagcccatatgaggggtgtgccggcatcgctttctgattcaacatcaacccccttggagagaaatagtttcataaggtccaggttccctgcagatgcaaacaaaaaaaaaaggagagtggtgttggacgcatttatagaggcgttggcacaatcaaaatgggagaaaaaagaaaagagtatagaccatcaatccatggaaagaatgaagtgaaatggcaaatagatgatgaattttacctatgccggcagcatggtgcaatggcgtggctccgagggaagaagcaacggaaggatctgctccatggtgaagcagataggttacagtttgnagatgggcttggcgcgtagcatggatgagtggagtttcacctggtggagtggatgtaaactgatggatgagagattgtgaagaaatcagatgagagtaagagatagtgatagttagtagtaccatcgtcgtccttggggtcgacggggagggcgaggtcggagatgaggaagtgacagacgtgggtgcggccctcgcgggcggcgaagtgcagggcggtgcgcttgttggcgtccttgacggcagcagcgacggcggcgacgcccttgccctcctcgtcgagcgccgcagcgagctctgcaatggcgcatgaggagaggagatgagaagaaacgcaaggaaagcaaaggagagagagaggaaggcatgggggcacctactcttgagggagtcgagatcaccggcacgagccgcttcgaggaaagcttgcaccttgctccgagctgcagccaatgaattcgaagcgacctcag

SEQ ID NO: 21505 - DNA, 737 bp, Oryza sativa
ttgccaatactagtacagtgagtgagtcatttgcatctgcataccctaccttacctgctcctactactgctcgcctcgcttacttactaccctcctgctcctaacaacaacaacaacaacaacaacaacaacaaggaagctctatcgggaaagaaataggaggaagaaggattaaggaaggaaagcaaagcaagcattaattaaaggaaattaggaaggatgtcagactgggggccggtggtgatcgcggtggtgctgttcgtgctgctctcgccggggctgctcatccagctccccgggaggcaccacttcgtcgagttcggcaacctgcacaccagcgccatgtccatcgtcgtccactccatcatctacttcgccctcatcaccctctttgtcatcgtcatcggagtacacatcaccaccgattaatttttacttcttctttagtttcttcatttctgcagttcgtctgccctgccctctgtaatctctatcttcttctttcttgctcatcctgtcttctcccctcctccatatatatcctacctcatattaattctactatctacatggtgcttccttgatgttcagcacatcaaaccatgcataaaccaagactgttttaaattattactgttttctactagtattatatatgcatgggcagttggcactgctatcaaattcagatctcatagctagcttaattgagcagtttggcacatatattctcccaa

SEQ ID NO: 21506 - DNA, 1320 bp, Oryza sativa
caattgcgctgttgctggatttgcgtccgatccagaattcgcacactttcgagggtacggatgaagtggttttctctttggcctaggtggagggatctcaatcgcattattggaaccgggctcacgcaccacctgctaaataaagcccccgcattagaaacgtttgagcatgccatttcaagtttactgttaccaattctgctttacaagcacatgtaatatatatatagagaaaaatatagcatcggcagtgtagtaataaatcaatcagattgatcaattggtacatgaaggattattatatcacctttgagaaaaacttctgggcatggctccgaatttggacagcagtctttgtgccaatgtgctctagagaacagcttggacaaatcagacatactactcactgaacttgtttaaagcctaatgtaaggcaaaaatatgaagagagagagagagaggccaaaacgcaccttgtatctgacgccaagagcgaccatacagcttcaatgcctcaaggaacttgtcgtgctcttcttccgtccacttctcccgctgcttggtgatcgtgtaaggcttccgaacctgcttcaaacattgggttggagattgttaggtacagtgacaacgctgtaagctagaagtacaattttttctgttcctctctgccagtaagacatgctagtgaagaaggatcggcttgcatagatgtcaaaagtaccttgacagggaactcctccatcccctcgttgggctgcattgcagttacagttgcagatgcatcattcatcatcaagggagatttgacaagatccagcgacgggcctttgttgattgccaaatcggatgaatccttttcctagatggccaggagaggaacacaaagttcagtgctttagcaaaagcatacacaagtactcgtataatttgcaattgccgcagacagtttacaacaacaactccgtagttactagtaccacttaccgctgcaaagggagggataattactagtaaaaagtagtagtagaaacagaattgctacctagtgtagtgtagtactccagtaagcagaggcagaaggatttgttaattgaggattcgtgccgttattggagagagagagtataggaggagtattggccatcccatgtcgttctggaagcctctaaagatagataattatgacgtgtatccgccccagaaccaggagagaagcatctagaacactcccattttttaactaaaaaattgcaatacatttggttttttaggcaataataatggatcggtccaagaaaaatatatttttgcaaataaaat

SEQ ID NO: 21507 - DNA, 13703 bp, Oryza sativa
tgtcccttctcctcctcctcttgccctcttggctccagagggttccagacaataaaaataagagaaagatctgctgcatgctatcacgggcccaccctcaccttaccttggccttttctcatcttccttacaaaaaaaaaattgggttttgctgcccaaaaatccctggccacatgtttttaggaggctggcttggatcctactgtgcttcaattagtataatcccgagcgattaacaaatgattgcttctagttctgtgctcatctaatctgcctgtaatttttaaagatctataagctgcgtatcactatagcttttaccgcccaaaacttgcttatgccctagttcaccaattactagctccaagcaactccaaaattgctctaaacatgttctataaagctaaatatcgacaactaagtaaagtaccacgtctctaccaggtttccaaacagttggattgcctgcggtactggtgctctagcaaacacttccgcgtggccttagacccatatgttagtcatcgttattgtatcagtagtgttacagaggatatatgtctgtttttttaacacaattacgctattgtaagtaagaactagttggaagaggacctacctgccgatgttgtgccatatttcaaagtttttagaggaggggagattttttaacttttttttaaggatagccctgacctaaacttttgagagtcaaatgttatgtcaccactagttgagtttggagaggaaggcataaccaccaaggtcaactttttaattttaagaaaaataaaaattttactaagcatatgaatcaacactggagtattttcttagcaaatgaagctactggtaacaaaggtgactataatgggcaggagagttgagtgcacgtcagacatattaattccatggggcaatgcaaaaaaaaatcaacatatacatgtgtggcctacattatattgcgttgctttcagtattccttcttagtagtagtattaaacagggaaataacgacggcccggatggctttccttgaaagaaattagtggacaggagcatgaccaagttgctgactgtattgcacacaaaagctactacactagttgtattagggagctggctgagatttacgatatgcttgtcggaattgaacaaggtgctcatgacagggatgggtttgatgctaatcaacaataatatccaaccccctcaaacaaggtttccttctactatatctttttttttgggaaactaattgagccaagctcttttaaccactatgagtaagtaaagggatgaagtaggctaaatcatactcacagtgcactccagggagctaaatcaactgctaaactacagcacaaaaagcaataatactgtcaacgatctctcttttattttatcagtattggaagaaaaatactatcagtatgaagaaaggttgcagagtgtttgtatggtagcggaaatatctagcggctgatattgatcgagttaggcaagaaagagcgtgacgcggctgctacggataaacaaatgcaatgggccacccacaacacaagcaaaccacgcgtcccctctagaaaccaccctaaagattttcctccccgataatccaatccaatatgcgccagctgcaagctctcacgccagccactcgctcattttcttcccttcctgcatgccatgtcctcttctcttctcttccctctatgcttgatattattagtacagctcaccagcaacaggttcacttgaaaagaaactccactctactggattttcctaaggccccttctattcaaagaaaattcatagaaattttaaaggattttatttctatagaaatttttcctatatagccatttgaatcaaaggaatgaatcctatgtaatcgcatgaaattcctatggaatgcctcttcccatgtaagttttggaggaaatttagaatgaggttctacctcatgttaaaaatcctttgagtctttatctctcctcaaattcctgtgtttttcctacgactcaatcaaacggtcattcctatatttttcctgtgttttacaatcctctgttttatacttgtattcttgttagaattctatgtttttcctattcctcggtttttttattcctgtgattcaaagaggccctaagactatacttctactagcactcagttttcctttttgaaagcaaggcttaattggttaatcattattagtactcctgcctccaaagttatctgaataattaagctatttctaaactcatatatggatcccacttgacagtcgcgagccacatgaatgatggtgttggcccgttttctcaatggcggcagtaccagcaaggccgtgtttagtttcccacttatttctaattttctatcatatcatatcacatcaaaaacttttctacacatataaactttcaactttttttttaaactcttaactttcttcaaactttcaactttttttaagaactaaacacagaccacataatgggacgagatccgctaatttactacagaacgaacacagaggagaatgagagccacaaagtgcatcgtatcgtgctagcctctttctttttctgctcccacagtccacaccttgatttgttcttttactattttgatctctttttttctaattatagtttgtgtctactatgatctaatgtttcttccattttgcgtaggtgtgaacatcaggcgttttggataatgggttacaataaatagaaggtcaggaaaaagatggatggttcagattaaaactttttttaatggtaaaacccatgcattaaccaagcatgccctgtccttccaccagtggaacgtgaatttctgtaatgtgcttacactaacatttatgcttctccattttttttagcaaataagtcaccaccacttagctccaaacatgcatgtattgagcagtaagagcagtcaaaacaggcggtttagtaaccataccgtcatcagcgtagggctgtagcaatttagcggtgttagttggagttgtgggttcggtggttggtgcacttcatcaaagcagaaaaagaacatgtatgctatgcatacttggtcagcaatcgccgcgtacattaccacccactcaagcaaacagctttcccatttgtctgtatcacctgaaaacttagtatgtgcatttcctttttcttcttttcttggaggggagacacatgcatctgcctgccaatgatccatgctcacaagtcacaagccgttgcccaggagcatactccactttatagcttaatagtagctttgctctctttcttttttccctggaacacatgagcatcgtgcacaccacaagaacatcaaaaactgctctgatgccttaagagatgcaagagcaggatctttaaaacatgatttgctcccacaaacattcaatcaactctgttcaccagatatattactactaacccagaagacatctctaaattagatgctccgatttgctaatgagcgatagagatttacataatggagaggtgcgaatgttgtgaatctgcagatacactgaaacatgctgatacgctagcttagcgtacgcctcccccggtctctgaatctggtgacaatcagagcacacgcaaaactgggggcggatactcctactaggataatgcatactactacaacaattggtttggggggagccctcgccgctcagtctactccttgttccgggttgatcggtctttcttgtgcccgccaaggatacgggagatctgcagacctctgctgaaggcctggttgaagagcatcctggtctggaactcggacacgaaaggaaaccaagcaaggaacgctatgggtgtgaataacaggagtcccattaggatctcatagccccgggcaagagccttgattgatccccaaagcccaatagcctggacagcaggtttgatggcttgcgcaatctgatagtgtgttttatcaagtcagacattagaatttctttccaaaccaaaaaaaattgtaataataggaatgataggagacaggtttagttgctaaccagaagcaagccccatccagttggcatgaaagcaaggatgcaaacgaagatatcaagaactgtcatgtgagggatggcaattaatatcacaacaatggcgacaaatgttatgaatataaggcccttgatcaaccggaagacaagctggaactccgcactgaacctcctcctaccgactgaaacagtctggaaagaaaatcataactcagttttccagacaagaaaggtatcaagcactgatcagttaaacttcaaccgtaaaattctaatataagatacataaggagggcaaagtccatatggattcaccaagagctaaggaacaggttgttaccttcatgacaagtaaaattacgaaaatcacaacccatgaaaagcaataaacctgcaaattgcattaattagaagaactgagtatgaataaaacggatgtgaccaccaggattaaaaagaaaacaagggacaacttaccagtacactgcgagtatgcttggttatattcaaatgatacacaagcccatattggtagacaaagaagcgcaacgcgagcagaatttcaagaatagtaccacgctttccagagtatcgaagaggctcctgctctttttcccaccatgattcccaactttttgttggtgctactccaatacctccacggttgctgatccacttattccaatcagtccagtcatccacaatcttctgccactcaaatccagaaggattgaataggaatggtgcaaagagccaggtgcccaccataaaccacatggaaacagtgatgaaaatgtatgtgatagcccctctgtatgattgcccaaagatttcatacacaaccagcaaaatcatcagctcaatacccttgacaaaatggctgcgagaataaagtcggtagttgtcagcaaacttggcatgaaacaccacaaatccacgcccagtggctctatattcagctcctccgtggagtaatgtccttccgtaataatgagttttggtcccaagtgaaaatgtaaagaaaacagatgccaactgaagttgcataagtacaaagtcgcttagtgctgttctgaatcccctctccagaccaatttccatcatcatgggcaacgccatcaaaaatccaagttgaacaaaagactctgatgcaagagcaacttggaggggtgcattatgcacaaacttctttccagtggctagtgcttggtccagtccactgaggacaagatataagcgcccatagaggaaaacatatacagtccatactgtaatctataacaccaaacagagaaacctgggttaagatttgaccaacatatcaaacagagagaagtagagtttatatgccataccattgtactaaagtagaagccaattgttgtgtaatagcatgacagcattctgaagaaatcaaaccggtgccctagtcgataaatgtcacggctcagtgtttgttcaccattaccatttgctatctttgcctcaaacagagcaatttggttgagacccacatctcttcccttgccaacttgcatgtactcatgatgagtgacattgccttcacgcaatgttgaattgaaacctgcagcaacacaagtcacattaacaccagagcagttccagattccataaaataagcatcgatagggaataaatcggtaccggcaaatatatcttcactaagattgataattttggatgctttacttacaccaccccttgtgaggtggaaaagacgatcaaagatatcaggatggccatagtggaatcgaaccctgcagattgatgttcagaaagaataatgtcagagatgagcatcagcaaaccttgaatcatagttattgagactagaccagccatcgaaccggtcaggtcctcggttcgatggttcactggtttgaccggttgaaccgtaggttcaaagtggttcaataaggttaaatatataactgattcactccagacacaaacaacagcatggcttggtggttggtgcgccatgactccattcaacccatcctgggttcaactcccaccatacacccctttttcctatattctctcctccttctcatgcgtgcacgtggtctggcagagtagcagctcacggttgagcggtcgagtgctggttttctgaccggcttttaagcggaaaccgggcggcccaaccggtttataccgggtcatttgcacagacggtcttttaactggaccaaaccagcggaggccctggttccagttttttccggtccaaccgccggtccagtccagtcctaataactatgccttgaatcatgaataatagtacttcccacctcgctccttttgatttcacattttagaacccaactatcagtatgtataaaattatcaggactgattgtatgcaaattatattagtatgttcaccattaaaactgctttcagatattatgattttttagtatatgttagtgtaattttttttataaaaaaagaaggtaatgctcaagttacatctagagagccatgacaagtcaataatttcaaacaaaaagaatgggatggtaatatatttgaaaaaaaaatgaataagcaattaatgtggttatcatgccatgacaacgcaatacctcagggggttggcaagcacacgctgtccaatagtcacaaaactggtctcctgatttgacatgaaccatgcaagggatgaaacactgcacaaatttaacaaaatgaaaacaattgagcaaattgaaggctagataatccaaaatgatgacagaagcagttagttacaaatgaagcatgccaaattacctgccagtaaatatatgctctcttactccaagtattgatggatatctcacaccatcatgtttcttcagaaactcatccagcagatttctcattttcaaagcctcctccatataatgctcctgttcgatagtatgacataaatacggtaacaaaaagctaaaagaacacagttgcttgaagcagcaaacacaagaaacttacctgattcatatctatagtttggaggcattcaccacgagtaaaaataattgcatgattctgattttctggttttccttcacctaaaatagcattacctggaagttttatcttgtatatgacctacacaagaagtgatggcaattcatcaaattttgcaccaaagaggctgacaagagaattcccccaacagaaaaaaaaaagagcagtgtaaataagactaaggatatctaaacgatacaaagtatttctatactcctttaaaagaccccaatgctggtggagagtggtgaatctgcccacaacccatcaccactgccatgtgggtcccccaaacagtgaggtatatggaccttcccttccccaaactcaagccatcaaacaaggaaatttatttaaattgagataaaaatgatgacgaataatatgacctaaagatttttacaattagaataattttattttaatttttgaggcttcaaagtgtacggcggggttctcttttttaattcccgtcgcaaagcacgggcattcagctagttagaacaaaaaccgaaagatcagactccttccagcttccatacaatcaaaacaagtactccaatgaaaaaaggatcaacatcagttaattgtgcaaataggttcacctcagcacagcaaaaaaaaaaaaacaaaaaaaaaacataatttgtaaatgtgtgctgctaagctttagctctgcagagaacaaacatgggaattgtgtatcgaaaaagcgttttactatgccagagccaacatggggatcctttacaggctacagcgtgtatacttgatttagatttccttttattatacaagggaaaaaaaaggaagccttgactttatctccttccaaatgggataaaaaaagaggaattggtcaattaacctcaatcaaagtatactgtaccattttcacctaaaaaatacttcctccaatcattaatacatgcctttttaacactaattaatggccatagggagtacttattttacatggcattttgacttacctgatcaagactttgtcctggttcattaggttttgtaacggaagctttcaccaatgctgagtagtaaactttgtcagtcttcttgtttctatcttggctaggtgcttcaacctcatcaatataagcaactcgaagtgatggatatctgcaaaaaaggaccatttctacaagtgtctgacactgaatagacagcaaacggaacagtgataatattaagctgcggatgtttgtcctgactcctgagcaaatataatatctaacatgtcaagctttgttttttgttgtttcttcaatagatatgaaattagatgatacaaaatgttacacatggtactcccagcatagtaaataaacaaagcttacatttatttcattactcgctactaaaaataatgcacatggtactcattgttttaacccaattcacatatactcacagaaagacactcgattgcactgttgcactaagaacaatcatgtgtgctccaacttgattgcataaattataaaagaaataaagcaagaaaaaaaaggcaatttgtgctacatacagataacatatatccagatcattgcaatatttgattaaaacttacactatcacaacagctctcctgcgcattcaagggaaagaaaaacttacactgtcattagcctcaaaatatcatgcgcacaggcttcaccagaacgtttctggattccatattgctggcacgagacaacatatgtaaatttcatgtcagctatagctttgcattgagtcatcaattgcgagtcctcagacatcagttcagttgctctgtaaccttccataagatctaatggaaacaggaagatgagtcattgcataggtcacagaggaaagttcagaacatatagactgaactattagaaataccatcatctttggccatgtcaaggaaagcctgaagctccaacgcttttcggtaggacatcattcctctcactgtaaaaagagcaataatgacaacataaatgagaatagtacgaagtactttcactgaaccactacacatgatacctttgagttagattttcttgtgagaacaaaatataaaaggaaaacatgaggtggaaggaaaaagaatccagttcttgtcaatgtctgtcccctatatgatgcccaaaggcgaagctcctcttccaatgtttcatcctcacggagctcctcctcgctcttgcggtccaccctatcaaggaaatttttccattcatctttgaaaattcaaagagattaggaaacacgatattaattatgatggtcatcaggaaaccaaaggaaatgcacatgtaccttaatccaagaaaagaattgcataagggaggaaagaacctgggtagattttttgtaagtagaaaagtatggaaaccccatcctcatttggctcttccagattatgagaggagaaaagaacatcttccttgtaataaggagtcaagacactagcattgcagaaagttgtttcagcaatcaagaaacccaatcaaataattttatcaaacagtacagatgtctagttatcaaccaaataaaaaaaacataagatatgaatgtaccaacagcaagaacacatactaagcaaagaataagcatggagagtatgagatcaaaggagtcggtgccaatttgagcatgatattacaacacacttttgtctaaaaaatattacaacacacagaaaagtagtaatcaaaacttacgagaagggcaacatatgccgcacttttggagcattaggcatctccataaaaagagaatttgcaaagaacgatatccgtctcctagcatcaaggttcgtagggacatccatagcagactctttcacagtgagaagaaggtgaagcctctttatctgattaaaaatgaaacaaaagtatatatcattatagcaacaggaggaacacgagcatcatatcatgtattcacttcaattaggatataaatcaaaccttttccgtccatgcatttgattcctccacggggaacctaatagctttagtgaacaactgatcttgttgatcaagtgaagtcattccttcgtgttttctatttccaccatgtacagaatccaatagtctggaaggaaaggaaaacaataatatacataaaaccaccgcgcaaaataataataataataatatatatataaccagttaccagagtagttcaagcaaaatcaacaaataatctcaatcaccatactcttatcagcaaaaggaggtacattaatcaccaaagttcatttagagacgttaataagactcctagtattattaaacaaatacatggaaaaaatctgaacagtgctggcagagtatcaatcactccatacttccatagaacaatcagtattttcatttttctaagtgataaatttaggcagcaagcagatgtgttagacaacaacagaatggcattaactaaaaatatgaacgccaagaaagacaccatgctattatctctgtgaaaataaaaaaaaaaagataacatgctgttatgacagaaccaagctatcctcacccgcctagctggtcttgctcatccattatatcccttgtgaccacctcaagcatatcttggaataaaatgacaacttggcccaagtcttcttccttattcttttgctgtattcagaaaatggatacagtgagcgggtatcatctatgaacgcaaattatagccatgataacaaatttttataccagtaattcaagtagttcaatgaacttcttgctcagggcaggaaggctcctcatgttcaaatcctttattagacttcccccttctatgtgttcatcaacaattgtaaaaatctgctgtattactctggaatagcatgcacagattaagtcagaaattcaagagaaccaaatagaattttgcagtagaagcaaacaaaattgtcaccagataatattacatacattttctcacgttgaccaaacactaaagtattgatgatgtttttgaatgaaccatagcactctctgatagcataggaaaaatacggatctgatcccattctcttcttcagatcacgatcttttcctccactgtctgccgccatatccaatgctattggaatctaaaatccagtaaatataaacagtaaatgcctgaatgcaccaataaaacaagcacactttagaaaatggtagagaaaacaccttgctagcaagtaggaaaggtggccactggaatatattcaattcacggtctttacagtatgggacaagtagcaagtccatctccctgttatctataagatcttcctcacggaaacttgtgataattaggttccacatttgagcaaatcttgcggctattttctctttctcttgctcatcaccagaagtctaaaaagaggtatatgagatgaaacagatgatggtgatattacttcaatacttatctgtcaataatcaactcatgatgtcaagcttaagacacgaattccataccttagaaggtttaccagtaaaggcagcacgcaaacctttactcttgtgtgaatcagaaggaatcaagtgctcattgaaggcctcaggcagagattcaaaacgagatctcaacattcctaatgtccgtatctgatgtcatgaaacatgaaaggtgcctaccataagttcatgagttgatgacaattgataggccatagagcacagctaagctatacaccctccgtcccaaaaaagacttgatttctggctatgcaccttgacaaaaaagtcttttttttgggacggtggttgtacaccacaagataatgcttcaaatgagcaaaatataactggaaaaggtagcttaaacgtagagatgtcactgtgaataacatcagtccaagaacattgttttcttatacgctattggatgcagtacgcggtatattagacaagaaaactgttttatcagagaaagcaggtccaacaaatcaaaccagtcataaaatgacttaatgaatgcctgataacaaaacattttaccaacctcaccaagacgacgataagccccatagataccaccgatcaatgtagagaaaagtgcataccaaatttgggtgtccatgaagtagacctggacatatcaattgataaaactcaaaatattggctaatcaacttttgttaacaggaaacaatgaacaacactcacaagaattattggagcccacagcgcaataacaacaccaatgttattgttagctgcaaaatgcaaattgagattgaaataagtgtgccaaaaattccaaaaggtaaaaacatcagttttcaacttaagtaccacgagggaaaaattcatgccactggaaatcccggatcggctctttcattatatctttggttggctgtaccagaggcttgatctgcatggagatcatgagagtatgaatacacaccgcaaggtttcctttgatattttctaacacttaaccctccatcaagtagtttttatactttttaacataggtgctgatactcatcgatatgctggcatcttgaacattcaagaccaaggaaaatccctttttatactttatatttatgaataacaaaacataagtattgagaccacatttgggacgtaggaattttactaggttcctgcaagtattgaactgtttttaaagaaattcctacattcaaaataggatctgagaatacgccaacccataaagttaagatactgcagaaatgtaggcaatatattcacatttcaagttcgacacaagaacagctagtgatgaatgtggaataaagaataaatgagtagatacctctatatagaagcttactgtcaatttcattgctaaaaggaggacccagaacatggtatacctatcacaacacaactctaggtgattagaaaatgtgttatattagaacaatctgcaaagatatgtcaacaacttaacatacttgaagagggaaaatgcgccttcatgcattcctctgccaacaaatagtcgaggctgcagatacatttggcaaaacatataaacaactgtgaccacataaataccatcagaaaccaataggcagaaatttacctgagaccaccacatgatgaatgttatgaccttaacatttgaactctcaagaaaccttctgaggaacgggaaaagaaacagcatagcagcaagcatgtttggtgccaaatatatcacaacagccaaaatatacagtgatggctgattctgaccattgccaagccaacttttaattattcttgcaagacctgtaggactgtcccaggtatatgcataagtcacaggcaaaatcacaacccatgcagatgatgaaattaacttcaagacatatcgcagcttgactgcaaatgacatgcttcttcttgctttccagccaaatacaatgtccagaattgctgtattggttatacttgtcagtaagcatcactataagtattatatatacagggcataagaagtatgcatacagctagaagaacaaggtgttttttattacaaggaaagtagttaagcatatacagttcagttcaatgttatcaaaatttgttgttgttggggaagtatttgttaaggtacatgaacatgactatcaggctatcaattg

SEQ ID NO: 21508 - DNA, 3517 bp, Oryza sativa
tgtttctggccaaagcaaaaatacaaacaaaaggtcatagggtgatactcatgggtttcctctagacagagaagccagaaaagttactttaagccctttgccaaaagcatgttaaaaaaacagatactgctaactagactagcacagttctctatccaatattaaagatacctaccaaacaaataggctgtgccttgccaagtctgtgagcagggagaggaaaggagtgtacaagttcgactaaataccttgccctaacttcaaaactgcagccgttataaatatgctcaaaacctgcttaaatactccaacgtcgaatatatcacttggtgtgccaccattccaggcaataataatcatggcctgtattaaaatataagactaagaaatatgttgaaaaagaagcaatggcaagtactccaaaaaaagggataaatgtatatgaacggtcaaccaacctgtaaggataatatcaagaagatccacattctgtcgaaactacgaaatatgtgccagaatgaacggatctcgacaaaattaatctttcccatccaatggacattacctgcggatctgttctcctgcattcgcgaccaaacgagaaatgggtacccagaggattaatactccaagcaagtatttctttttcttggcattacattgaaggacaaggctggaaatgtaatccattccaattatctaagaaacgaaggcaataatgtacaagccacggataagcataagaacttaaaagacaatgcatcaaaactgtgcatgtgttggtgggtgtgtgggaggggggatccaaccaagaaataatgctacatcacctaaaaaacagaacaagcagtagcagcgagcatctgatcagaatattctatttatgaataactgggcttttataaattgtaatagtgcatcacaagccactactaacacttagatatgaaatatgcgcaagatatatctgtattatcaaagaacctactccattaagacgactagggtaagcatcttcaggagttttgaaaaaatcagcatctgctctcataggccatcctagccgaaaacaatccactgacctgcaatacagtaacaattccatgactttctttaaaaaaaaatcttgggagcataggatggtaaaagcgacaactaaaatctgataattgcttaccaaaaatactcatttaaatcatcatagttcctccaatgtgagtgttttgactttatggtcttgctccgttcagcttcctgtaaaatttcataagggcactaactgatcaacctgaaaataaaaggaaaataggaaatagtaacatatttgatacacaagtgaatataccttctctataactttgtaaattggagtcactactttcatcaggaaggcctcttcatcaccaccatacgctggtttaacattttcaccagtcattggactcacgtttccagccaacatgccatagagttcaaaagccatctgttaagatggaaaagcatcattaccatcaagatgatctcaccagaacaaaaacttatacatgcagagtctcatactaatacaaaaacatgccccaacgattatccctacaaactactcttctttctccataacatacatgatactataataacgcaaagtacatttcattggcatggtataaataacaaacctatcctatgccttatatttcccaccgtttatggacagttagacacgaggaattaaatttaagatttcataagctcaaaataaaattgcaagtatttctaattcaacaatatattatgaatcccatcagttttttttctttggtgtgtgtgtgtgtgcgcacgcgcacaaggacatagaactgcaggcacctatatttaggttcgtctgaatcctttgaaacatattcttgattcctcatactacttcttgtgttaacaaaacaaccagtcctccatatcacaatagtgggccacaaacaaggtgaaagggcatcaaagtacagaagagaccaagcggatatgaattctcctaagctactacaggttttgttagaatcaatggaattcctcacaaaaatgatctgagatgttcattattcactatcaaattcctaaaccagttatcaggtacaacccacaaatggagaacagtcaaaccaaagatatgagaaacctcaaatctatatcatgggaaagagcaatatcctctctgttgcaggttttttttttttacttacccattggtcgtacatgggttatccttcaaaagcctggtttactggacctggtggttgcgggcttgcggcgttgcggggcagttggagagggtggtcaaggagttttttacccaaggtcatgggtggcgatcttagtcttaggaatgaatattgacaaccattaattttcctggtgatccattatgttttttctttgggtgggtgtgtgtgtctgagttggttgtgtgcatcttagctacgtagaggctgggagtgttgtcatgacaattgtatcacctcaatgtaatttattgagttcaataaagcttccattatctaaaaaaagatcatggtaaagaacaagattatcttacatgatggtagatgtagcaaagacactctggcatgaacctcaagttagccgcctcaccccaaattagcaaatagagacccatgtagagaagcttacgctgctgaacttcctgctggatagttggcaacctgcagatcaattggccgaatcattttgagagaaggtagaataggaagaaaggttgagaccataatatcagtttcaaatggcataagagcaagaccaaaactataaaccaagtttgttcaaggaagttaaaacaatgaccagcaaatgacaagtattggcatctctgggaaaatcagtgcatgtggtccctataaatcatcccatttacttgacttcactgaagcactgaacctaccataaactgcttttgcggccaaggtacttgcaccacttcttataattcttaaatagcttcttcattacagcatctagagctctgtcgtccaactggaaaacaggattccaagaaaatatatcaataaaacatcaagtcactagtgtgcgagtgatgcgagagggtgggaaaaaactcggtcactcccggaacaaaagtgaaaaataagcacctttgcttgttgctcagtcttaggagactgccttatgtgcacatttgcaagtaacagtattagatgttctctttggttggacacattatctttctgtaaagaaagagactcacagttagactatgcacatttccagggcaaagtacatgttgtgatgtcaacatggagagtttcaccaggaagtggataactacctgaaacccaaacatggcctgaagccaatcaagaaggtctttgccagtcttcttttcatcaggcttcttttcatgttccttgggccacggcaggcctctaatattccttagcgcattaacagctgcttgaatctgtgtagtttatgaggaacacaatgggaa

SEQ ID NO: 21509 - DNA, 1724 bp, Oryza sativa
tgatgcgagagggtgggaaaaaactcggtcactcccggaacaaaagtgaaaaataagcacctttgcttgttgctcagtcttaggagactgccttatgtgcacatttgcaagtaacagtattagatgttctctttggttggacacattatctttctgtaaagaaagagagtcacagttagataatgcacatttccagggcaaagtacatgttgtgatgtcaacaggagagtttcaccaggaagtggatatttacctgaaacccaaacatggcttgaagccaatcaagaaggtctttgccagtcttcttttcatcaggcttcttttcatgttccttgggccacggcaggcctctaatattcattagcgcattaacagctgcttgaatctgtgtagtttatgaggaacacaatgggaaacatttacaaaggcttgatttggtaaaaggatagtattatttttaaaatggtgttgatttgggatagatggaaaccttggatattgcataataggttgataagtactctcaggatcgagtggcagaatattgtaaggaacatagagctttttcttttcctcaactttgttgtgtgtatccagaattgcataacggtcacaggaagagtgcattcgacagagaagaggagaagttgcagttagcaaagaatgcatggaacaataagctgataaaagaagaaggcgagcataacaaaaaggaagtaaaatcaagtaccgcttgatcgacttcaacagattgggaaacattgacggctttcaagacctcgaacaagacagcagcagtttggtatgccttagtgagcagagcactggacaagcagaagaaagacattgctgttagtaaaggagcagagttgtgtccaaaaataaaaaagagatggtgcgaaacggaagagaggaagggtggaagcaaccaaccggtcagccttgtcggcagcattttgaagtgcctggatgtacttcttgtagtattcacggtagaaacgttgcatctctcgagcgtcactctggtgaacccttcccttcaatgttggatcattttcctgaggaatggaatggaaaaaaaaaagaagaaaggaggtagcgcattacagatgaattgttggtagtggtgaacaaatacgggttgtactacataagtagtagaaagaaagggatcgggcaaggaagaaatagataaagagattaccctttcaagcctctgcagaagcgcggttttgaattgacgaacaccacggccattggaggtggggtcgaggcgatgagccttctcgaaagcatagaaacggcctgcaatgcaatgatgaatggagtagtagctagtagttgagtaactagtccagtaaggaaggtaaggaaggaagaagagcattgaattgaatggaacatacataggtaggcgacgcgtgggttggtggcctcgacctcgttggcgacacggaggatgggggcgatctcgacgagcgaggaggggacgacctcactgtcgaagatggactcgcccaagttgccgacggtctgggtgcggagcagcctcctcccggctgcccccgccggcgagggaaagggcgaggccgcgaaggaaaagtcgggcctcctggcgccgccgggcgccgccatcggaatctcaaatcaaatcaaatctcctcctctgcaacacctagatatcgagcaaaaggaaagaagagaaaatccgtcaaaaaggaaaa

SEQ ID NO: 21510 - DNA, 2495 bp, Oryza sativa
ccggtgaggttggtgtcctggaagacggagagggagacgacgcggccagagtcctggtcgcagtccacgtcgtaccagtcgcagcaggaggtgttgcgcgtccacgacgccaaattgtaggggttcccgagggcgtcgtcgatggccagaagcgccgcctcgtcgtcctcatggcattgcaccttctgctgctgctcatcgtcgtccttggccatggaggcagcagacaggaggaggacggacagcagcagcagcagcaggagcttcacatccatggtcatcatcatcatcatatatattggtcgtttaattttaccagcttgagctagctgcttaatcaattgccgactgatcgagtatgtatgtatgtatgtatgtttgtgcaattggagtgaggtcgcaagagatattgagatgcatatggtgcatgcaatgccgtgtatatatagcctcgcctgggccctgctctctctctcgactgaaaagagatcttctttttcaggtgttaaaaggttattaagttgggagcacctgcactactgagacagagataaagaagctaattaagatagataattttggattaaaatattgggaaaaagcgcaggcaagtgcgcgacaaagatacatggaggcaggccaggccatgcaacgccaatgcagtagcgacattcacttactaattgctcagatatttcacccagtagtagcatttgcattgcggacctaacctcatgtgatctgaatctgactgacatggatatgcatttactagtatttcgccggcctttccatcgatggatgcttacttgcgtggacagatagttgcagacggccaattgcaacaccagtattcacgcatgcttcacggattaacagcccttctagtgagggaggaggcactgaattctcatcactcagcacaggagtcaggaatcgtaatggccaaccaactggattgttattgcctgcagcacattaattgttccaacaggggcaaatgctctccatctttctttcttctattagacacaaaaggccttatgttttgtctacagtgtaaattaaatcctagcgatacctaaaattatgtagcccatcttatcctatcaaaacaaaacaacaatcctatggacaaaaaaacatcatggtttctggtcgaccaccggaagctacggtatcaccttccaggaccactgctctctctgtctccctccaatcgccatgatcaacgataatgcttcatttcagatggtttcagaccgtatcgctgctgaatgctccttcaaatgcaaaggggaggcttcaccaccaaattatatatgctctcctttcatgacgcatagcactgaaacagaggcacgcacatccatggtttccttgtcttgtaactttgttatctactaacgagccagctttgtttaaatataccacctttcctgaagttgcgtccatgtggagatgcagaatcaccttgatttcggtagcactgaaaaacacaatgttaaaatgtttagacgactttatgcgcatggtttttttaaaaacaaaagcagctgctagaaaaaaaataatagcacaagcagttccagctcatttctcaaagggttaggcaatccaagtaaaccatagatgtccaatatccaagttgctaagcacagctaatttgataatgctgcttttgtacgagagaattcacctgcaatgcattatcggataataatccagagtatgcatctaacaaccaatcacgttttcattcaaagaagtaaatagcaaaccaaacagcaaaattgttttgagttgacataccctgtagcatacaactgagtcatctgggtacatgacaaacagcttggtgccaaggcgagctcgacatgaatcacatatgctctcgtcagttagctgcacatgccttgacctctcctctaatctggtcaaccgtgcatcaaggttcgttgcgcgtgataaattatgaactacctatcaataggcatagagcgaaagagaaaatggtaagtcaaacttcacataaaagataagaccaacctgggagcaagtttgagttcaagagaaatattaacagtgcagaggcagaatagttcctcaaacagtcacatttcaatagaagacattggctgaaaaacaggaaatgattatgtttacctgcccttgacgatgatggtgcacccgggctctcagcattcgcaaaattgtatctgatgctagctgaagaggcatatcagcagataatctctggcaaaaataattatagctcaggcttcagaattcttgttctaataaaagtagcacaaaataggatgatcataccaatagcagcgataatataaacataaaagaacacggtgggatgcccctacaccagttttctattatccatgtattctttatttctttcaaagaccaatacacagagattaacaaacaggacatctcatttaccttttgttatatatcaactcctaaagagaagg

SEQ ID NO: 21511 - DNA, 1234 bp, Oryza sativa
  unsure (1)..(1234): unsure at all n locations
tactaataagtcaacatagaaaagctaaaatcaaatcaaaacatagagaatgtaccaagaatactaacaagccaccatgtaataaatactgaagtgaggtaataacatactgaatataggcatcatctcgaccaatctctgcacagtactgctcagcagcttcactatcctccagtttccttcatcataaatgaagaagaaccaacaagaaagttagggaacagaacttgtaggggtgtacaagtccagttaaacaaaacattactgctgaaatttacaagtaacaacaaaccaataaaaaataaatgcagcacaggatcttacagcgctaatatctgaagtacaatgttctcttggcccatcttcctatacaaaatagcctgccagaaggaaagagatttttatgtcaaatatgtcagatataagcgatgaggactatcaagcaagcataaatttcaatgggtaggacacanaatgagctggcatggaacgcgagaaggaagaaataaattgtataatcaccttttccagccatagctcagattctgaaatcacatatagcacttcttctgggtcatacaaatctgacgattgcaaaaaaaattgcaccttttcccccaatagataaatgaactgcatatcagaatcaaattctttattgtttctctcttcattgttggatcccaaacggactgcgtccatggcagatctggagagggacaatgcatatgacgtgtgatagtgaggctcatcacattcctgttcctcaatcaaccattgcaaatatctgcaaaacttagcatattcagatttcataaaagctgaggaatttattcagcaagagtacaaaaggcatagaacacatagagctttcaaagaaacatgcaaatggtaactatatttgattaagaactacctaatataatacgcatatgatacagtagcttcaagtcataatatgttatttcattgagcctcattatgtttccttcgtatatatttagaatacgcttaggtcctgtttgatttataccccaattcaaccatgccaaataattggcaacaccaagaaatttgtcacccatttggtttgcaacctaaagaactgccattgccaaattatttggcatcactcttatgcccatacaaattagaacccactcattcttgccaaaatttttggcaatagacaaatcttgtcattgcccaaaaaaattggtaacactaggaatgg

SEQ ID NO: 21512 - DNA, 1169 bp, Oryza sativa
gttaaaccttgagcatggattttttttgtcataaaatatattctaaatagaaccaaaattgtgtgaaaacattttgaactggtatttgtaacttgtctagtttttggtcaaaatctacaacgtttgactttttaaatcaaaatatgccttatagaaatcaacgaggagatacagcattacaattaacatgtggtaatgaggcataccagatctgaccaacgattagggtcccgcatgatgaatggaaatatttctgctggttgcatagtttccgagagcaagaaatgatttacagcatcctcgaaacgcaagtcgaaaaacaacaagaatccaagttgtgcatgcacaaaggaaatcatgtcatttgagatttccccatcggcctcgaactcttgtaacaaagaaatagcttctgcataactctttcttcgtagtagtgccttgatctgttccaccgctgatactttacggtagcaaaatacctggccaagccaataaatgtgtccataagtacagtgtgtgatacaaaatcgacatgataaaatggcgctgcacatttatgagagaatccattgtcagggtttcacttgagcatacaaaatcattgtcttgtcattggaaattgtaattattgagtattactaacaaacacagaacgcagctcagtagctaagcaatccggtagagcagattggaaattttgagtcaagttgcaccgatggatgagttgacatacctacgttaccttataagccgtagcaatcacaactacgtcgctgccaattccggcatcctcgctcgctacaattagtccacctgtaccaggccttgcaaaaggaatagcctgcaaatgtgcgccgttctttcttctgtagacatctaccttggagtccccggcaacaacaacataggggtacacctccgctatacaatccggcgtggtgttaaagacgaagctgctttcaacgggatgccccgatcggtccacgacgaccccgacattgtcgacgagcagcatgacctcgtcgcccccggacaggggcttcaccctgggtggcctggaggactcagggagcgtgaatatatcgcaccttgggcgttcgtggtggagaagagcgagtagcccgaggcagtgccgacgaagacggagttcccgacccaagcgagcg

SEQ ID NO: 21513 - DNA, 3688 bp, Oryza sativa
  unsure (1)..(3688): unsure at all n locations
ccaagctttagcacacaaataggacgatgattgattcatacttaccagtacttatctctacggttgtaaaaacagagtcctccttacatccccttgctcctccccccaacacacacctgagcgctgccccaccgtgaaaaaccaaaaaaaaaaagccattcatacctcagtttagttctaactcaaagaattataatttctttccatcaaggctcagatatgcagaacacaagatgcaccagtgtcaattttcaataacatgcatcatgtggtccctttccgcagtacatcgtagaataggatctgaactagcaattcaggagacagggaaacatattaccctgtgaattcgcctctcaatccatcatctgctccttgtacaattcacctgctcctcagggaaaaaaaagaaacggctaagcttaccatatcatacactattatcttaccgcttacagtagcaatcaaacaaaatctccccgagaacatcgcttgaagctaggtttaagccctatgcgaattacaatagacaacactcttacccttgacccatgacgggagatgaaatgagaaccaggcacaaaagggtgaatgtgctaaaatgatttaagatgtatcaaatctacacctctgattttaagtcagtcagctcaagcctgaccctagatgctcaactacagaaggcccaaatgacagatgatgccttagtctagttaatcccttagagtacattggagaaccttattaaacctgagagagtacattcttgtgaaaccaaattcaacaaaaaaaaggcgacaaaacagatttagcggctcttcttgctttcttttgcagcagaggattttgacgggcttgcaaccaggtagataaacacacccgccaaggaaacaacggagaccagcgacccatattttcccacaagtctctgcagatgacgttnggtaacacattagatcacaatgtctagccatatggttttcttttcttatcgcctatttcctacttagataaaacacataagtttacataaaacagagggcaatggcagtaccttagcctggaaaggtcaagtgcaaaagttgcatatccataagttgagtaccagcaccaaaaaagtaaggcgttgagacataagaatcaggaaaggttttactcttaatgaaagcaaatggtatgagataactaaccaattcaaacttctgttggggaggtctctcagcaagaatatcaagtggaaacatgggcgttgagtaagcctccttgagaaaaataattggcagtttaaactcaagaagagaatagtgcaggaatagtatggtgaaaatgataattagaacaccaagtactagggtcgtaatgagctatttaagctgagcaaagttagcccctttcactatgatccatggaataatgagatcgatcacactgcagtccttagaaaaggctcatccggtgctcaatactaaaggtatactcactcgattgtgatggcatgtgaaacaaagcatcacgaaacgaaaattcaagtttaacttgtgaaacaaagcatatgacaagcatcaaattgcatgagtacctgaagtgtaagtatgaaaattttgatgtacctgaagtgcggcctttgtgggaacacggtatgtgataatggcaggagagccctgaaacttgccctgcactttggtctccaagatgaagttgtgggaagcagtagcaccactgaaagcacaagaggtaaaaaggattgtcaaagggcaaatattggtgtgagaaagcataagtaactagtaagtgttgttactaacggatcaagtttttccacaatctttgatgtgggtccagagataagttgaaaagcctcctgtggccaagagtcgtcgttcaagctaacatcataggcggtcctgtaaaaaatgagagagagagagagagagagtagtaancaacatgatagaagaatagaagatgaatggttgatggcactggcagtgaagaatatagggcctgtttagatcccaccctaaaattttacaccctatcacatcgaacgtttgaacacctgtatgaagtattaaatataggctaaaaaaataaccaattgcacagattgcgactactttgcgagacgaaatcttttaagcctaattgctctaagatttgacaatgtggtgctacagtaaacatatggtaatgatggattaattaggcttaataaattcgtctcgcggtttactgtaattagtttttttattagtgccgaacacccaatgcgacaccctatataatacccggaaacgccaaaactttacaaccctggatgtaaacacccccataataaggattccggttccccttccctaaaatagcagtgtggttagatagatggagaaatggattagcgattgatgtgtgtgtatgtgactatcaatcatgtcatgtcatgtaggagtagtatatatgcacaatagtagcgtgataatttgtgttatcaacaagtgagtcagcttgacattattacacagagaaagggaaacatgggctcgcggctatctatcaagtctagctaacagtaggaattcccgttgtttttgacctatgcgaattaatcaataaggaaaggcggatagagcaataataggttaacaaagtgaagagagggagagagagatgtggatctaaatctgggggaagagggagatgagatggggaggggactgacgcggaaccctggttgtagaggttgagggtgacggcgaggcgctccacgcctggacccgggcgggacagcgcaaccttcttctgtgctaccacgaacggcgcatcctgcccggcggcggcggcgaagggcacgaggaggaggaggaggaggaagaggagagatcgccactgctgcgccatcaccgctcacggagattgctttgcttcttccacctcacctcgaccgaggctattgttacattacatgtgtgttcaagcccatcccatctattacatgggcccccgtgaatactatgcccatcagcccattttactacctcctgcctcctatgcggccccctcccctctctaccaaaaaaaaaataataccacctcctattcttattttttagcattgtccatatttatatatgtgttaatagatctagacatatatgaatgtgaagtcttataacctaaaactcaagaaaaaatatttactcaggtcctagttttaaaaaatactcaaaatacatataaggttaacaattgatgtattcatctaacggtttaaaaatatgaattgtttatgtagcttacttacccaacatgaaagtttatatataaatttcaagttttcacttttttaaaaaaaatatttttgagttttttatgagagagaaattacttacgcaaaagataattgacattagaaatgaggtatgttctcgaaaaaagttacattaaaaacagcaaaaaaaaaattcttgcagtatataatggataaataattttttttaaaaaaatataaaaatgtaaaatcttaaaactagtgcataaactagcattttttttcttttgaaacttatggtaggataaatcaaatattaaccgtatatggtgtattttaggtatttttgaaaatagtatagtccgatggtatattgtataataattgataacttaccgatatattatagaaagagacact

SEQ ID NO: 21514 - DNA, 1280 bp, Oryza sativa
aggagactttgacaagggcaacgtatgtcttcattatttactttctttataatctactcctatgttgcacttgttcctctgtttcatctgacaaactctattggaaaaagtcacatagtgtaacattactcacaacactgaatgagctcatgtgtttgtttctatctatcaccattgagccaactatttctccaaaaaaaaaaaagtttgatttgttttatcaatgttagcgctttatgctgttttggatagaaagctgacctatatatgtgttttggatcattatacaactttgtgttatgcacttcagtgcttgccctatggtgttttagatcattatactgctttgcatcatgtacattatgagtatgaattggtagtttgtgatcagcataatgtgtatgcagtgattattgacttcatggctagattacaaggagattagcaccaaatcctttttctttaaattgatggcctaaattaaatcatgcagctgcctggtttcatgaattatgaatttttgacctagcctacatcaaatcattcagctttcaacttctgcatgtggataaagtaggtttcaaaaaatgaatatttcagggtactggagggaaaagcatatatggccggaccttcaaagacgagaacttcaaatgtacgtctgacaaatgacctaatctgatcgttctttctgcttcttatcttgtggttgtgctgattatatgtcttgtaatgtttgtagtggttcatactggacctggagtggtcagcatggccaatgctgggccaaacaccaatggcagccagttcttcatctgcactgtcaaggtaacactgtactgatatgttcactgtgtactagtgtcgaaactcactcaaaattacattgcgctgactgctacctgcgaatgcagacaccttggttggatgggaggcacgtcgtgtttgggcaggttattgaaggcatggacatcgttaagatgatcgaatcgcaggagactgacagaggggaccgcccgaagaagaaggtggtcatcagtgagtgtggggagcttccagtggtctaataggtgccagagggctaatcttcttcccccggagactttgctgtttttggtttcatagtaagctgtgaacttatcgcatgttctccgcgcagtcagagatcatgctgagttgaggccaagatttctaagttgagaagaatcctctattgttcggctggaataaaacgttcttacctgtcgagggtcaggaaataatgttgtggttcatgaaag

SEQ ID NO: 21515 - DNA, 1954 bp, Oryza sativa
gaaaaaaattaaaaagacaagtcacgcataaaatattaatcatgttttatcatctaacaacaatgaaaatacaaattataaaaaaaaatcatataagacggacagtcaaagttggacacggaaactcagggtttgccttttttttttttgggacggagggagtatttactaaggccctgtttacatctcaccctaaaattcatcctatcacatcaaacgtttgaacacaaacatgaagtattaaatatatgttaaaaaatagctaattgcacagattgcgactaattgctctatgatttgacaatgtggtgctatagtaaacatttgctaatgatggattaaataagcttaataattcgtctcgtggtttattgatggattctgtaattagtttttttattagtgtccaaacaccccatgcgacatcctatataattcctgatgtgacacgtaaaactttacccctcagttgctctttgtacatcctctggttttggccttatactgggcactgcactaggtagaaagaactagctgatgctacctaagtactacattgcaggcttgcagctgatgaggaaataaccgatgaatttggtggtgtttgaatctcctaaagattaaagattaagtgtttcacgtaaaatgagaggataataacgtgtgattaattaagttttaattattataaacttaaaaatggattaatctgatattttagaacaattttcatataaaaagttttcgcacgaatcacaccgtttagcagtttgaaaagcatgccactttaatccaaaatttaatccaccgttttcaggacattcgaacggggctgttgctagtgttgctgtgacttgacttgcaacaacacagcttaatctgggttaataatactacaatttttaatcaggaaactgggctataataattactagtaaaaaaaataggggagtttatatccaatctttttcttatatgcaattcaagtgatgggactataggcagcaagtactagtgtagtatagtaaacattatggtgggtagatatatatatctccaccgcacattcctcatcgagtggaccttgtggtcagctgcatatccatacttgtatgtagagaagaatgtaatactgctccagtaggcagcatcctctcctctcctatatcatcatcatatccaatccttggttggttggttcgttcacaaggaggaaagcctcgagcatcatcatcagtaggaagaagaagaagaagaagaagaagaagagcaacaggaagaagcaagcaagaagaggaagaagaagaaagcaaggagaagaagatgcaggattggggtccggtgctgatatcttgggtgctgttcatcctgctgtcgcggggcttctgttccagataccaggcaagtgcaggttgatcgagttcggcaagttccagaccagcgtcgtctccatcctcgtccacaccatcctcttcttcgccctggacgccatcttcctcgtcgccatcggcgtccagatcaaccttggctcctctccctgattctctctctttgtttcttctaggtaatctcaattgcatatgtatagcagtatatatgcacctccatccatcatctctactcaccttagctcgttaatttgtactactatttgtgtgttccttccaattcttggcataatattgtgactcaaaggaattgatttcagagttactcattacttagtttcttcctccacatatatatgtagcaaaatcaaaagtgcaccattcatagcatttcaagtaaattacaactagcaaatttcccacgcaaaattaggcgaagccaatttttttctttttctttttagtaagagctggatttggcatacacatatattttgtttccatagatatttgtattttgtatacaatagatctttgaaagtagaattacatttgatatacaacca

SEQ ID NO: 21516 - DNA, 9331 bp, Oryza sativa
atatatgctatttacggtggatgttttggtgctgagtatatcaagaaattaggacagtacggaccatctactttacttgtccagacatagaaatcgcgattactagaatggaatcattatgtagagactctgaacatgtgaattggaatggtggctacgtgttgctatttgtttatgttatttcttgtacactattatatctatccatttttgcagttaaaagcacaagggtaccctaacatccttgtcactgctggcttaaatggtaggtggtctttccattttgagtttctgttgactggttaattgatgtatctgcacagttaactagtttgtacgaaccagatcctcgtgtgatgtactcggaaccggcgaaatatgtcgcaaagctaagggaactgaaaacggatgacaatcttctgttattcaagtgcgaacttggtgctgggcacttctcaaaatcgggaaggtaagctttagatgctgtcattttcgcactttgtgttcaccaaaggaataagatccaacaaaatgagtgactgttggatgcttgcaggtttgagaaactacgagaagatgcgtttacttatgcgtttatcctcaaggcactgggaatggctccaaaggcagcgttgtaaaagaaagcccttctgttccgggttaagatggtggcggttctcaagcattgattggctgattgtagtaaaacttaacttgagtcgatcggttgtgttgtgttgtgttgacatattcgactaaggccctgtttagatttcaacttttttctttaaacttccaactttccgtcacatcgaacttttctacacacacaaactttcaacttttctgtcacatcgtttcaatttcttcaaacttacaattttggcgtggaactaaacacagcctaattgatgcaagtcagtcagacattagctatgactattgactatggggttggttgccgcattttcatcctactactggttttcaaggccattagctaggacctgccgaagacatacatgtatatcagtacatgtatgctactatagtttgcaaaaatggttggtttggtgatttttttttaaaaaaaaacttaggaattggagaggtttttttgtttgatctttaagtgtattgaccaaaagcagcaagctggccggctgggtgggccaaaagatttggagtctcgcatcgctaggcatgatatttgttgaatctgtaatgtaatcgactttttttctcagatttgttcaatgtatcgtttgctgcggcaccttggacattccagcgtatttttggcacctaaaagggtgtaattctaactgaataaggtcagctacaactagttttcagagattttgaggactttgccacggaccagctgaataaacacatcgtgtagttttgattctttgagaaagttaatataagccaaaactatactttctttgattctttgagaaagttaatataagccaaaactatactttctacgcgaagctgaatttatgtactagtacatcattgtagaactcatataagatgaaacgattccagtttgtagatgattcttgcgttccctgggtcccttggagtatactcaaatatatgtatggcaattcttgtttagttatcgcaccatgtcataatttgctcctttcaaactcggtatgcattcggatagtaatagtaatgtgatcagctgagcatttgctgacattcgtgacatgcgatgcaactggtggttactcagaaactggagtacatggaaattgcgtgcaagctttgttgtggtggttagtttgattcagtgcaagatggaaatgctcagccgagttgcttgcctacattggaaggatggatcagttggctgccatgaaacatttcaatttccatgtactccagttgtgacaccatgtcttctacatttgcgagccaccagccagacagaaacaccaatcgcattgcaagttttaacaccaaatctccagtgctaagtgctaacctaccaggaataatcatggtctatctatgcttgctcactgctatctttgactcgccggtgttcttttctttctaccttcctcgctgagccacctgcaattatgaacgaaaatgaactgtaacctcacatacatatcacattgacaagaaaccaagaatagcactggtctgtagattttaaaggactaagtatcaactgaaaaatggatgggtatcatcggagggaggatgctaaatctgacttagactgattaggggcaaagcgatcgagcgcagcttggggtctgtaatacaaaaacgcatgctagggtgatgctcttctgttcctaagcaacaacaagacgaacaaaatatatgggagaaggaacaaggcatacccagcctgcgtctgcttcctttttccattggcacccattggcgtcttggatctgactccctcagactcagagtcactcgcaatgctgggaaaatacgcatcagaatcacttaagagagccagtctatcaaaaacacttggatcaattgaggtttccttaagtcgttctttcaaagtttccagcaaaacaatccctggaaattaaataaaacaatcgacccaacatggatcagcaagcaatgcgagatagataaagaggataaacaagaataagaaataccaagagcacgcagcgtgggaagatcatagtcgtgaccaagcacagcgaggctggcattttccgtgcataccatggccaaatccttcaaggtgatgagcaaatcctgcgattgagcagcccctcaatcggagatgagaaaccggaaaaagaatgaaaggcagtggcaaaagagaggaacatacaagctcggggtcggagagggtccggagccgtcgtgagtcttgttgctgcccgccacgagtaggagatgatggctcttcagcgttggtagacgcaggttttttagcctgagtattcaaagttaattaaattcatatataaagaggttcacagaaacacagatcaaaagcagtggagtaccgataaataaatagttcaatcgtagagataatataaagtaaattgaaaacagaatagaaagaaaataaatccctgcagacatgcaatattgatatctgaattatgcaggttaggttagggagaagaggaagcagcatcggcaatctcatcttgtttctttttggagagaaaatggatgagatagcctgacagacataatatgtttgctgtatttggttggtatgatgtgctagtatttgatttggtgtgagagaatcattcatgtagagtatagaattgagaccctacattcccaatcaataatgagaaacagtactagtatatgggaggggttggagtggagaaatggaggatggggaaacttttcacctgagctgaggttgaggctgagcctgagctgctgtggtcacggtctgctggtgtgccgacgtccctcatgccggttgcccctcgtcgtccttcagtggcggagccaggatctcttcatgcctagggctcaaattgaaggctaaaactatccatgacaattcatacactgaagtacagtgcgagtgctgaaaaaaaaaatgcaagactgaaatacgatttctaatcatacaacgaagtacagtaaaagtacaatacctaacgcaacatatcctcgtaattttcactattcattaacagtactacgtagagaacctgaagttgaatccagaaaataatattacatatgtaagtgattcatccattaatcattcatcttgttctgcagctcagttttaataatgttcatagctgagaaggctctttctaccattgccgtagcaacgggcaaaattaaggctaattcaattaagcgatataacaatggaaaaaccgtgtgtctattacttttaaccatcttcacaggctcacagaaaggttgatcttggtcagagcagcttgagaaatccaaatcagattacttacatcacagataaatgtgtcaagttgatctctgaagactatacaatcatattcaaaatagtctgccgcatatatcttagcaagttcaatgagcttatcttcatcataattggtaaaagaattccttggatcaagacaagtaatgcatctcaatagccgagtagacctttcagcaaagcgattgtttaaatcaacaataatttcatcaagtaccacattaaatatttcattgctgaaatgatgcaagtaagttacaaattgtttgtgatgtttctgggttggagtggactcactagactggacttggtagaattattttaaagttctatcctcttcatctaaaaaatcaaagcaatttctaattgagactaattgctatcaaaagcagaataaggatgtagatcgaacatcaaagattagagagaagattgacctggatttgatttggggaatcaagctttggatgagaaaggggaactgcgacgccaatgcgcgcgccgctgccgagacacgccgccgatgcgcagcgcagtcgttacagaggaagcgcgctgcctccttccgtcgattcgcgccgcttccttccgccccgatgcgtcgctcgctgccgctgtggtgggtggttttggtttttcttttcttggacagagagctagcagcaactggaaaagtaaaggatggggagagatggagacagatgggcgggcgagcacttggccaccggcggcggcggcggcggtggcggcggcgttgttcggagaggagtcgtcggccccccgggaagaaggaagaaagagacaagggaaggcaacgtttcggcccaataccttcatgggccggctgctccgatatactgctctccatgtgtatacgtatggaaaataagttcactttgaatacctcgatttggtccctgaaccgtaaaaccggatacaacacatcacccaacttaagtgcaaacaaagttccccggcaatattatccctggttttgacacctacatgacttctttgattaggtctttgtcccacgtcacattgacgtgacacttacatgatagctcgataaaaaaagagcaaaattgaaaactagaaaattgaaataaaatatattgaggcccatatatcggttaaacaaaaagataaaaatgccaccctctctacctctatctcctccctccgctggcaagctgaagttagtagggaggccgacgagcggggtgggaagggaggatgcgggaagggtgtccataactccatgtcaatgaggagggtgacgaaggggagtaggccagagccaaagtcgacgatgacaccgatgccagtgtctgcgcgggttgtgaaactgagccgctccagcccgttgcagagaaggggtgctggtgtggtgctcccagaacgcgacctccggatgggcgtggatgtggtgccacacgcgcaccatccagtcccgtgcgccacaaaagcgcctcctcataacttgtagaggcagaggaaacaataaggaggaagaagagaggagccactctttctccaattcggtcaccactgctacgattcggtctccgccgtacctcatttctcctatgcgagctccgcctggcctcctcttcctcagctgctccctcatcaacgtgtccactagccctgaggagattgtttgcgccaatagcccaaagcccgtcatgtggaacaacgtcactatgaccggcaacgacggcttgccacttcaacttcgatggcttggcggatggaggaggagcaacactgtcaagccgtcttgttttgaaggaaaagagacaaggatttggggagagatgttggagagtcgacattagcgaagatgctcactcccttgaatctggaatcgtagtttgaccttggcgacattgcgacaaggtggcgcagcgcaagcttgacgacgaggtggcccaactggcccttttccgttgcctctgtcgtatcctcctacttcaccgaagacagctatgaccccctctcctcttctaccacttaggtccaccggagcccctcttcgctaattgcccacagcaatcaccaccagccgcatccggggaggaagagaggagaaggggaaggaaagtgccaccgcctgggggagatagaggagagagagaatgaggtggaggaagtgggccgcactgaaacgtgggtcccactattttttaatcttattgtttgactgacatataggcccacatattttgtttttatttttaaattgttaaattttgcttcatgtgtcacatcagatgaagactgagtcaaattagccacgtagacaccatgttagcttaaacctcagtttaaactgtcttaggacctatattgcaccagttgtgatagttgagggactcgttgtttttgtattgcagttcaaggtcgaaaatgctgtcaagtaaagggacctaaagtgaacttattcctatatgtatgtacgcatgaatttgctttgctgaatttctgttgaatcaatcacctctgagcagagctttgagaagaggaaagtaaaagatcgggaagataaagatgagtcattaacgtctaattaattattaattattttaaattttaaaaaaagttaatttgattttttaaattaacctttatatatatatattttaaaataaaaatgtaccgtctcgttgtttgaaaaacatgcatacaaaaaacaagacaaatccttttttgcgttgtcgacagtttaaaaagcgtgcattcgtaaaacgcattcgtaaaacgacacacatcttcctttcttgttttttctcctcttgtcgacattacactctatatataaggggaaaaactacattaataacaagtttcggtccgtaaaagaaacagcagacctgacaattcattgcatcacaaaattagtactagcatgtcgtgctgtgccaaaggagtataatcctacagtggaaggaacaagtgataaacagatagaccaatgagtcagtaaccaccattttcctttttgttttcttctagcaacgtgtttacaattgattgaaagtcaatcccaccaatgagagtatgagacgagacgaaagaaaacagtagtgtactcgctctcctgtctaaaaaaaagtactagtaatactcctctcctggcacctatttttctctttgcaattgagcgccagtgaagaatgaatgaaaataacagttggtatgtatgcctatctctattttatggcagttgcacatcaccaccatcatcatcttagttagttggtgacctcctcctcctcctccttcgcctggcagcgggccaacacgcagtcctccatgaattcagtgagctgagaggtatacagctctggattgctccggtagtggtcgacatgaggcgacgacacaaagtcgcatgctctcacctcatgcccggctcgccgttgactctccacgaacgactccaccgacttggccgggattaccctgtcagcagagctgtatatgtacagctgtgggcattttggctgcttcgacgacaatagctccatcacacccgacaacttcctgttgttaaaaccaaaagtaaagttgcttatcaatcagttatttgttattgtcaacggcctgcatctatcttctatacttaactgagattcaatcaaagtcatacactttatggaccaatttttctaagcatcaatcaaacaatgcacaattgtggtgtgaccagacagagacagaccacaacagttggattggatggaataaaaggcacagagataagacccaacttttctcaaaatgctaatgactacttgtgaacatggctgagatgtttacctattgatggctgggtagtttaaaacaacatcgaacaacttctccagcgctgaaagtagaatggcctcgctaactgctggcttgggatgatccttgttagactccacaactaggacatcgggccttgcatcatttggtttcactccttttgccgctacgctgtgttttttcatgatagcagctgagaagcctgaagcccaaacctgtgttccaacaaaacatggcaaagtaactgcaaatgtgaaagaatgaaataataatgaagcacgtccatttgacacaacaatgcaacacaggtgcgcacaaagagacaattagccaacagttcaagaagcataaaatcatctcgaatgctcacgatgagttctttgaaccatgcaattaaatagcaaaccctacttttgttccaataaagttacgtgttctaatatacctgagaatcagggacagcaacaggcgctgagtccactacgcagcccttaattttgtccattgcagaaggatcctgcctctgtaaattctccagtatcaccccatagctgaagcaacagatataaaaaaaattaagcccgaaatctcagaatgaatgctaattgttaacgagaggaagagcataattaataccaaagccagccagtgttactgaaggtgtggaaaacaatcttcttcccatcctcctcgctaacccaatcagcgagatgttctgagagcatctctacattcttctcagccttccctccaacattgtagctaacaatgtcagacatggggagggtgaaggtcactgcatggtaacccctggaggtataccaatcggcatatctcttgaggtgcttctgcctcgagcccaaccacccgagcagaaccaccactgtctgagacttgccatgtgagtcaccgcagaccttagggtccggcagatgccagaggtacagaacatccggcgatgacgaggatggcatcgcagtcgtcactgcctcctcttccgagtagtatttggcaaactttgcatagtggtaaaccgtgtggatgacaggcaaagatgcaggaggcgccttagccgggtgcgaagtctgcagattgcgtggcaggaagtgcaggcgagacatggcagaagcagaaggtgctgctgatacatcgggcctgctggctggaatcgagacgacagcttcggcatccacggttgtgtcaggcaacttgtggtgagacagcctgtcaggcagctcaagggaggagacggcggcaaaggcggaactgccatggcagagagggggcggtggagcgaagccatcatggagaggagagaagttgttgtgaataatcagattgttgtttagtctccggcctcgtgttgccctaccctgtttcatagaggagaggaaaggaacaaccagagttagctgtcagtccgatccggtcataacacgcggtttgcaaaaattgaattgaataggattcggttggaaatactaataaaagcatatgcgtggcgtaggcaattgaccaagtatgataggcacattatttgtgtcccaattg

SEQ ID NO: 21517 - DNA, 13082 bp, Oryza sativa
ctctatgagtcgtctagtcaccaccgcttttttttattattttatttaaaggccaaaaacaaaagggccctcctcttcctcctgtttattccctggaatatccaccaagccccaaatcccgaatgctccatgactgctccctctatgcctctacacgttcaaactctatacggtcttcaaacatagtaatctttagttttatagcaacaatattatcatcgtataaaagtaaattcaaataataatattttgtatattttagaaaacacatcctacccctataaatatatctaaagactcatcgatatatcttaaggtagataaagtcatcatcaaatatctgattgtcgacgaatatatcgttaccattaaaagaataataattagttatctctatctctatctctactacttataaaaaataaaaaataaaagatgtttccaccgtccgtataaaataaaaagggcgacaaaaatttttgtcttaaaataaaaggaaaaaaaaagaatgtccgactcccctaataaaagaaagcgctggactcttaaaaaaaggacttctcgtacgtggaaaaaagatgtccaactcccctaataaaataacgcccgactcccaaaaaaaaaagacttctcgtccgttaaaaaaaagtccgtccaaaaaaaaggtccaccctaaattctataaatatccatatattttctcctctaattaattagaaaatctgttccttccacatcctttgctacatgatttcccttttcaatttgtctttaatttgccggccgtttaactattatcaatgatggccgaccgacgatattttttcttttttatcctattatttttttcttttttatcctattgcagattcgctttgattttggaaaaaaaatgaaaataggagatcaagtggatcaaaagacctcaataaatttttagaggttgggtatatttaatagggatgatcggctatgccatcatacatatacaagactgtatttggaagctaggagaggcatgtcaggtgaagggtcctcaactccgaatagttattatactactgaaaaaaacctttacccgtgcgttctttacccgttgcaatgcacgggcaagtttccatcatctataaaaaaaaaggaaaaaaagatccaaaagtgagaaaaatgccatttataagataatcggttcggaaaaatcacctgactcaacacgagcagaaaaaacaccggtccgaaaaaaatgtctgactcaacgtaagataaaaatagttttatataaaaacaaataaaaaaagtctgattccacatgagaaaaagcggatcgaaaaaaccgttcgactccacgtgagaaaaaaaagttgtttataaaaaaccgctctaaaaagaattatcgacccaacgcgaaaaaaagcttgcgcttataaataaaatctgattcggcactgtgcaatgcaaaaaaaaatgtcagattcaaggaaaagaaaacatccgattccatgaaaaataatcatatcgtatatattgttttatgtgcgtcttgatagctaatatatgttttgtctagagttgaccatacgagatattgtaggatttgattaatcctattattagttgcaagaatgagattaaaatagtatttcagattatatgtgtaaaaccactattaacaaccaaatttggcaatatcagcatcggaaatgaagattagatcgaggcgaaatcgaagtcggagatcgattcgggaacagagtaagagtcggctggagtccaaatcgactacgatcagaatcagctgagtccgagtcagactgggtaagccgatacagccgattctgacaatacgatttggtgtgcgacatcgggttgagttgatatgcttcaagatgattgccacgcatggatagagtcctaaggcaattgtatctattaattaggatattttatgtagtttccttagagatatgtttgggcaaaagtctgtcgcaaagacttatggtatcttatagtttgttagagataagagtcgtgtccggtatggacatagtttgtaattctcgggtataaatagaccccgaaccccatgtaatcaaacaacacacacgttcaatacaatctcggcgcatcgccacccttttgctttaggtttatttcgacgggttcttactttcgggttgagctgcatcggtttcgatcttcaacaagaggtaaaacttgttatgacggcttgcgttctcgggattagtgcttccatctttatgatactctaatattatttatgtaattcgtcgagttatcatatatctcatataatctctggcaatattgctatctaacctacaatcgactaacatctatcaatagagggcagccgattaggttaaatatcaatgttgacttagattatatacaatatctaccactctatgaaacttccaatggcttgattatctagatattgttcttcttttcatacttatagctacatcagttgtttgatcttatgagtcgtgattagaatctcaatctctagcctgcttcttggttgccgatgtaggatcgagatgtcgactagaggggggtgaataggcgatttaaaactaaatgacacctaatcaaaactaacctaagttgctaggcttggtgagggtgaactctaactaagcaactaagttatgttttgcaaatctagggtgatagtggctcaattatatctctaggaaagtaaatcacactcctatgtcaatgtttagcaatcctagggtgatatgatctcaagtatgtctctagaaatgtaaattgcacaaatgtaaatgcgacaatcaaatgagacaaggagacaagagatttttcaccgaggttcggaaactcgccggtttcctactccccgttgaggcgagccaaactccaccgctcaaccatgaagccaccgcacgcccccttcgtcaagggatgggcaaggcgggagtcggcccatggagaggactacccaagcctcgatcaatagggtagttcttccttcactccgaaggtggtgaactccaaaccactcacaaaccgacgccgggcctcctctacaatcttctcggagaggtcaccgggcaactcctccacaagccgtctaggaggcggcaacctccaagagtaacaagcaatgacccggcgtggagatgatcaatcaagtgccacactagctctacaaatggaagcaacgtacttgactcttggctaattaaccccctaacacactagatggatgaacacaaagctcaagtgggtgtgagagaggtgcaaggggtgtatgcaattgaattgggtgccaagagagcccccttgctgctggagggggagtatttatactcccaccaaccaaaactagccgttggggatgaaatcccctaactttgtgctctgccggtctaaccgaaggtatgtggccggtcagaccgtggtactctgcaacgactagaaaactagccgttgtaacactgtcagagggtcccatcggactggccgatcagaccggcgttgagtgggcggtcagaccggccttggctcggtcagaccgccatcagctcggtctgaccgaatacggctatgtatcggccatcccgagcagcaccatcccggcctctagggggccggtctgaccgctcatgtgccaccggtcagaccggccttatgcgccggtcagatcgccgtcttgcgaacggtcagaccagccagggcatgccggtcaaaccgccactatgtggccggtctgactgcccctagtcaggccgaaaccagtgaaatcccaagtgattgtgtgtgtgatgaaaagcgagcacaagtctaaatgcataatgacctaatgtggcaattaaaatcatctctttgctaggtcattacccctcttaatagtacggcgaaactaaaaagtaaactagcaaatttgatcaccctacacctcgatcaattctaaattaaagcactagttttactgtcttctttctctttgctttgcgccgtcaattttaatccatcaatagtcatccatgcgcacacatgacgtggacctaacttaaaatattatctccatagcaacggttagtccacaattagcgtttgtcattaattactaaaattaacaacggggacctagatgcttcagccgattagggtattatcggagtttcagccgatcttacctgatttagctatatttgttttatgtgctttattgacatgttaaatctgccctttacgttgagatcttgttgcatttaagtatattatacttttgtttggtatattctacttgctttaatatcttagtatagagtggtatcggagtactagccgatacatgctagatctatctgatcggctatgctatgaacatatatagtcccattattaatatatatttcgatctaagtgatttatactgtctcggcatggcgaccgatctatcccaatcacttgatttaagtatatatcgatataaggagtatatattgttaatatctacagccgatcgagtagatttagttctttcttatttattcatgactgccgatcgatacatatatgacatcggctcaaagataaatgatatgtcatcggcccttagccgatcagctatcatttataagtttaaccgcggtttctttgtctttatttctttttgattgcaggatcaaatcaactggcacgctagcatacccgaaggctagtttttgacctgcactggagttaagcagatctcccaggcctcgtgtttttcgtcaacaaccacaaataatcgaattcttttgggtaaaagaggcataaataatgttgccgcatcacgcatcatcgaggttgggctattacatggaagatgttccaatttttcttatgatatgtcttagttaagaacgatcgatacaaacattatcattgacatggttatacatgtgaaatgtgtattggcatttatttttttcacccgttgcaacgcaggggcaattttgctagtaaatacaaacacacaagtccaagcgagcagaggaagctatacgaagcatttgcatgcggactcctgttaatagcagctaaggaccgaatggaggaggaatggaatgataacatccttttatcttgtgccgtgcgtgcatcctaagctcacagtgcctactactcctttgcatttgcaagcctttcaacctcacccagcagtctagctgcatgccacgcgacagtcattccatgctgctaataagcatttgtactccacttgagacagtgagagcatatacattggtcagtgtcaacaatgcatcggattcggatgaccatgaatctgaagcaggtcagctttttctcttacaaaaacaggcctgtttgccataagccccaggaccctcccaggggttcagataaaaccgtttaatttatcaataccataaataaatacacaacaatcattttcttcatcaatggtatagtttatatctgtaattgcagtactaatttgcattgcagaccctaacaatgatttatcagctcttgtttatgttacattacaacaagtcaaataaataataaatctagtgctaacagatcacacgacttctcggttttcaatttcaccagtgcgatgaaaagactatgatgatatatctcatcaatggtcaggccagaacctaagctcctcaaacacatcaattgtgatatcgcccccaaagaaaagaattgcccacaatcttgcatccttcactcttcatcacctagtgctacattcctttcaacttcagctgcacatcactcagcccagtcctcatcgctatcatcgtccacgttgttatcctgtcatatgctgttaggattagctgggaggacggcacaacctcataacaacaagaagaagaataagaacaatggccataatgtaccaatctactacactctagctatcagaaaaacaatcacctgggaggaacttgagagcacttcaattttgtcatcttctacctgtgacagaaaaatgagagggcaaaggcaatcagcaaagtaaacaatgggaagggacattcaaattaaaatccctgatcattgttgctaagtaaagtacctgtgtttttctccttttctgacttctgccagctacatccatgtaaatacaatagtcagcttcatatgaagaatactaacatgtactgatgtactcagttaaagaaaagctgatagatcgttgcatgttgtgctaagagccactaaaatgcatttgtttttcccccatgcatcacagcttttacccagcaatatcaagtcttgtaaaattcaaatagcatatttagtatagagccgccgcaatagattttaattccatcatttattccgattcgacaggcttgagatggtcctaaagcttcatgaaatggattaacattttaaatgccccttacatagacaaaagctgaaagcttctcaagtaagcctcccaaaacctttggattattttagaacaagtcttctccattgaggaaggccttcagaggcttaaaacaaatgtaatcgcaccaaggtctattagatgcttcttaacaacagacttgctactgcacttaccactcttcttccctgttggatgtttttcctctggacttgctcgctgcttcttagcagcaggtcctgtagaacaatgccaatcacagatccaatcaaaaggaattttctttgtgtaataaaggaaaacacaagaagcctagaattgcgtaaatatgaagaaccttttgctgctggagatcctttcgggcttcttgtacatctctgaaatagaaatccttttgtcagatgctgaactaatttatttgtaccaggcatgaaaacagataatgttcaaaacacatatacggaaaaagaggtatgttgtgaagttggttcaattaatgcatcaagcaaacattatatcaaagttaagggtataactgtccgctatcataaggagagaaactattataataacaggtatgcatttccaccttttttttcttctgcttttttaaacatgctagacagagtggcctgaacgagtggctccttcttagctgagataggctgcgcagaccaatctgcaggtttaatgtcttcactttgggattcattcttaactgctggactcttcatctgcttcaaacgaagaaagcaaataaacacaataaaattatttacaaaagataaaagcttgattgacattgattcatatatctgaatcttataaaattaaattcggtatcactaccttctcatccatgtcctcagggacatcaatctcatcgtcattatcagatgaatcgtctccagatgatatctcagtatacctgcataaagagcgagggatctatcaagtatacctttttattctttgccttttttcgggtgggtgggagatgaacatatttgtttttagaaacattagccgttaagccaaataaatgcaggaagtaggcaatctttcagctgctaagcaacaactagagcccgtgtgcttttctgtttatccgagagagcaacagaaaagggtgaaactgacttacttcaaggctttcccagcagttctagcagactgcctaactgaaggtgcttgactagtgctttgtgtgttatcctcgtccttaaggtctgaatcctcggaagaatcaatgtcagattcaatcttaggggaaagggatcctgtggtggtttcctttggcggtttattgatggaaacagcttcatcacaggaagcacctgctccacctttaaaatcagaatctgcaaccgcctcatcctaccagtctgaaatgaagaagcacatgagatgagaggcacagtagcgtcgtagaagaagcgaaaattaagaaaaaggaagtaacatatatggatggaaagcacacgcacattctggaactcttttggaaaatccagtttcagttcttgtgggttttcttcttcttttgttccaatccaccaggcttcagaaaaaacaatctgccaaataaaacagcagcataagtaagtagttagcaataacagcccagagaaaagggacgagcatagcagcaattgtgcggatgcaagttccagttccaagatagatagagggcagggcaggcagagtaaagatgtgaagtttgaagtaaccaggctctcgaagacgtcatctgcagtgtcagatacttgttcttggggtacacatgcgtccccaacagcttcatcctcccctgaaacattcattacccacaataaaacatgcatatcatatcatctcacctacctgacctgacggaatagatagatagatataggatacctgtgggaagtcgaggtagagcagaggatttttggtgccaagatcagcgagctcgccgacgcggccgcccgaggcagcagccgcgggcgcgaggaggccggggaaggagaagaggaagcggctcttgcgctgcccgccgcggcgcacgatgtcgcggccctgcagccgcgacacggcagtggagggcgcgagagccgagcgcggcgccgccggctccccgcgctggagtaagccattagagaaggcgagggagcggaggcggcgccgctcgtcggcctccgcatcgccggccggcttcttcttcaccatccctccctgctcctcctttgcccctcgccttgcctgcgctactttacgcctcccttctggtaaagcgggtttatccacctctgtcactcttctccatttaaaatgttcattggttttattctacattaaatgaattatttacttcttcgtagaatagttgttaatgccaaaatttggtacacccgaagtcatcatcggtttagagtcaatatcggcttcagaatcttggaatcggccgatgggagtcgtcaaatcgtcagcagttgtgttcttggtggagtcggatcaattaaagaaaatttatccagaagagtccgagttcaaggaggatgcggtatggcaagttatttattaattatgaatagtttgttagtttccttttttatctttaggaaagtttctttcttgtcctacaaggactagtatttacccatgggtataaatatgtacacccggggttattataatctatcaatctctcgatcaatacaactattctcggcgcattgccaccctctttaccgaggtttttacttgtcatccggcggaacttggcacctgatgtggggctgcatcggctttcgatctctggtgaaggggtaagtcctacgtttcgccgaccctagtgaatctgttgtctacattggtgttgttcaaggctgcatcgctttgatctcttggatcgctctggtttggttgatatatttacctacctgatatctcaattctatctctaattgcattgtgtttacagacgtatcggtttaattgggactgtctcgattaggtctgatcttctgtcttagccgaaatatctctacaatcacaatgttgttataaatagatttgttatatccatcacattagacagatctatcggctcatcgagtattagattatcatatacaatctcgtgttgcatcggttaggttcgacctactagattattgttgataatataagtcttgttaagccgataggttcatgctagtgtcttatcggggtgctagccgataagttatctggacgttgcatcggcttataagaattgcatatatctataagttggatttagccgatgacaacaaaaggtttcactgatttatctaatcttgtggattttatgacatgggacctcctgccgatgaatgctttaaccgtcggatcagtatttatcctgtcatattattattagccgattggtttctactggattatattgttatatattttatcacatcatcatcagccgattgcctttatatcattatttacatcgagtgtcagactctacattggacatatagccgataactcaaaaccctatcgctatcggctggcatcagctatcggctggaactactacattggcttgtcagccgatcggctatttgatctactgtttatatatcttgtcagtagcaggatcaaactgactggcacgcccgcatctcatcaacctttggacctgcactagagctaagcagatctcccaggccagtgtatgtttttcacatcaacaatagtcttaggtggtgtttggatccagggacttaactttagtccatgtatttagacactaatttagagtattaaatatagactacttacaaaactaattacataaatgaaagctaattcacgagacaaattttttaagcctgactaatccataattagataatatttattgtagcatcacatagactaatcatggattaattaggctcaatagattcgtctcgtgaattagtctaagattatagatgggttttttattaatagtctacgtttaatatttataattagtgtccaaacatctgatatgataggggctaaaaagttttagtcctatataaacatggtctactattacacttttggaatgagggagtactatagtacagatgtgatatagtatcttatcttagaattatgagacaaactacaaatctagacaaacagattatgaatctgtagtctgtacagttatctattcggtccaaattcatagttataaaaatgtcacatctgtactatgtgcacttgtatttggacggaagacgtaatacggagtaatatagatttgcttttactagtaataaatactatgttcgctaacagtttgaacgttttaaatgaagtttaaaaatttccactttaatagtaatgattctactggctttcgattcagaaaatcattaagaattcacttacaattggctcaggacactatgcaatcagtattcagaaaacatagagactgtaatttagatagcccgcttttcatgaaaattaagctctatgtacttttttcatgaaattaattggctttggatagctgctgctgctagtagttattattcgtcattcttgttatttgtaagaattttctttggttgcagtgaaaattggtggtacaaactgaagtcattggaaaagagacgttagggtgggagggaagcatgtcaataattctgactcccctgatcctgataagatgcagatgatcatgatagaagtaaaaaccaacatcaggaatcctaattagcacgcacgcgctagcgagagaagttgcgcgcgttttccgaccacgtcacgacaactagggttagagttagggtttcagggtgggtcagggaaaggtggcgttggagagggggaagtgggggatcaggtttagagggcggtggagaaaagagctaacctgttaccggagggaggaggagaggactcgtcatagaaaggaggagcgggctcgccggagccagcgccggaggggagccgcccatcgttgccgctctgctccctcagcgacgggaagagataagggagagagagagagaaacccaaggaaagacaagagagagcactagaggtgacttgagataaaaacattacatataggtcatgtttggagaactagccaagagttattttgagagctattttttagcacaaggaaatagctctccaataaaatagctctaagttatttagatacaagggttattttgagagctatttggcttttaattttaatgtaccttcccaaggagagagagaaaatatactttttcagtgggccccactcgaaatagccccaattagcatcccttaggtgggatagttttttgggtgggttcttttcaaatagccctcaaatagctcacctttttgaatctttttgactatttgagctatttaagggagggctaaaaaatatccctgatcgaaacagggccatatagagtagcttttttatactccctccgtcccaaaataagtgtagttttagcaatgttcatgtctaacgtttgaccgttcgtcttatttgaaaaaaaaattatgattagtatttttattgttattacatgataaaacatgagtagtactttatgtgactatttttttaactttttcataagtttttcaaataagatgaacaattaaaacgctaaacacggatatttatggctccacttattttgggacggaggtagtattgcgtaggcagatgattactgtacgtagttagcaaaagagtggcattgtagtacgtgttgctcaaaaagtgacagtcgattagtaagttaaaacaaacaaaaatatactcattcccctccactcctgtaggagtacacacaggaccgatcaattggagtagcagtagtagaagaagagccaatgaactagtactagtagtagatgttgggaaaggcaggcagcctccctcaattaatctgaagactgacggcggcagccggagatggtggtggtggtgctgctgctgctgctcaacaaggaaaaggaggaggaggagacatggtcgttggtgtcgtcgtcttcttcctcggcgatggggtggaggcagaggtcggccgcgcggcggagtagctgtcgctgcctacggacgacgtcaagcgtctccggcggcggcacctcttgggcgaacaaggcggtgcctctcgcggtggcggccatgtaatcgatcgatcgatcaggactgactgtagcttaattaatttgtcaatctaattaatcttgaatgaattgaatgtggttgggggtgagtagaagacgacgaggacggacagcaacaacgaggcaacggggccaggaaggatccaggaaagcactactagtactgtagtagtgtacgtgtgggcagggctctgccgcgtaggagtaatactcctaggtaggagtagttgcctcgtccttgtcattttgttttgtgtccacgcaacgcacgcacgcaaatcgcaatcgcaatcgcaggtgcagctgcagctgccgcgcaacacaaacaaaacgtgttccttttcttttgcaaaaccaacaaacgtgtattgcgtgcgtacgcccctgcctgctaccacaccacaactttattttctccttcctgtaccagtaggactacatccatctggggatcctctagagtcgacctgcaggc

SEQ ID NO: 21518 - DNA, 4405 bp, Oryza sativa
ccagtaggactacattcatcttccactttaattccactcactatatcacaaattattttcaaatcatactatgtatgtccatttttatttaccactttttaacactttatatatactattaagaatatctccaacgacttcttcatccaacttgaaagggtctattcttaaaagtaaaaaaaattcaaaaaaattaaaaaaatatatcctccttaataggccaaatttggccaccccattttggttagccaaggatggaccgagcctcacagccaatacactcccccccatctaatacactccccccatctcccccatcggtctctctcccaaccccatctcagcaccggtgcactgctactggagggcgacgagacatggcgaggtggaacacggccaacaacaataacaacgacgcagaggaagcctgcagcaagccccgggttggcgcgagggcgaaggttgaaaaacatcgttcgtagggcctcaaactccctcctccctccctctacttcgagcaccgccgacgtccatacaggcgtgcggcctccagatcccatcatcatccaccacaggatagtggacgcatatgaggctacgacgacgaggacggagtgcttgcgccaggattccttccatccgccacaaggggggagagagaggggggtgaagaagaaggttggggaggttagagaggctgttcgagtgaaagaaaaacttgactatctaaatttttctcaaattgactaaatggatatttggagagaatattggagatgttctagggtagtgattcccagtttacccttagagcaactccgatccacgagagttgccatatgcatctccaagccaaaacttggttatattgggcaaaagtgctactccaagagattggtcaactggatggctctactagccaaatttggccacccatagccgctgccccaagtgtgggtcccacaccctttggctctctctcccatcgccctctgctcgctttgcttgcttggtctcccacctaccacatcaatccattgaaaacagtggcaacaacaatggtggcagtgccagcagcctcccatcaccgagatcctcctctatgcgatgcggtggtgatggcctccccatccacccagcacggaggcaccgaagaggcagcggcggcggcacctcccggcaacgacagatcggtcgacgtcccgctggactgtctctgccccatagccgtcgcaattgtgcgggagctcaagatcgtgtgttggaggtcatctcccatcatcccccctcccctcgcacctcaccttcctatacggtcgggtgtggtggcagcaggacaatcggctaacagtgacaagggtagggagaggatgacgatggaggggtagtgggcagccaatggtggggagatgaaagatatggagggatgaagaagtatatagagattgacatgtgaaccactggttgtttagcacgtgtaaattcctccctttttggcctagcggatggctgattgtaagagtacttatactgccaacattcaaaccccctaaatctttttaatctctaataggacttaaatgataaaactatatactcagctccgaaagatatctaaaacttttagaaaaacggttgtgctaaaagactggcgacaattttttgtttagaaaactttcgattttctaaccattagatgcacttcaggattcgcgcaacatatacggccatacgggcagaataaaaaaaatctcgtgtgggctagacaagcatcgaaccagctaggatctattcatcaaactcagcacacgttaccgctgctaggggtacttttttattattaatagtactttttagttacatactcacttacatcctatgtgcatactccctccgtctcataatataagttattttgactttttcttacactgtttgaccattcgtcttattaaaaaaatttggaattattatttattttatttgtgatttactttattatccaaagtactccattttaagcacaacttttcgttttttatatttgcacaaatttttttaataagagtggttaaatagtgcaagcaaaaaagtcaaaaatcccttatattataggacggagggagtagcacttacactctaattacagagtagttacataacacttacaccctacttacagagtagttacatagcacatacacatgtacactagttacatgatagttacagggtaattacatggtataaaattaggatttgtaatttttttcgggggcatatgcatattacttttgaattgaaagttatttttttcattctacatgtttggcaatttcttgacgttcaatcagtttgggcactaagactcgtggtttgtactagtgcggactgttttcctgttatcgttgataacaattcactaagaactcatggtttgtactagtgcaggctgttttcctgtaatcgatgatgacaattcctgtggttgaaaaatttgaaagttctggactaaaaaactgtcaacagcacactagctagtcccttagaaaaataggccacgttataaacttcaaaatgaaatggccacattaaaaaagaaaacttccaaacaaaattggtcttcttttcccataccctgtcggtcttgtttcccagtacgtagcttgcgcgaactcgctcagtgatgaagattaggagcgagattttaagagatggggatgggattatttttccttaaaaactggaaaacttgaattaggagtagtatatataggcaatcttttttgctacaatttcctttcttttatttgtttagttacgcgcaaattaaggttgtcgtgtttgaaaattaaaaaaaaatcaattggtagataaaaattcttctaccatgaatctttgttgcaaaatagaataactttaagctataaatacattcattcatattgatagcatatgtagcaggtacgttgatagccgaaaataaataaatgtgaagtttagagggcaggcatattagatatatgccctaacaaaatatataaatcctaaaaataaataagaagacgcacagctgctaatataaagaaaattaaggtggagtgggggcgaggatggggttggcgggcatgtcgtcgccggcgaggaagtgggcgaagagctgtctggcctgcacaggcgtgatcatgggaaccatgtggccggcgccgcggatggtgaccaaggtgaggccgtcgtagagcacggtgtagccgcccacctgatcgctcgtgaaccactgcttccacggcctcaccgtcttgagcttgagcttccgcagcgcgtacctcgtcgacgtcaccggcacgcggtcgtccgtgtcaccgctgaagacccagacgcggaggccggcgcggacgagggcggcgatgtccggcagcgtggagggcggcgcgtccgtccagttggtgagcgcgtcgctgcagggcgcccagctgtaggggatgccgcccgacacgttggcgtggagcgccgcctggacgtcgccgcggttcaggtagtcgatcacgcggtagtccacgcacgggttgtacgtgttgtaaggcaagccgcggcggaggcggagcaccttatcggcgaagcggctgcgggtgccattagtaatggtggttgtgccgttgagcgcggcggtgcaggacggagtgtagaggctgtagatgtcgatgtcgcccatggcggtgaagaagccgttccatgcggtgttgcacttgtccgtctcgttgccgtcgtcggggaaggtgcagttgcccttgatggcggcgtagatttcgtcggagatgacggcgtggtcccaagcgtactccacgagaccgcggtcgtcggagctggagtcgatggcggcgttgccgatcatgatgcccttgaggttgatgatgcgatcatcatcatcatgttccttcttcttcttgttaaaatggaggatcttggtggcgagctgggggacgtagtggccggcgtagctctcgccggcgatgtataggtcgtgccccttgaattgcgggaacctctccagccaattcaccaagaaggcgtgcgcgtcatgggctacgtacatatagctagtattaacttaaatcaatcattattctactccctccgtttcaaaatgtttgacaccgttgactttttagcatatgtttaaccgttcgtcttattcaaaagaaaaagtaaaatatttaaaactatatgtgtacatgaaagtatacttaacaatgaagcaaatgatatgaaaagaataaataattacttaaattttttgaataaaacgaatagtcaaacacgtactaaaaagttaacagtgtcaaacattttgaaatggagggattactatatttctagcactacgcaggccacaagcagataccgg

SEQ ID NO: 21519 - DNA, 2084 bp, Oryza sativa
aagggatatcaaattagagtagcacttgctgtgacatcacacaactgcatgcctcaattagaatgcatgggatatactccgtatataggtcctctgtctgtaaactctctgctctctttctcaaaactctatactaaattatataccagcacatcatctacataacagagtaaagaatacatgtatgtatattgatacaattatatatgagtttctatgccagaaccaccgcttgcttccatggcactgaaaagtattgagctctacattttgccacaggtaagatgaagaatgcagcgctggcgtcaagggtgcaactgccgtcaaaataaaaactctgaaaacaagccaagccacaacttccattttccaccggcttcttcttggcaaattcaagttggatcatcgcagacaaacctactacagccacaggcagctcaatccaaagcagctttggtcctcctaggtgctgtgggtttcggaaggccatcaagcaatggtcgcgtgaacgactcatggttgaaagtccatgccgagcttgaccacatagagatcccattctctgcatctgcaaagtttggtgtgctaggcgacttccgcactgatctaaatccgctcagaaatgaaccattgctcttcaggctggactctgggttgcttgtgtccatgttttgtcggatactagaaattggccttggcaacaaactcttggtcatcttaattgggtctgtaaaaacatcgtcctgggtatctgtggtgttagacacttgatcagcttcaactttttgccgccgacgaatggaaccatcttgctttgctttggctgtcccattgatcttggccccactggcaccgtttgttgctgaaaagccattcgacgtgtcttcagagttcctacttctgtcggtattatgtgtgtctggtaatctagatgaagtgaccaatgtttcactgttgatacgctccaaactgcccttactgtacaaggacatctcagtgccagcatctgtcatagccccattttgaggagttagaccataataggactgcaaggtgctcatggcgagtgacatttgctgcttagaagaattgtagttggatgagtctagcgaatccgtaacatctctgttttgctgattgtttggagcccacgctctgcacatagacagaaagctaagaatgagcctatcaacagttacttacaacagtggggaaaaaaagaagtgttgacagacgacaaattattaaggtaaacatttatacggtaagggtttcatctttagaatatcagcattgagattgaggtgaagtcccgttttgatttcttgcatcacaggatggattaaagagaggaaaaataaaggaaatgcgtacctcttcattttctgaccagaaccattgagccttacagaggatggcatgggtcttcctggtagaggtatgagcaacattttgtgtgcgaacatctggctgtcagtcatcaaactgtttgccctcttgatgtcagatatctgaaaaatgagaggacattgtttaactcactgataaaattgacaaatttggtgaacatgtacaactcaaatcaagcaagaaaagctaagtttggctaatatgaggcactgaaatatgcaaataaatgatatggtttagtaagtacatcaacccttgtgttgctttcgtaatccgaggctgatgttacttttatgcatgatgacttatgagtgaataagatttgcagagttgttgtgaaccacagttagtgatgctaaatggtagtggtacgtgaccctgtgatttataaattggccaagtcctaaaatacttctatttcttgtgagtctgtggaaagcacaacatttttgtaagacattacttcattaaatcatctatgtgtaaatagtttaggacggtgatatgatataagaaagagcatcagacagccggtaaaaccgaatagaaaagataaaaaaataattgaagctttgattttgtcacaggcaagttttctttcctatctactccatcaaagaagtagtggcaagatggcaagttttttagccggcggcagtaggtaaataattgct

SEQ ID NO: 21520 - DNA, 39546 bp, Oryza sativa
gtcatacattaaaatacggaggcagtagtatactcagatcagatgccaacggttgccttacacaaggggatagaattatatgtactctgctgccacttgtgcgttggttgcttgagagtaccatatgcatgatgcatcagagtatcagacatggctggtagcccaacaagtcatctttcaatctcccggccgttttctttttcttccttttgctatgttttgtttttatctcttatccattgcaaattgcagatagtgtttgattgggggaaagcaggaagataatgcgaccgcagacagcaacacattttggttttgcacatcttcttcagtaatgggtacaatgctttgacaaatacagcactaagcactacgggagatttcagatacaaaaatattagtattaaccacattgccgtgctgcagcacaagtacaagaaggttgacaaacagcgtccacaaccgagcaagagtgatacaggtaacacggcaagtgaagtgaagtgaagtctcccatctgtttagtactctgaatctcacaaaatttgtgatgcttccaacttcagtttcagaccatgcaaactccatgctcacattcacaagcaaaacaccctctaagctgtaatgtcatatatcttcttttcatagagttaatacagacagaaatatgctgaagaaacactagtgaattttcattgaattccaaagttgaaaacacttttggtataacatttgcaaaacaagtatctgtatttttctgacaaaaaaaggctgaaatttcctattgtaacatctccaaacacagcagcaggatagtttcctggcgggaaaagagggggaagaaaaaaaagagataacaagagagagcagtagaggtcacttcctctgtgtccttgtgatccaatccaaaacgtggcaacaatcatcatccccacggaacaccctgttctcagaacggtaggtcttgagatcacggctctcgtgcctgcaactctccctcttcatttccagtgaatcaggaaccagccttgcagcacggtcatggtaagcatcacagataaactgcgcaatggcgtcgaaaggctgcgaggcatcaacccactggtaaatcttctcgttgcggaaccatgtcatctgcctctttgagaagttcctggaggcagtctgaaacttggtcaggaactccaagaactcttgtggggagctgctgcctccgttgtgcctacactgaagcaagtactccatggcttgcctgtagccgattgcgcaggtagccgagttcatgccaggactcaagccgatgtcgaggagccaggaggcttcagagagtaggccacctgtgtcggccagcatctcttcgcacctcagatcgattgatctgtagagctcaacgcgtgggcacgcgaggaagatgcagaggaagtcgtagtccagctccagctccgtgggttgatcggcttggttggtgagactgagacgacggtggtgattgagattgtaagcattgtagggcaaggagaaggcagagggaggtgagcctgaagacctgatgatctcaaggcttctccttaaccttgaccagttgttgactgacaggtcccgagctttggggtcgccggcgttggcaaccaggtcgacggcttcttcccagcggccggtgtcccggaagcgggagagctcggaccagacggcggaggtgacgtccatggaagactgcgggacactgggcttgccatagatgtaccagcggaggtagaggccagtccctccggcgacaatggggacgcgggctcgggcgaggaggtggtcggttgctgcgcgggcgtcgtggaagaagtccccggcggagtagtcgtcggaggcgtggaggatgtcgatgaggtggtgcggcacggcggccctgtcggaagaggagggcttggcggagccgacgtcgaggccccggtagacctggacggagtcggcgctgatgatctccccggagagcctcttggcgaggtccaaggcgagcctggtcttgccggcgccggtggggcctgagatgacgatgaccttgttcttggtggcggcggcggcagccggggaccaacttctcttccacacggcggggcgcctgcatccatactgcataccgcactgggagatctgatggcgcgcggaggaggaaggaggaggagctttctggttctgggcggccggccggcgggcggcggcttcgtgtggaagggaagggaagaggatagaggaggagatggatgggatttctgaaagagagcctgtgcagatgtagaggcccaaaacaaacaaacaagtattgggctttcaggcccaaattggacattctattttggaataagttcaccgaaggtccctcaacttaacagcgagcttttttaagatcatttaaccacaaaaccagaaatctctgctcctaaactatacaaaactgtgtaaaaaaggtcccttgatctctggttttgctgacgtgtcagcaaaaaataaaaaaaaattatgggacccacatataagtgagaagaaaaaatgtgggacccacacttctttttgcttttcttttctcttttctttctcctattcgagtatcttctctactctttctccgaggctgccggcggcatagggagcctaagagagagggggcagcggccgctggcgagcgcggcagtgggcggctggaaagggggggagaggcggccggtgagcctgggagggaggagagggggcggttggagtcgatgccatggtggagcggctcgtggggctcctcccatcggagctacggggagaggcggaggatggaggggttgggggcgcactccgggaggaacgatgccgtcccagtgggatcccaccacgcccgcgcgcccggccatgttcgactgcccgcccaggatgaacaccaccttgttcgacggagggagctcaccgccggacacagccgccgtcggaagcagcagcatcatcatccgccgcattgttgcttgctaccgttgggcgttgggactaataatcaagcaaatttgaaatctactcttcctccctactcgtagtcaatttatactgcaactagcggcatgtctgtttgagtttgtttgacccaaccaaaccaaccaaccaacgaaagaaatactccactaaaacgaaacaacatccacccatgtcgatcgtgcgctgctacccccttcgtctccgcctaccgtaggttcctcctcaccggcgtccacatcgccctcgacgccgccctctgctcctcccgcacccggagccgccgcttgaaaccgcctgccgccgccgatgctcctcccgagcccggagcctccgcttcgcagccgcactcgcccgccgcgccccctgcgtcccaagctcctctccacctcccgagcccagagtcgctgctcgcccgccgccgcgctcgcccgccgtttgccaccgccgccgctccacagcctcgctcaccgtcgaagcagcacgagaggcacctagcgcggcgacctcgcctccctccgagcggcagcggcgaccttgtcttcctccgcgctcgcccgtcgccgcctgcctgctccgtccgccgctgcccggcccgccatcctctcaggctcgggggaagaatagagagcaaagagaagagaagaaaaaaaagaaaaagaaaataggagaagagaggacgctgacgtgtggtcccaccacatgccacgtcagccaaaccggggaaaaattagatcaatactgactagggactttttttttcacggttttatattgtttaggggtgaagatttctgattttatggataagggactttaaaaaatatcgctattaagttgagggacctccgatgaacttattccttctattttgcttcttttccacctgcaatttcttcccttattttctcaacgcttttatttatgttgaattccataattttcaatattaataagagcaagacaaaaacatgtgtaacgctccgcttttcgtgagtcgttaaaaactaactcggtaaaatcctaattgcgaaaattttcgttctttgtgtgagagtctaagttgtgccaaggatctcaatttaatcccgttgttccctctcatcgaaatcaaaatcctccccctcatccaaattcctcttccgattcgagtctctgaaatcaaaattctgaaattcaaatccttcctttgaatcctcgccaaatacttctacgaatccagaattattcaaatcccgcctcgaatcctttccttgactccaccctatgttcccgagaacaaatacccaagtattccttttgaatcttttccatgactcctccttgagttttccttgatacatccctaaaccctcgagttcgaatatcaaattgaattcgaatccaaaccctaaatctctccaattctatccaaatcagttttctctgtaaaagtctactttacctccctgtatttttggatggaccgattttcctcccccggcccatctcccctccccagcccatctctctcctttgccatctccctcacgtgcgctgcacgagccgtcgccgagagaaggatctctctctctctcgttttctcgctccctctctgtttctctctcgcgccgacaccgcttcccgccgtcgccgcccaaaacctccaccgccttcgcccattcccgcgtgcgcctcgcgaggtggccgaccggccggtcgccgccgacgccatgcgctgccgccttgcccccgctccatgccaaaccgaccgccgccgtcatcgtcgacgtcatccatggccccccgccactccacgccgcacccgtccaagagtgggagaagcagctgccctccctctcctcctcctcctcactctccctctcctcattatggcaagggaccaagcccctttttccccttctttttccctttcccgaccactgccggtgtcactgcctctgcgccgcttgaccgaccacgccaactcgctctccttgaccgcgccagcccgcactcccgcggttcgatttccgccgctcgatccaccgccttcgctgcccaacgcatccacgccgtcgccgctttcgcactgcccacgaaaccgccgctgccgcccgtgaacaccagccgagctcccttgaccgccaatgtcggtttccctcctccaaaccgacctctcctcctcgcctataaagcccgcgccctcccctctcgtttcgtctccgcctcgctcgaaacacccacgcctttgttgccggccgccagctgctcgcccccgccccgctgtcgcgaccacctcgccacgactccctccgcgtcgccaacgttgctcctctctcgccggtgagctcctcgcccaaattcttgccatttgcatcatcttggataagccccgagccgttcggttgctcgctcgtccccctaaacgtgtcgccccgccgttgctctgcttcgccgccgccgcgcccgactgtgcaccgccatgggccccctcgccaatccctcgcgccaccaccgtccttgagctccctaggacctccccaaaccattccctagcgccgtcgccgcccggcacggcctcgccgccattgccgcccgctcccgaagaccgtctctcgtcgccagcgaatctcggtgccgctccgtccaatccgacgccggaaacggattccttgaaccccggagatgctcccacccctttgaatcgaaccctcgtcgtctcgtcgtgttttccccttttgctctccggtgattgccgccgccgcaatccaccgtcgttggctcctctcgcgtcgattcctctcgccgccacgctcccggggatccccatgacctccccctggctgcccaaaggccgtcggccttctcctttgtctccgcgccgtgtcgccgcttccgccgccgcctaacgccgccgcgcgtgcgtcgccggtgaccatcgggtcccgcgtccccgcgtgcgcatcgcggtcgcgtaccgtttcggctaggcccgagtccgcgcccccttgtcccttccctcgcgcgaccacatccccgatccgacgagcttggtcgccgccgccagccaccgtcgtacctcccctctcaaatccgtgccgttaaacggattccccctaacctcctctagctgccggcggtagccgctcgctccggttcgccgccgctcgctggaacgcctcgtgcgtcgtcggccgtccgatcccgggcgcctccttctcctcctcctcccctttcgcccctgcccgcgtggccgaccacgtggcagccacctcagccccgggcccgcttgactgggtcaagtcacgcccagtcagcctcctccctccgtcttccctcccgtgcgcgcggtccacagcaagccgtgcggctgcacgtgggctcgccgccatccgtccacccggcgcgccgcgcccgaaccgcgcgcacccgaaaccctagcgcctgcccccgcgtgcgccctccccaccgtgaacccaaccaccgccatgtgggtcccgcgcggtggaccgcgcccaccccgtcgggcctccctctctccccgcgcgccctaatgggccgcctccccgtggccgcgctcggcccaatgggtggccaagccttgtgaatccctcgggccgcgcctaagtcgcccgaggaagtctaaatccgatccctccttccttttcttttccaagggaattaataattccttttccttgtccagaaaatccatttagacctccaaaattcatatccctcgatccgtagctccgatcgcctccgttccacttccagtaattccgtaaaattgagacctatttaatggcactactaataggtctaaataggatctttcttttggtcttttgtttaggtttttgattgtttgcgtatagttgcggttatcggattttcgtcgatcgcgggttttctcgaagattcgtgaagcttcgtgaagaccttgagcaaggcaagtcaccctttgatcaattgctcctataattgaaaagtcattattattttgtttgcaacttgcattattagaatcacacacttaacttgcttggcctcggtttgcgtgccaaatcgacggacctacccagtagtcgcactaatttccgtaggtcgtactaccctgattccttgtcgctccacccttgtggtacctcggtattcgtgctctctgagcgcgtataccaaatatcccacatacaccgttgtttgttgaaaacttgggaaatgggtttgtgaagccttcaaaacccgacatgtggtgtcggtgtgtttgaaaataaaatgaattatgaaaactcgcgatgcgggggttgtgcctatgtggcactgtcccgtattcgcatataaggaccgattcctgtgggaaactcatcgaacataatcaaagtgcaaccacaaggtggaatgggacaccctggctaagtaactagtcggttcagggaaacctcgcatgccaatagttgggaacgccggggcggggtcggacaaaccgggttcctggtaaggcaaggacgagaagcttgctcacttaccgatcaaggtggttggagttgatttgtgaatgcctaaaatgtcctatacttacgtgaggatttgatccttctatgtggcatgaggtaaccctgggtcggcttgggaaaggctttgtcgcgaacctctgacaccggccagtgtctggagtaagttcgtgtcttgtgggtaaagtgtacccctctgtagaggttaactaactgttcgaacagccgtgcccacggtcatgggcggatgtgaggtggttcccgttgcgtagatttgtttgcctgtgctttgtgaaaagttgttgtggtgtgggaatcgtaaccagaatcagcctatgtggcagatggacgacctgagtggtcagaaacgaatctgtgtgattcgggatgtctgcgggcatcatagactaggcttcccgagtggaagcggattgttgtgctgctgggtagctggactctgggagtccgagaaaatgaaaaaggctctgggagccgattaatcaagtggaatggctctgggagccgagaagtaatgatctgacccgggaggtcggtacattgccaaatgagctattgaaaaacatctcttaaagtcgaatcgagacgcaagtctcttttcggcccaaacttagaaagaaataaatcacttagtgatttcaaaatgtcttcaaataaaagatttgcaaaacaaccttgcctctcttccaagcttgcattaaacacctaagttcccgtgacttgctgagtacgaaagtactcacccttgctctatataaatatatatatatagttcctccgccctgaagagaagataaagtgaagtgaagattagggtttcgtcctggttcccagccgtcgcctgtggtgttgggtattagaccgttggttccgctgctgctgttgttggtgttcgcctcgtctgtgtcgtcggttgtattctcgggctgtctgagctgcaacctaagttaaggtaaataagtcatctatttattttaaagattgctatgatttatatctgtcaccgtgggtaccagcactatgtcctgggactggtaccgagatcgcggtttcgtaggaagcggttcgcgccgttttccctacgacatgctcctgtcaggtgccgttgtacggcggtatcagattggggtgtgataacatgtttatgttttgttctagtataacactgagcttgtcgagaaatgcaaatatctgagagaggaaagggagttcagaaatgctgcaaacagtctaacagcctcatcatcgttgcgctcatgcttataagccaaaatgtgttttttttaaaaaaaataattttaaacttgatcttgtgaatttttatcgcagttttatttatacaacatttgctttctaatcgccaaagtcatttacataaaaattttagccatcagtatttttttcgttgctaataagtggtaggaataggcataagcataagcaaaaacaatatgaccaagaaagaggaaaaaaggtgtttagaaatgctagaaaaatttgataatatttgaaagagaaaaaaagagatgaaggaatgtcaaaataattgaggaagaggaaaaaaggagtttagatttgctgccaaaagttgaaaaatatttgaaagagagttcacaaaaccagaaatggtgcacaaaaaggtgtttgggaatgctagaaaaaattgagaatatttgaaagagaaaaaaagagatgaaggaatgtgaaaataattgaagaggaggaaaaaaggagttcagaaatgcgatgaaggaatgtgaaaataattaaagaagaggaaaaaaggagttctgaaatgctgccaaaagttgaaaatatttgaaagagagttcataaaaacagaaatggtgcaaaaaaattaagtgaaaattaagatacaatagaaatggtgcaaaaaaaataattaagaaatggtgcaaaaaaagtgaattaagtgaaaattaagaaacggtgcaaaaaaaagtgcaaaaaaaattaagtgaaaattaagataaaatagaaattgtgcaaaaaaaaagaaatggtgcaaaaaaaattaagtggaaattaagataaaatagaaatggtgcaaaaaaaaaagtgaaaattaagtgtagatgcggggtatcgatccccgtacctctcacatgctaagcgagcgctctaccatctgagccacatccccatttgatagagagcttttcacttcctagtaacaaaacaaacaattgagacgagcgaccctgacaagagagagaagcaaagataagaggccgaaacctgcagccacaagcaagcagcacggcctcccgcttccacgtctcatctgccatggccaccaccgcctccctccacctccacctccacctcctcctctcctcctcccgccgccgctgccgcctcctcgtcccccgtgcccacaccgattccatctccaccggccgacgccgcttcattgccgacaccgccaccgcctccgctgccgctgccgtgggtcccctcgtcctaccccggaccccgcttgcgcgtgccgaccagccgccgtcgctctccgagtgggagcgcgtcctcctccccatcgaccccggcgtcgtcctcctcgacatcgccttcgtccccgacgacccttcccacggtaccctacgctacttccttctatctatctatctatgactatatatgccacttacctttgccaatgctatgcttatacatttacatgctatgccagcaatattgcagtgcatacaactttaatttctaccacctccgtcccaaattagtggtcgctttaacttttttcctgtaacgtttgaccatttgtttcatttgaaacattagtgtaaatataaaaaaaatgataagtcacacttaaagtacttttgataataaaacaaatcataaacaaaataaataataattccataattttttgaataagacggatgattaaacattacaaacaaaaactcaaagtgacaagtattgtgggacggaggtagtacttatcactcactgctttgtctttgtctttgtctttgtcttcgtgtctgcactttttttactcacccaatctttacaactcttgttatttttcctactgaatgtagctcaactgtttaagaaacactgacctttgtaaattttcaacggggatcaaaatgttacgtatattgctatttgattgatggatacacattcgaaaagcatctgtctcttgtggagatgtgctgttattaacgtgtactaccattttataagaaggaaaacgcctcattaatttggaacacagtatattgtcttctctagtttcaactcatcaaaagctttcttcatggatatgcatgcatatgttaccaaaaccaaaaaaaaaaagatgagtgatacaatgttccttatctttctaggttttcttcttgggacgagacagacgatattggaaacaaaaaatggaggaaacacatggttccctcgctccatcccgtccgccgaggatgaagatttcaactacaggttcaattctgtaagcttcatgggcaaagaaggatggattattggcaagcctgcaattttgttgcacacttctgatgctggagacagctgggaaagaatacccttgagtgcccagcttcctgggaacatggtaagtttgcatatacatccgtgttgtctgcgctttaacaaggatgaatcatgaacggaaacctaaaattggtagttgctgtgatatgacaggtttacataaaagctacaggtgagcaaagtgcagagatggtcaccgacgagggagcaatttatgttacttccaatcgagggtacaactggaaggccgctgtgcaagagactgtctcagccactcttaacaggtaggaaaaaattagaacgaatttgtgaaatggattttttttttagataatggaatgagaagtagagttctttcttagatgtatttacataatttgaagtgctacatttttttgaagtagctacctaatcgtctttacaaaatcattgcaccggatgtccatttaagccacgacaaattgggcatgtcatgtcatataacatctgatgggctgaaatgctaccacctccaaacttatttgaaaaataatataatactacatttcttcttagcttttctttactcttctcaggccatcatgcatgactaggtggtctatacataatatttgctccaatattttgcctttttgtttctggtgcagaacagtttcaagtggaattagcggagcgagttactacactggtactttcaacacagtgaaccggtcacctgatgggcgttatgttgctgtctccagccgtgggaacttctatctgacctgggaacctgggcaggttcggtagctcgagagtagctaacttcacattgttttggttatattgtctgcggtcacctggaaggtgtattttgaattttatgtaaatctgtttttgcagccattttggcagccacacaacagggcagtggcacgtagaatacagaatatgggatggagagcagatggtggcctttggcttctagtgcgcggtggtggactctttctgagtaaaggaagtggagtgaggactcttttcagctcaagttcactctaacttatttgtactagtttagttccaattcttctatcgaggccttaatgacgctcatgctatatcttatcttcatccaccaaaccagataactgaagactttgaggaagcgtcagtgcaaagccgggggtttggaattcttgatgttggctaccgctcaaaggtaagtgaaatggacttgccaaccacaaaattagcatgtgtgtgggcaaaatagattaaaaagctctgcattccatttgcaggatgaagcatgggccgccggtggaagtggtgtcctgctaaaaacaacaaatggcgggaagacctgggtgcgcgacaaagctgctgataacatcgcagccaatctctactctgtaaagtaagcagatatgggatatgcattctgaagatttaatttagctcattgctctgaaagtttatgtgggggtatacaaatgacattgagtgaatggctgatcgggcgatatcttgcgtatatgcaggttccttggtgacaacaaaggatacgtgcttgggaacgacggcgtcttgcttcgatatgttggctgacgtgcaaagtgcttcagtttgcctgtatcgtccttagacttttttgtacgtaatatgaacctacacttgtttacacggtcaggtatctatctatgtacctactgcaaaaggctgctgattcgtgttgaattcatccacaaaagagtgtaaattcttgtctgtaactgtagcgactgttccaatatgtgaactgcacatccacatgtaatatctgatatatataaaatggagcttgtaaagtgagaaggattcagatattgcggcctttgcaactcatgggagtgcccaaatgccacttctgttggaacagtacagtgatatatagagttgaattgcttgaaaaatgatttctaaaatttgcctcctttggatggtatcaaaatttaggtatgaacattgaactttcaaatccgatttattttacagtaaaaaaaggtaagaatattgcagaaaccgcataatctcatgatgccactcttgttgaattccggcattgaagacagtttgatatgaaacactagtttagtagtatccagaatgcatgctgaaaaagctttcttttacttaatcgatcacagcttcaaatagaatacacctcgtgtgagtgtatcaatggacgggatttcaggggaaagaaggaatttttgtgacaagtaactgaggatcacatcacgatcggcaaccttatcttgtctcgaaactgaaaagagagaggatttgcaactgatgatgcctgattggtactcctagccctaggaagaaaaaaagtggctttttttgaaggaaaaaaaataaaaaataaggattttttttccgttgcgggacgggagtgaaggcacaccaaccgcctcaccactcggataaacacacacacacacacacacacacacactccctctctctttctgtacagtgtcattccttccccttccgccgcttcgaattcgatcctcgtcgccggccgccgccgctaccccattccgagtaagcgaacgtgaaaacccttcaacatgcgcttgtgcgtgggatctgtgtatttttagcgccggccttatgcggccctccactttttgtgccatcccttttccaacaatttaaccttccttccgctccgccgtttctgggattttttttcccgctctagctagattcttcttcttcttcttcttcttcttcttcttcttcttcttcttcttctgtataatctgttcctcctccgcgcagcttcaacctttgtttgattctgcatgcaatctgatgaatccccgaggtctatgtctatctcgatcccctcccgcctccctttgttttcctttgtgtcattttcattcatcatcatcaacagataaacagtaatctctcctccagctccacgagtacccttttttatttcttcacccatcgattcggctcgtattactgtccgattagcgatttcactatgttgtgtgatcgattcaaaggcgatcaactgctcgaccaagtccggattacccagatttgttcatgttcctgccgatcatatatatatatatatatatatatgatattattactgagtggtcatgttgatcctcaagacaagcttttggtctttgatacctagtataattgcttttaatgggcttttgttgtttgcacctccctaggttttgtgctctatcgattatgcttgtaccttttgctgactagtcagctcatacgtgtacaactcacgctgctccaaactatatctgtttctgctaatttagcggagctagttgatggcttgtatcccctttcttttctcaacgccattctcgtggtgaactgaaggcagttcgtgttggttggttggtgggtttcgtattgaacatgctcatgttaattgtcaatgcaggctctccatctcatgccgtatgcacttgaagtgactgacagaaggccacagagcgtaccacacactcggtgtagcacattggtcgatcataacacaaacatcagcttttcaaaggttaatttatgcctggttgtatataagccttgtcttattcactaggtagattaccggtctcatctattcattcatggaaatttgctgacttggtattctttctttcattcatcagggccacctaatacacaagcctgagaacaggtaaacatccaaacaacatccattggatttgagtatgcttgatctgatctagtgtaaacttaagaggaacatatccgatactacaaacttgaacgggaatatctttaacggtttttgaacatatagataattcgggagaagaaataattattcccatttatccaaaaacatcaccttgctctagaacactgaagttaaggaaatatgtgtcgcttactgagcttcctcccacctgtatatgataagttatcaacagaaatatttcttcatcttattatatgattttgctcttctgctactttattaatgttgtatggctacctcaagtcctcaacctgtatgtaccaccatgttttttttccttattattattctgtctgaatgtctatttatgataccagcaatcaccgtactcaaatactttgtacctcaatatccttgtttttttttctcatttccctttgactggtatccatttctattctgatatctgtcattcatatatctggaaagctacatgtttactgtctgtttgtgctgttgcaggaacattacatttgcaactatttccattgggcacaactcggatcagaaattggtgccttttcttcctaacatattacaagatatcaacaagagaagctgtttcgcatcaggagctgctggcacagagatcattcagttcccacagccaataatactttactggttagactgtccaaatgaaaagaacatgcacgatcaagtcgatcattctaaaccattttccagtggaagtccaccaccaggaagcaccttaagacagcgtcagcataggagaaaaatcaaaaagtcattgacagcactccctcccagcaatgtgcttgtaaataattcttccagatctgttactgctcctgtaagatctgattctgatattctgcatgatgatgataagcctccaagaaagagccctaaaaagaaaggaaacaagaaagggaaacattacaggagagcagtctgcaaagggctcaatttgccatcagaaacccattgtgaagagaatattgatgctgcttctcctgttgaggtacttactgatctgctggctgataaattgtcagaaacctcatcctctgctagctcattggttaaggaagctcattttggtgaagagaatggcggggattctggatgtacaggttcatctaatagaactgtaggtgagatatttagctgcaaggatgttcattacttgaatgatgaatcaaacaattacgagagatcactatgtgcacgtgtttctaactctaatgatgcaatagcatattcattgtttaagaagttggaaagggacaacagtgtgaactgcagtgtcaatgatgaggtgagggattcatgccatccgataggggcccatttaagcataactcatgctgaagattcaaatgattcctttggatgcagctcatgctgctcaaagaatgttgctgatagcagtaatcatactgaaagagtcaagtgcagtagtgaagcctgcagcagcaagacttctcttccagttattcctgggaggagcagacaagattaaaggaaatatctagctacagtttgactgcaactaatggagtaataggcactaataagacaagcatagtggaaaatacagttcaacttctgtgtggcaaaaagtagaaaaacttaatgtggagaacacatctagagcaggatgtatggttgattcagctattcagaacaaggatgtactggaaaacattaacaaggttgcacaacataatctaacaaggtcaatgaaaataaatcagaggagaaaagcatgtaatcagcattcaccagacgagagaattgaaatggagcatgccaaagaaaatgatgcactaaactcatgtcaagcattttccagatataagtacaagaagcaaacatcaatactgtaccaacaaacaagtttatcttctgaccagggtacttctcagtcatcagggaactaccatgctcctaagaacggtattgtcatggtgccaaagaatcacttgcaacagaaagatggattgcctatgatgcaactagtatatgacaaggactccagtgttgatactggagtaggtagcaacggctcagctgatggagatgggagctcacaatctggttttgagaaagcagcgctagcatcttgcaacatgggttcttatttggtcccacaagacacatgcgaggaatgtacatcaaccatgcaagcggatcctcattattcctcaaccgaaaataaggccatatccccaaattcgaattccaggaacctatgtgctgatccttcccctgcagaaatggacgaaagttgttatgtgaagttgacaatggagaatactcctcaagaatgccctaagttgtattctgctactggaaaacaatgtaagttgtactctgctgctgcacacgtttcacagaaatgggttgctgttgggaagaaaaatatactccacttcgatggttcagagacttctgctgttgattcctcagttctaactaattgtattcctatttctgctaatattggtgttgaaaccaatgtttctagtgttcttgcatcagctaacaatgaagtcaacaaattagctgctgagatatctgataaaccaaactcgtctggacatcttgatttgagatgtcaaccgcatactgatactggtactgatttcaacaagatgagagaagctgtttgtgatgcttacagggcccaacagagagtggaagacgtccaagttatcattggcaggcctcttgctgattttgaacaatttatttcctctgcttctccggttctgtactgtagcacttgccctgctgatagaaacttttgctcaccggaatgggtaagagatggcctgtgctttcatcagagtactgatatcactctaagtagaatttggcagtggtatgaagaaccttgctgctatggtctggaagtaaaggctcaagatttccgtaggtctaaaggcttgtggaatagtcctcatcagttcaccacctactttgtgccatatctatctgcggttcaattatttgggcaagctaagagagctagcactggaagagttgataaggaagcagctggtatggatgtcacatctaaaacatctccatgtccgagctctctcccaatcttaacgaaacttctgccacagcaattgcgtgaaacaattagctcatctgatttgtatactaaaggtgatcagcagtttggaaatggagagctcatatttgaattttttgaatctgaacaaccattttggcgacgacagttgtttgacaagtaagtacataatcaagacctctgagaatctgggctttcgttctatcatatgttgtcagactgtactagaaacgaatcagaacaaatggttgataaaaatttgctctgtaaaaattgaaacgcttcaatgtttgtgagtaataatgagggcattgtacatctgcaggtaccaaatgttgtgcatatagttcgagtatgcatgatgtcttacgctgatatcattttattattcttgcactcttccctaagagtcactattgattttgaacatttcattactgcacacttagactcttgttaggatatttacttgtaagatgttcttattgaagtatattaaatgtgaatagggtaaaggagctgattagtggtgtgaagccatcaagctgccaaatatcaggagacccaaagaatttggagctcagcctgtgtgatctccatcctgcctcctggtgcgttgtatgctcaagtattactttcccgttgccgtctatcaaccttttttggatgtagacgcacagaaaaactaattgtgatcgcttgcttaaagaagagtactgtgttgaatttcaggtattgtgttgcatggtatcccatataccgtatacctgacggtaaatttcaggcagcattcttaacataccattcacttgggcactggattgttcagggcgcatcagagcaagctgatgacagtcgtgttgttttgccagtcacaggtcttgagtcttacaatgacaaggtactaaatgactgctactccatgaatcctgaaacatacatgcaggttgactgaagatggcttaatcttggtgatgcaaagaccccaagcaaggcttaaaagaattcttatacttgtaatgcaatgcaatgcagggggagtggtggtttgaggtgggcagatgcagtggtgaagaagatgcagcagagtcgagagaagaagagtcagtgtggagggaagcatccgaggtagtgaaagagagagtgcggacgctgaaggaagctgcaacggtgatgtccagggcaaaggtggtgatgtccaacagatcaaacagacatccagaccatgacttcttcttgtcccggcaactctatcaggagccaaggaagaaccactaaccagctgcatgcctgcctgtacatacatacttactactagtgtgtcttagtgccgtaacaactctcattaattactgtgtctgtctaagttgtgtgtacatatgtagtagtatgcaattagcgttgtaacataaggaaggaaaagccttcgttctcttcttgtacgtaggctgagaaagcaagtttgatgtgagcatcttcatcgtcaatgacaagaagaaaagaaatagaagagaatcatgatatgtttgttttattcctggtgctggagattgaagaaagtagaaaggcatctattatatagagcagtcctatgtagtagctaagctagtagtgacagccagagagatgtagggattgaacatcaagatgcatggaacacatacgtacacatactaccaagtacattgtactctgatctctctgagagcaatagcagcagctaataggaaggaaggaatcatgggcacttgagcttgccgttgtgtggattaaccatggtgtcgtagcaagggcagaggtggcgggtgtcctgcccacttcccgggggaacgcagttgcatcggttgcagcagacgttgcacatcttgttgcacatctccttcttccagttgttggcgcatcgccccgagcacgtcccctggcagtctatacatttagtggtaccattttaatttattagtacaattccatcgcctttcctctcctgcctgtaatgtatcatttacatacctatctttggagcctgcaggagggatctcgccctcttcacctgcatctgctgcacctgctacatcatcatatcatatcatatatgtcgttcaaattaaggcaagaactatatatagataagtagtagtatgtttgggtttgtgttccttaccagctgtggatgggaagaagaagaagcagcagcagcagaagcatcgacatggatgaagaagaagatgagcaagaggaggaagcatggcgccattgcagttgcaggagaagggacgaagaagccattgttggtcttggacttggagccggaggaggccatggatggatctgattctgagctagcttggagtagttaggaagaagaagaagaattaacaagggacagggtttagctagagttgagaggtgctgtgtgtatatatatatatatactcctagctagcagagtgagtgaagaaggtaataagcaggaaattaaataaacaaataaataaagcgataggtgatgcatttgcagatgcagggtaggaggaagctgcctgccctggccgacatggatcttgaccactgtcccagccgcgcggaccatcaccgatcaattgcaatcttagtggtagcagcagcttaaattagtaatgcccaattgtacgtactagctagtagattaatccctagctagctatgtgctcatttacttgtcaccgttggtcatgtgtatttcaacttttactataaacaatttatttattcttaattaaagctatatgatatactatatttgtgacacaatatgcattgctaatatagtatacctatacgaagaatatataacttcataagtaaaaaggacgagcactcaacattaaaaagtatctagtgacaattacatgaaaccgcaagaaacatcagcagtagtaatagcatgaaggggtagtattaaagagtattgctatacgcacccagttgtataactagagacatgcaaccgtagatcaatcatcaaaataagagatcatattcatatgtattgtagtcgtttataatcattgatcaaattcagtcacacttgagtcgaatagttagatcgtttacataataattctcttaaagtaatcaatcaagcaggtggagagggagggaaggttgttgcatctgaatatgtacacacactatactctactctagcagacgatagagtaaaaagtgaaggaacaattaagaagaagacagcagagcacgtacgcacgcacatgcacatggacatggcattgctgagtgcctgcgcttgttgttgttgagcacatgaatgcacgcatcgctactttgatctgttgttgggttggaagatgggaaccaactatgcccgtgccaccacatcacatgccttgtctggtctctgctgctaatagactacggctctcttcttttggaggggtagcaacccctccgggaatcccttccattcacacctaaaatagagcgatgaattaacacatgattaattaaaaattagcttaaaagttttagaaaatggattacaataacttttgtatagaaactttttgcaaaaaaaaaagcacgattagcagtttgagagaagcgtgcacaataaaaacgagagaggtgaggttgggaaccttgagggaagaagacagcctatagagcctactagggtttatattgttgttttctttgggttggaaactaatatctgttagctggacagaaacacttttgatcaactttgtacgaaaaccaaccaaaaccattcgattttcacatccttatctctaacggtttcgtaaaaccggacaacttccatagcttttcgatggtatcgcagactttgatacgcaatgatctgtactaggatagttttctcaagattcactgtctccctctccttcaagaccttaaggattgtacaatcataggctactaatatattaattaacatgcggtgctagttcatgtatacccatgatatacataaatcatgcgcgtgtcaccaacacaagtaacttagggcaccatgccctttgcacaattgatcgatcacaccatcttcttttctaccttctcttcttctaactctaaaatgtcaggcatatgcgaccatcttcttttccaccttctcttctaataatccttatatcttggcttttttataaagattatatatgcacaaattaaattttgtcatgcgtactattaaattgatttacaatttgtgacgctttgaaaggatgtcttcaacttggtggatattggcaaaggaatatatcgagaacccgtggacaggagaacataggtaaaaaagcagattgagaggtcaggtgaagggaggtggcggaggggaggactgcgggtgtatggatttgttgcttgtcagccttttgatttccaaatgggactatggtgtatggagatttgttcttttaagaaaacagtgtccgactcaatcaaagcaacataaatttggaagacttctcaggaacatgtagaaaacaaatatccgatcacatcagaactgcgagggtgtgttttgcgtgggagacaaagtgacagatcactcgaggcatagaagacggacaaattaaaatttgtttggaagccagcttttattttttataataggtaaagataaaagattatggagtaatgccaaacgttattggcttcgttatatgtatgggggtatgaaaacgggccgggcctcttctctaaagtgtgaaggttggaacttggaagtcggagagctctcaatgacttgctgctcccttcctttcggtgggcagcaatggcgatggcggacctttgctttgctccaaatgcaaatgcccctcctcctaccactagcagcccccttaccccaactttcttaagcaagccccaatccctacctaaggcttgccttccttcctagcttgggttacttgagattaaggaggcatatgccactcccactctcctccgccaacgacgactccaattcatccgttagttcacttgccttgcctcctcgtacttactagtctagtactatttacttctttacttcattcataccaacagcaggaataacatcccaacactgcttccaaattgctttacctttcttcttcatattgatattggctggggagtggggaacccccttaattctttccttttcctttttttttactttcgctaaccatcatctcttgttaaacaatttcttcccaactaacataaatagtataaatttaactgcctaaacaatttccaatttcatcctgcattgtacctaaaaatggaaattgtgttccttccgatggtgccaaccaccatttgtcctgtactattatacctcaccaatcacaccgcacccgccgtaataggatactaagagccccatcggttggccaagagttgattatgggtctatttggattgctaccatgccattttttggtagagttttggcactatcaattttttggcagggcaaaattgtatttggcttgctaccaatataaagccaatatatgaattcttgtgaagattattctagattcatgccaatatgaattctagtgaagattattctagattgatgccaaatctagcatgggcattaccaataatttggttttaatccaaaccaagcacaagcacatgtactatttgaactaccaaaatattggcagggctaagctttggtagcaatccaaaatgatttattagtgactacaataatttctggcttaaaagtcattgctggaaaagaaattacattgaaaatgccctaaatttaacttcaaaaattatgttttacaacaaattttggcaacggctgattctttttagaccaaacggtgaggccttaactgtaggatcgaatcacaacaactaagccaactagaggggggggggtgaatggttggtatacccaaaaactgaaaacttttagcggaaataaaagttaccatcgaattcgatgaagatcggtctgaccgagattgatctgccggtctgaccgcacctgtgccgtcggtctgaccggtgtagatcgatcagtccgactgctgaagttgcctgcctgcgcctgtcgccgccgccggtctgaccgccgtgtgctcgccggtctgaccgccgtgtgctcgccggtctgaccgccacgatgccggcggtctgaccgctggtgcgccaccggttagaccgctgaaacccggtgaaacacaaatcaaagaactcttaaagtggataacgactttattgattctctctgtgtttacaaagtacaccaacagcactccttacaaaaatttcgactaaactcgaaaccctaactcaactctcaactcaattgctctcaaaagcgataccgggaagcctcacactccccctctatttatacccgaggtaggcagcctaaagctatgaaccaaactcatactagaagtcctaaacaccttaggaaacactctagtacaagacacaaattttacataaccaatcataccaaatttagactcctttcaaattcgactccgcatcccatacgcacacaatacctccatcgtatgccatatggaatcttcaccaaccacgtgcatcaactctagcctaagtatcccgcatgatctctgaccaccacggacgtcgtcttatccccaagtcgactcctggtccatcaccgcaaatactctcccgaggcatcgagtcacctacacatagaacaaacaaagaaaccatattccgagatcaagctatctccaacttgactcatgagtagcaaacaacagtattacatacgtatagtatccatctagaagtcaaaacaatgaaacaatcacggatatccaaacaaacaacccaaaaccgaaaccgacacagagtcggccggtcagaccgcgggctggccggtctgaccgcacgcataccgccggtctgaccggcaacccttgcccggtctgatcggtcacataaaataacagcacctgtaattcacctgtaaatccaattatctccaaaaccacttcgtaaataaattccaaatatcaaaaccaataatctccaatgccaattgttcatcacaaaataacaattaaaaacacctttgattttacattaacaacaattcttcttttctatcttagggctgtgtgcttggatcttatggtagctctttaagcctccgaggtgccacacttaattgctgcagtttctgaactgttgtcttcagtccatctaactgattttatcatatgcaattggttagttgcttatctgtcccaaacttatccggtatcctacttcttactccctccatttcttttgacaccattaactttttaagcatatatttgaccgtcttgttaaaaacttttgtaaaatatataaaactatatgtatacatataagtatatttaacaatgaatcaaatgataggaaaagaattaataattacttaattttttttaaataagatgaacggtcaaatatattttaaaattttaaaaaatcaacggtgtataatatttagaaacggagaattacaaacttatagagcatacacacttcattatcacaagcacacaacaggcgtttgtgggtatcttgactacctgtacacattgcaaactgtttttttatgtcatctgcagggctatctgaactgaaccccaaccgaaccgttatttaagaaaaagttcataacaaagacatccaattcacttaactagcaaaaaaaatggaaatagaaaccaggaaagaaccatttcgaaaatccaaatgcaaacaagacaattgaccattttgaaatgatgaaacaggtccatacgaattagagtacaaatagagccaggggaagcccagcttttatgaaatagtgggatagagtctacagataatgtgaaatagaatggtgtgtcccagaaacacacaacatgatagcatgtggcttcagaagtcttgcatacttcttatttgaggcttcccatgatgaacaactaagtgcaatcaaatgggaggcaatttaaaggctaactgatagtagtagccaagcgaagcagtagtagaattctaacagtagaacatgacattcttgacgctgtccttgagtgcaggaaggggcctgacggctccaccacctgcagcacgagtgctgcgcgatgtagacgaacctcctccacgaccactcgccattgaaccactgtccgagctatctgactccatgtagaaacgggctctgaacgccgccagatgagcatagtatgctggtggaactgcaacagcaaaattggttgttaattcagccaccacaaatctcttactcccaacatatttatttattaactaattatgcatggaaaagatttcgcagcaactgtcacttaccaatagatacggatcgtgtgcacctcgcataactgcacaacaagtgattgcaagttaagagagagagagactgttcctcgttcaagcccctgagaacaactgatcatggggtaaagaaaaacttacgtgtaacagaggttgttggtgagggtctgcaacgcatcagctgtgaagttgttttcatcccacaggacgtggtaatgagcgggacggcttgtgccctacggagagatgggagttcatcatttcaattctcaacttgtgtatattatgatgatagatggtagaatgtctctcattgttgtttaccttgattccagcatggctgcacaagaagaagtcaaactccgtaggatggcaaatcttggagtcaacaacagtacctgcaatgcaaatgaagaatcaacgacaactccataaacagcgacactagcaaacccgaagctatagccaacctgcataataacgacagaagaacaatactcaccaggcaatatgttcccactcctgtcgactgaattctgatcattgtggttgtgtgcaaataatctcgtgtggtggcgcttctgaaccacaatgaaagtcacctgcggttggtaatttgcttcgagtgatgcacaagcctgagagggagcaagacacaaagattaagagaagtcataaagtctgaaaaataggggaaagttttacctttcggattgcatcaagctcatgcaatagaacctggtaaaattgcccttcactaacaccatccctgtgaaaaggcaaaacttcagctttatacttaagtgtactgatgcggcttttctaatcaaactcaaccctaaactccatgataaaaatcaaccagaaaacaaacatggccttcagctcaagttttctgcatagggaaattaacttgttttgatttcatggctccagtgagcctcaaataataaaatgtcaagaatcatattggctcagtcaagcatcaaagactgctgagattcaacaacctactaccgccaaggatttccagtagtcagcctgaaaccgctaagtatttgaagaatcagcttggctcagacaagcttgagtggtaatttatgcaagaacatacctatagaatattatccgttgaggcttttgaccagttgatcttttgaaggatataagaagttccctgaaaatgtggacatcaccaattaatactttgtgctaaaaagaaatagaaggacacagagaggagagatgttgagtgtggcatgggcatatacctgaccattccaccgcagatgggccctctatgaggatcatgcgtgatgttatacagatcatctattaactcttgtctgtgagattgagcagaaactaaaccagcatactttgtcacttcaggccaatcttgggaggccacaacctgcagggcaacatacatttgttcgcagattttgacaagaatggtcactaaatataaagcattagcttgttcaacttacagcagcaatggatgggctgctatcttcgccagggtgaggatgggtgacatcagcaccgaatataatagtaggcctgtcagttaccaacggaatgcgtctcgacactgcatcaaccagtacagtgttccttcccccaacctataagataaaatttatgttacacaaaacctgaaggaatccatacaaagatgagtagagatatcactagaccaccacccttcacattattcttcagagcaagatttgctaggatttgtttgttcattttaaacacttgctttgtgcacaagcactgggaaaccaatccaaggtcaatttggcatatacgcttcaaatcacctgataccaacagagtcagcatttgacttgaattttgagcacaataggacataaatcaatacaagttaaccattcagagttgcaaatttatataccataaagagaaccattgttatcaggaagcagtccgataagtaaatcgagctccttgtgctgtggcccaagtatgttcattgcatcatggaacctggctttcagagctcgttccacttgatcaggacgtgcatacatagatggaagaacaggctccaaagcaaagtcctacaattgcttgtaaaacagttactactgtacacaagtaaatgtctaaatgatgtaaaattgaatgcactatatagatgcttctgtatgtcaatgggcaaatgcatctggaagcattaagggatacttgccattcctgaggcctggcacatgcgggccagttcacgacaaaatccactagcaacactctcttgcacatttcgagcaaaattgacacatatccagctcctgactctaccaccatttaccattttctggatagcgagaaatgaaaatgataaggtttgagataaaacaggaacacctatttgattaaccaaacttaagaaacaaaatataatagctaggactagagtaagcacaatcaacattgccatatgagtgtcataaagtatgtgcaatgcagacaaagttcaaaagctgtaaaaaaaactgaacataatgatttgtaaaaactagccactacttatgcattaagtattatcactaccttgttcatcatattccactgaccaactctaggcaagcaatccttctctctgccagtctcattatacttgagctgcatgaacaaataggaggattgcgaggttaaaaatgttaaaaggagtttgaagcgatgttaatcatccaatttttttatgtgccttctcatttgaccattgaagctatgcttcatccatccagaaaagggtgacaacatgataaaaatgaacttgaaaaaccattgtttctacatgaattggtttccacctacccgaggggcaggtaaaatccgtgcctcaaccaaggccagacgctcgctgatcttaatgccaaactcctttgcataaggatcttcatggtaggagttgtgattcaccatctgcatacacacaaaagaaaatgtttttttatgtaagcatgtgaacttacacgtacaatggtagagcgtcataattctatgcaaggtgtgacatacctgaattatgtcacgctccctatcgtgtgggcgctgacatgtctcctctaaaagagcccttatctgattctggttcagtctcttggagtacctctgtccttccactattttgcagacctgaataagcataaaagttaagtatgcacccccccccttccaaaaaaaaaatagaattgaaaattttggcaggacaagttaaacaaggaaacagaacaatatcatagagctttgctagctaacctccattggtaggtaatttggacgctgctgattgccaacttgcagacaaggaagataggtatgctggatcgcaaatccatatgtctcttgaaaatattgtacaacagatttcactgtgcctccttgatcaacaggaaaactgtggcaaaatgaacattaatttcaggaagacaataatagtggcataggattgccatctactagtgacttaaaaggcaaatagcatttgttatgaacaaaaagagagagagatcaatacgtcagttcccgagttgcctgagatgtcaaaccagatatccgatacttccggcgcatgttgccacggtgagtaactcctaccttcactcctcttaaggccttcttgatctagggtgttgcataataacataaaattcgttatttaattagttgacaaaaatgatatacaaataagctagacatatgattcaaaaacataagacaaaacaaagccgttgaaactaaagattaatcattgggaacagatgcaataattatctgtatatcttctgtattacaacaaatatactgagttcatttgaggaatagctcttccaatgaaataaaaggtaaagatgagtaaaacaggatcaccagcataccttgacacgctcagcatctgataagggcctcgagcggatgtcagtatttaaaagctgtatgacaaaatctatgactggtaacggctcaaagaaagcagttgccgacatatctgaaaaggcaggaaaagaaaagaagatataaattgagggcaaaatgttcaaaaagtaagagtactaatatacaaaggcatctctgtttaaagttcaagattgatatttatgagttaacatgtaaattttatgtacatgagatccttcatgacatgatcataagcctggggaaaaaaatcaaagctaagtttttcaaattcagaaatgtgcagcaaacatggcattggtgataggataaaaaaaattggacagaccagttggcctcagcctgatgttttaaggcaaaggatttatgaaaaccaggctactttattgctggttccatgagtcttcaatgttttttttttgactggggtcttcaatgtattattacatacaaacataaatgcacatatgcacaagatcatacccatattcatgattcatgagaaagatcatgcgacagaaacagagagagttttaccaatattcagtgacaagcccatttgagtaggacgaatgctctgataaaacccacgccaggtttctagtccctcaccgagggatcgtctcctccccaggtcaggagagaagaaggatcgaccaaagggtgcatatctgtaagaaaaatgggattggaaggatgactcaatagtttggattgattctcctattatctgaatatacattctacgtaatgtttcaaagaaatctaccttgctgttggcaactctcgcaagacaatatcaagaacttgcaaggcctcctggggagcctctgcctgccttccagctagaaattgctcaagacggtgaagatcagctcttgcagcaaacttaatcaccacgttatatgttttctgacgcctagatcatagaaagaagagtcagaatatacaagatgatttgccctggtactagaatatcatggtgatcaaaaaaggaataggggcacacctctccgaaccagaaccatcatcttcctcaagcaaagagatgcgaaattcttttgaagtaaacggcaatggaccggccgtgtaaaggctcttcctaccatcataggctggaagacgtcctcccaagtatgacatcttgtgcagtctcaccaactcttccatcacagcacggctccgaattcgtgatgtaagctccggggtgattgaaacctgtcaaagatgaaccacaaggtggcaaataaaaactgagagattgaaaaacatgtaggaggagcaaggaggaatgtggcatggaaaaacaaacgcacgtcatactgatgaagatccttgtctggcagttgagcaaagaagtgattcgccttcactaaacatctggttccaatactcccacttccagggcggtgaggaaatttaaatgatttggtggacacaggaacatgttggacaatctcttcctggctctcacttaattggtactgcacagacaagtcctgaagctgctctgtgacctcaagagcaagagaccgtggtgatgatgcctccggagaggctgcttctggtgaggagacattggcaggaggctcatgtggagcatccattgcttggagcagctcgggagctatggcagacggaccataatagtgctgtggtctcacactgctgttgtagggctgttgatggcccaaatgctcagcagcagcagtagcaggacgccattgctgcaccaccattgcgccgcgaggttgaggagcagcaccatggtagtagcctgctcctccacggacaccatgtccttgtgggtggtattgctgtgcctgtgggtagtagctgccacggccacggccacctcctcctctcccaccaccacgaggctcacagtcctcaccaaacccaggcagtcttggtctccttgatcccattcagtcgaccaactcaatcaactgccacaaaggagagttaagttgacttcttaccataatccagacaacttcatattcacaaaatctatacagctgcagtccagacattatacaggttgttggtaaattacaaaggcaagctaacgaggtcaatatcaaatactacttgtttattactccagtgtttaggttcaacacggtgttgtttgtaagaatatataccatctatctagacttagctcggatagcatcggagaatatatatgcttcggacgcacggagcatgaactaattaatcaggaatagaaacaatttacagaggaactaacaggatggtaaaggtaaacaaattaaaacaggagttgaagaagtggagaacacgacagtaggctcaccataaagcacacacccaccaaatggcttaaaaccagagagagaaagaagcaaacctaacaaactgatcgagctttttttaagatcaaacaagagagttctgcatattgaactagccaaattaaacactcaagtacattcagttttaccaatggctcaaacatgtgaagagatcgaagaacactgttatgttgggaaaatagagtatataagaaaagtaagaaccagataaggcagggcttttaaacgccgaagatcacgtctttcatagaaaaaacaataaaaatgtggaacatttccgcatatcaatgcgttttaccactagggtattagcagggatagaacaagggagcgtatcccatgcacataggcactcgcgtatacacaccgtgtacaccaactaaaaattatcataaaaaattctagaaaaattcattcatgtacttttaatagtattacatctacgtgcaaaattgcatcttcaaattcattctacatagagaataacaaaaaagataaaattctgacaaaattgcaaccttaaaactgtcagattttttgttacggctaaaatataatgaatttgatgttaagattttaaccctaggtgtaatacaattgaaagtatgtgtatgattttttctagattttttggtgacattttttagttgatgtgcacgtgtctacacgtgaggtcctgtgtgcatagatatgtttatgttgccatagaataaaggataacggaagaacaggaacatcctgaaaactgaacactgcgcatagaagggaaaggcccaaccttttcccaacaaaacaactcacaaaccgggatatttttaggtagtctcacagacgtcgattaaaaagaaaaatcgcagcatgtaagtaaagaaagatagcatcaactcaaaagaagaaagcaaagaaagaagaaaataaacagaaagaggcgcatttcatatgcaagtcggtgttgcaaatcaactcgaacacattacattgttggacgataagcaaacagaaagggagaagcgaaggaatcagtaatcaaagcacaagaaactcgagatatttttcttgtttgaaagtaagggaagtcgagaaagaagttgcaggatagcgggaaaccaactgaaggaaagaaatgaagaaagagaaaacagatcgaagcatcttggatggtaggagggaggagctaagaactggcgatcaccttgggcagacggagagattcagctcacatccagacgaacctcgctgggcggaagatgaagaagagtgggagggtgatgtactagtactagtagaaggagatgagggaaaacgccaagaagaagaagaagaagagaggagagagctttacgctcccactaccagtaatgcagtgctcctgtttctactctctgccctgcttacctctgcttctaccactatctaatatactaccactcctacttaacaagattatttacagtagtaatttcatttctggttggttgcctgcttgctgagatattttatgttaatatatgcatacagtattgacataaaatatctgcatagggcgagtttagattggggtgtaaagttttatcgtgtcacgtcgggtattatatagggtgtcgtatgaggtgttcagacactaatataaaaactaattacagaatccattagtaaaccgcgagacgaatttattaaacctaattaatccgttattacaacatgtttactatagcaacacattatcaaatcatggagcaattagacttaaaagattcgtcttgcaaattagtcacaaactgtacagatagttattttttaatatgtatttaatacttcatcgaggtgtttaaacgttcaatgtgacagggtgtaaaattttatggtgggatataaacacacatagatgtttagactgacaatattatgctttgtaacccaatcagagtcagcatgcttaggcactaataaaaaaataaattacaaattccgcatgtatactgcgaatcaaatttattaagtctaattaattcgtcattagtaaatgtttactgtagcaccacattatcaaatcattaagtaattaggcttaaaagattcgtttcctaatttatactcaatctatgtaattagctttttatctatatttaatattttatacatgtatcaaacataggatggtaactaaactggaccttggttgtgtgtccatggccatgctgcctgggatacaactataactactcccagccatttcatttcaggcaaagcttttgattttagtggtctgtacggtaatacttctagtacaagagaaaagaggataggtttgcttaaccccgaaggccgagtgaggaattattaaagccaacaacaacacaacagtgcagtttacaacagtacgagtggtccacagtggagtactacgctctatatagtgagcagtgggccctttcgagtaggacccacacaagatctctcttcttcaatacttcaacacaagtagaagtatactcgtagtagtagtaattttttaagggcatgtttaagatctgtaatttttttcaccctatcacatcggaaatttaaacacctacataaagtattaaatataggataaaaaataactaattgtaattgatttgtgggacgaatcttttaaacctaattgctacatgatttgacaatgttgcgctgcattgcagtttacaggcggaatctataatttattttgttattagggggtgtttggatccagggactaaactttagtccctatcacatcggatgtttgacactaatttgaagtattaaacatagactacttacaaaactaattgaataaatgagagctaatatgtgagacgatttttttaagcctaattaatccataggctaatcatggattaattaagctcaatagaatcgtctcgcgaattagtccagggttatagaatgggttttgttattagtccacgtttaatacttctaattagtgtctaacatccgatatgatagggactaaatatttctagccccatccaaccagccccttaaactacgttaaatacttcaaatacatgtccgtatatccgatgtgacacgacaaaaaaaaatttaagctctgaatctaaacacagcttgagtgatcgagtgctaaggtttttactgcctcacaattaatgatggatgtgatgatcatcttcattagtattatgcgccagtatcacaattaactcatccggattcaggaggaggggaacgatcattttgataagcggggctttggctttggctttggctttgcaagtgataagtgagccaaacaattgcagtaagcaatggcatccatccatcagcttggcattggcactttggcagtggcagtggcaggaaacacatgcatgataggaggatcgtcctttgttttgcttttgtacgataggaggatcttttcggtttcaaggcatccatcatccaatcctttggcatttaaaccctacgacgattctcagtactattccttttcaactttagtgtacaactttttttttcttctcctctgaccaatcgaccctccttccttccttccctccttccctcccaactcgctattaataatagaacaagtttgttattgcagaacaagaaagctatcgatacatgattaatagagtacagcatttgcattacgtagggtaggattggattgtactaccagataaatgtcctgctaattgtgctcatactgctattaattagagtaccggatcgatcactcctttcaagcgaggagtgatcagcataggcatagcagcatggattccagtaaagtttgctttgctcactgatcatgaattggcttgggcggctataaagttagttaggcggcgtcaccagtgcactaatacgatcaatatgaatatgaaaaatgctagaatgatttatactgtaaatcggagggagtagtatatacacttctgcaccatgttttagtatttagtactactagtatatactccaagaaattgtatcagtacacgtacgttactactttatcttgcatgacgtcaggatcgagatcaaaactacgcgctcggcgccgtgcggcaaatcaaacttgaaagcttgttggatggatcattgcacattttagtaagttagttggagcagcttttgttttcactttaaagtaaaacgttgtctagttggtgcttggatgaatggatcttcatgtttcagacatgtcatttgttactcatgcattatcttaatccatctaaacctttatcttaagcaaaccaaccaagcaccggtacttcatggtatggcaaagctggcagcatattagttctgtccaaatttttatttctaacttaattttagagttgtttttttttctcatcatactctactttccagcattagcttttaatgtaggttggagaaagacccagggatttgttatgcccacaaacttgaaacaaaattaggaaaaaaaatccactttaactctcttaaatataggccagatcttaccctactaaaatcagatataatgactcttttaactattaaaagtaataaaaatgacttctaaaataatattaaggggatattggttaacattgccgtcagtccaatcatcataggaattgaaaaatagagagggggcatatgccatcccacctctctctctctactttcttccctatcccctcctctctagggatgcaaacgggtttgtccgcgaatccgtttataggtaaaattagtgggtaacccacgggtttaactcactagggttacaagcgggcttatcagcaaatccgcttataggcaaaattagtgggtaacccgcgggtttgactcactggttacctattaacttaacctataaatgagttcataaattgacccacttgcatctctagatgcgataaaccggatcacgacacaaaaatccattagttatcatctatttaacctataagtaaattcgtgtatcggtcctgcttgcatccctcctctcttccccaatatttcctcaacatcgtagcagtgcaatgcacataccagcgacggaagcagcagcatagaatgctctcgtggcctgataggcgatagtggaggcaatccaaactgctgcctccaagcatcattcactcattcctcatcacacgagagtcatcgtcctggtcagtagcgctcgatctccatgccctgctccacggatcctcctcctagccgcaagcatccttcttcaccttcgatggcgtccttcgttcctcttccttgcaactgtcggactgtccttcgaaacggtatatttagcgtcgcaacctttctggaggcgtcattcttttttagtgtctctgctttgtagtgtcgttgtacttgtaggctcagcgatgatcggttcggtacttgactcctttctcagtagtatgtgtttgtgtggttggtggtctgtcaagcttttcggattgtgcactatagtgcatgtttctcgacaaccaactatcaataaaaacatacttgtaacttttttcttctatcttaatatcatttggatgacctttcttcggtcatccgaaaacaaaccacaacagcatacgtcaatgagaaacatggcccttttctagttttcaactgccccagcagctagatcctcatatgtccggttcccttttttactcctagggactgtatttttctcccgctatatttaatggataggcatagtctcgtgttgttttcctttaaaatttttttggcattgatctgatgtggggataatcatcgatttttgggccacgtttgtggctttgtgcatagatcgtgaaacacagctgcccatgggcctacttgggctgcatttgaaaccatatccatgcaattcttcttctgactttggtgactcgttcgctatgaactgcggagccaagtccgtatcttatttgtttacactttactagaaaaggtatctatgcgttacaaaacattaaataactctaaaaatacattttgtttcataatctatgctcgtgcgttgaaacgagaaaaactaaagtacatcagacattaaataactttaaaacgattttttaaggaaaaaatacgaattaccccccaaaccatcgtggtcgaccgagttaccccctaaaccataaaaccgaacattcttcacccccaactatgcaaaccggataattaccccccccccccccgcctcaatccgcgatggtttaatcttatgtggcagtccagtcagcaaatcttttaataaaaaaatcggtgggcccacctgtcagttccccacccctctctacctctctctctcttctccctccctcaccggatctcaccggcacgggctacggtgtaacaccctgaaaattcgaccgacaaaatcaaaactctaaaaatacggattttcaaaaactttttaaactaattacatcatgccgatcttattggtctatttaatcgggatttgatctcgaagattattaatcgtgagtaaagaatagttaattaggaataaactttaaaaacaaattggtaaaataaatccaaattaaaataaagattaggtggggatagaaataaataaaatgttatcgcgaccatatttggatcaattaaatttaaatacgatggaataagaattaacctctaattaaaactcaaataaattatataaaaataaaatatgagtaatattaatctagggtgaattcattagttaagataacacaaatattgagtaaaatgcatatatgcaaaattaggaattgtggaatcaaatttatatggaaaatacactaaaatcgggttaattagaaaacagcactattcattgccccctaggtgttagatcgcgttccctagccctagccccttctctgcggcgttgccctcgcgccccgctcgccgtgcgccgct

SEQ ID NO: 21521 - DNA, 1199 bp, Oryza sativa
acgcgcgccgaccgctggccctcccccgtgcgccgctacctgtctttgcctccgcctttgctgccggccacacgagcgacctccgtctcaaccaccggcgcccgagagacattcgcctccgccgccaaccgtccgcctgcccccacgacgctgcccacctccccgcccctgcgcgctgccctgtgtgagatagagaagacaaaggagagagagaaagaggggaagaggtgtatgactaatgggtcccacatttttttaataaataaaatgctgactggattgccacgcgtacgttacgtaggataaaatcgctctggattgggtcgaggggggtaattcgtccgtttttaaaagttcagggtgagcaatgtctagttttcgggttaagagggtaattcggtcgattgcgatagtttagggggcaattctaccccaacccccccccccctttataatctatgcggaagactgtggtaaaaacttatacacattaattatatacatgacaggcgcaatatttgttacatagattaaatagaagatactttgtgttgtttttaaacactacatacggatacggtgtatatgagtttgataactttcctccgtttgatttagattataaagtagatcatctactggattatagagataagttaaacatttcaaaaattcgatgaacaatatgagaaaaacagagcctcttatgcattagtacaatatcatattaaccgcttcctgattagaccattatatcgtttacttcaatcctacatcaaatcttatccacgctactgtataaacccaagtacatatctcctctgtaaaaaaaaatataaacaaagaaaagaggtgctgctagccgtgctgaggagatagaactagagaagagctgcagggtcggacgaaatgcgcgaagtagaggttttcttagcgacagacgaaataatatatgaatacataatcatttttaatttttataatatatatactccctccttttttaatagatactgttgacttttgagcacatgttttgattattcgtcttattaaaaaatatgcaaatgtataagatataaatcatacttaaagtacttcgagtgataaaacaattcacaacaaaatgaattataattacgtaattttttaataagacaaatgatcaaacgagcgacaaaaagtcaacggcgttatct

SEQ ID NO: 21522 - DNA, 8841 bp, Oryza sativa
ttttttaatagatactgttgacttttgagcacatgttttgattattcgtcttattaaaaaaatatgcaaatgtataagatataaatcatacttaaagtacttcgagtgataaaacaattcacaacaaaatgaattataattacgtaattttttaataagacaaatgatcaaacgagcgacaaaaagtcaacggcgttatctattaaaaaaacggagatagaatataggtaaggtaaatttattattaaagcattcttgcttggtagtatttttatagttggtatgtggagtaaaaagaaggaaacaataatattgccatgctagattaatgaaacagattgtacataaaggcaagacaagaggagaagacacagctcacctgtgctatgtagccgtagaagtgcagatgcagtcggaggaggatattcgctgtgtctttctcctctcatctcaagtggttcggtttccattttgaccgagccatccatttgctgaataaatgaatggtgacggctgatgccacttccctctcctgtctgcaactcatctgtcacagtttcagcgaaagcgagtaaaatgcaaggagcaagatataaacaagagtagacattttttacagtatatacaagattcataaccgcattttccccatatctatatatacagtcgtcgataaattctacaggtacgttcaaatagaacgagaagaaggagcagaacagtatatatacgcgtacggtaggaagagggtatgcacgtcaaaagaagattgaagaagaggaatgcattgcaggcagagtgcagtgcagtctccatcgcatgtatattcagatgcaatgtattccggcggcttgctaaggctagtccacgctagtatatatgatgaactgaacttgttctattgacgtgcactgcaacagtgcaagtactctaataagctttagctaccactgctactactagtcagcaaatcaaagagtcttccaaaaaaaaaaaagggtcagcaaatcaaagggaaacacaaacgccaagtcctacacgtcttgagttgctgcacgctgtttttcctcgccttctttgctccaccacacaatgctgctactgctagtcctgtttctggtgcacccagccacccctgcccacacctatagaaaaccatgcatgtcttacatgatcatgataactttaaacgatgtattttttataaaaaaaattctatctacaaaaattttctataggaaagttgctttgaaaaatcatattaatctatttttaaaatttaaaatagttaatactcaattaatcatgcactaatggctcacttcgttttgtgtatctttctaatcttctcaatccccttctccccaaagtcagtcttacatgattgagagagaagagtgacattatgcaacacactagtcttgctcagtagtaggctcatactggcaggtggcaccgttccatatcctgcaaaattatactccctccattttttaatagatgacgccgttgactttttctcgcatgtttgaccattcgtcttattcaaaaattttatgcaaatgtataagatataaatcacacttaaagtactatgagtgataaaaaaactcataagaaaataaattataattacataaattttttgaatgagacgaatggtcaaacatgtgagaaaaaaatcaacggcatcatctatttaaaaaacggaggtagtatatatactacttatgtcacaaaataacttcaattttatacataattctctggagtatttcagaaaataccctaaaaaacaaactacgtactccctccgtcctataaaaaaccaacctaatactaaatatgacacatcctaatattataaatttagacatacctctatccagattcattgcactagaatatatcacatctagtaatagattcgttttttttttggaacggaaggagtatgagttatgaccagtaagcagcactgactctctcaacgataaactcaacagtatgtaactgaagggatcagtacttgagatgaaaaagaaacaaggacagagtagtaaaatcaggctaccatccatttagggcatgtttggagcagagtataaaacatgtgaataacacaggaaacaaaacttaggaatttgtttgtattgaaaaacacagcaaattaatgtgtatgaacaaaagtaataacaaaacacctgaatcatttttctcgtatcatgtcccttgtgatctttattacttctacttcgattccactggtataaacagattttcgtttttgacattggtatggtattcagatagaatacagcttcaataattaatttatattgtactaatatgtttgtaaagaacttggtccaaaaaaaatgtgtttgtaaaaacataacgaacatataatacttttcaaggtaaatctatgcatatgtattgtatgcatctaacattaatattttagtataaataaaaatgtgatgtatgtattattataaaacctgcaatttgaaaaaaaagagagagagagagatacccaaaacaaaaaaagaaaactagtgaaaaatgctacaactaaaagaagacttttccttaggccactatagaaggttttctatcacctgtcctccttggtccaactatgtcgagaatcgatgaagagcgggcccagcgtcaccaaacgggtgtatggtgtgtattcttctcctccaaagttgcaatcttgcctctgtgtgtgtggtactgtagcggtgctctttctttggtgggtgccacgtaggagaaacccagcaggagtcatttccaagtgtcaccagtgagagggcaggagggcatgtgagttggcgataaccctatcctcctcctgtcctggcccttgtcttcttcacgtctctccctccctccctctctagagcctatagccatagctcatcatccaccctctcttccttccttccttccttccttccacacagaccagaccaggcatcccgacactacacgcagactctcgactttgtcactagcatcattgcttgatgatcgatgctgagctgcaaccaagcaccagcatatcctttccttcattccttcctggtgctggtagaagaagaacaagctagctagagtgataagaggtaattgtttcctccaactcattccaaccttgccttttgcctgccaaactcctcatcctctgccactgcataccatacgtgtgcgcgcctgaatgcctgcctgcctgcctgatactgatacatacacacagcacacacgccccgctattgtaagtgcggccaccactagctgtgtttctgctctctgtgtttatcaccaaattaaagcaacgacactcacttggtctgtttctttttaaaatattatttctcctcctcacctcacacatacctgcatattatttgcagctagctaccttgcagatcgatctccggccagcgattgatcccatccagtataataatggcggccatcacgctcctacgttcagcgtctcttccgggcctctccgacgccctcgcccgggacgctgctgccgtccaacatgtctgctcctcctacctgcccaacaacaaggagaagaagaggaggtggatcctctgctcgctcaagtacgcctgccttggcgtcgaccctgccccgggcgagattgcccggacctcgccggtgtactccagcctcaccgtcacccctgctggagaggccgtcatctcctcggagcagaaggtgtacgacgtcgtcctcaagcaggcagcattgctcaaacgccacctgcgcccacaaccacacaccattcccatcgttcccaaggacctggacctgccaagaaacggcctcaagcaggcctatcatcgctgcggagagatctgcgaggagtatgccaagaccttttaccttggtatgtagtatgtctatcttcttaattttcacccctgccttgcagcgtgccatccattttttcttgccatgcatcatatcatggaattcatgctgctttctcatggcaggaactatgctcatgacggaggaccgacggcgcgccatatgggccatctatggtacttcaacaatcaccatgtcttgctccactgttccattgcttccctaactatgtatcagtaaatattaaaagcggaggtaatttaattttttaattcaaatcatcagatatcccctcacgtttaatatgagttgaaggtcactatatagtactccctccgtttcaaaatgtttgacaccattgactttttaatacatgtttgaccattcgtcttattcaaaaaaatttgtgaaatatgtaaaactatatctgtatatgaaagtatatttaacaatgaatcaaatgatatgaaaagaataaataattacttatattttttgaataagacgaatggtcaaacacgtactaaaaagtcaacggtgtcaagtattttgaaacgaatggagtattgaatagtaacctactgtttgagttgaaggttgctgtactacttactatttaacagcgactagcaagacacaaattggtcaagttttgatgtaatggtcagaattaggttattgatgggagttataacagacagaaactttgtcgtcagacttcacttgcatgcgatgcatctgtagatacaaagtcaatgaagaataaagtactaatagtactagtgcatttcttttaaaaccactatctatgcaagcatcacaattggacttgtagtaggctaaatggctccaactgtttcaagacatgtgaaaaaggttgagagaacatgttctctgagatgccaaatgaatatgaatccgtactactaacaatttcaaacttttaaatgagctagttcaggcatgaattttgaaatctgatgtatacctttttttttttgcagtgtggtgtaggaggacagatgagcttgtagatggaccaaatgcctcgcacatcacaccgtcagccctggaccggtgggagaagaggcttgatgatctcttcaccggacgcccctacgacatgcttgatgctgcactttctgataccatctccaagtttcctatagatattcaggtaactagctggtatatgcatatagcgaaaatccaaatgatgtaatactgctagactatattggttgctaatccctatggattccctgcacatcgcaattctagtgcaagaagaatagacctactaagttgacgaccaaatagttgatcggtcaacaatatcatatgacttgtcagccattagtctctgatgccactgttaacttttcacacaatttattgggcttagtccaggactccatgtggccacaatgcacagtattagtctaggaaaaagatcaatccaaggacagatatggtaggacttttcagaacagacaactgatagagcacagcccatcaagtagaatactaaggggaaggccataattcctatgcaattctatggagttgttaacctgaattaagcaggttctatacagaataaaagaacttgctcattatctatgatgacaaaaaaggaaggaaaagttccactgagaattttactgaacacatgaaaacccacaattggaaacttatcatctgtcctttgagtttttacagaccacatggtgtataataatatgactaatcaaatgcaatgcacgtatgccagcctttcagggacatgatagaagggatgcggtcagacctcagaaagactagatacaagaacttcgacgagctctacatgtactgctactatgttgctggaactgtggggctaatgagtgttcctgtgatgggtattgcacccgagtcgaaggcaacaactgaaagtgtgtacagtgctgctttggctctcggcattgcaaaccagctcacaaatatactccgtgacgttggagaggagtaagtgtcaatacagtggttttcactaatggtcataagctgtagaacagaatgtcggcatatatatagttcactgatcctaatacttcattttattttcacagcgcgagaagagggaggatatatttaccacaagatgaacttgcagaggcagggctctctgatgaggacatcttcaatggcgttgtgactaacaaatggagaagcttcatgaagagacagatcaagagagctaggatgttttttgaggaggcagagagaggggtgaccgagctcagccaggcaagccggtggccggtaagaagagtcacttgattctcaaggaaacataaagcagattattattgtcggtgcttctatgccatggtgtcaaaaggaaaataaaatatcattgcattgccccgttgcaggtctgggcgtctctgttgttataccggcaaatccttgacgagatagaagcaaacgattacaacaacttcacaaagagggcgtacgttgggaaggcgaagaaattgctagcgcttccagttgcatatggtagatcattgctgatgccctactcactgagaaatagccagaagtaggaggcgggaagaggagataaagggaagatgatgagcaggttaggcttagataggaaaaatcagacagcatctgccttccgattaatgttgaggaaattatattattgtgtgtatcatacatagcatgtatagggaaaatgctgcaggcaggcaggcaggctaggtgatggttgaatatttccttcacatcatgtatgtatatccttccttgatgctacagcacatatgtatgtatgactctgaagaaagagcaacctgtatagtagctaaccggctatggcctatgtatgggccgcagaggtgagcaaacaaaaatcatcatccatggattgattgattgattgattgatacagtactactaaagcaagcatacatacattatccagggaaaatgcagaatgagtaacaaacttgagagagagagagagagagagagagagcaaagcaagtactccatgagcgaacaagtcagttggtcggttgacgaaggagattgcaggaggacctcacctcaccatgtggagtccgtggggcggcgcacgctgtggcctggacatcactggccggcaggggattattggggttggggccattccttcacacgaccggaagaggagggccagccgccgccgccgccggcggcggtggcaggagtggagtctggagggtgcggagagttcatggctgttgaagttgggctttttttagtttgggcccaatataagctgtagcatgaattcccgcgctttatgggtttgggcgggattcccttctccgtgtcttcatttgccaaaaagctagcactagtactatagctaaggtggtgttcttttggtggtgtttgagttcctatttggatcagggattgaagttttagtacatgtcatatcatgtcatatcggatgtttggatattaattataactatcaaacgtagattattgacaaaactcattccataaccctggactaattcgcgagacgaatgtattaagcctaattaattcatgattagcccatgtattgctacagtaaacgtagtctaattatagattaattaggcttaaaaaatttgtctcgcaaattagctctcatttatgcaattagttttgtatttagtctatgtttaatactttggattagcgtccaaatatctgatgtgacagggacttaaagtttagtccctggatccaaacaccacttgaatcttctgaagataaaaattaagtgtttcacataaaacaatgtggtaataacatgtgattaattgagttttactccctccgtccccaaaaaaggcaacctcgtatttgatgtgacattttctagtacaacgaatctggaaaggaaatgccacctccaatactgggttgtctttttttggatggagggagtaattattacaaacttgaaaaatggattaatctgatattttagaacaactttcatataaaaattttcacacgaaacgcatcgtttagcagtttgaaatgcgtgtcacgaaaatccaaaactttatccactacttgtagtggaaacgaacatgacctttctcctaaagacgaagattaagtttttttacgcaaaaaagactagttctacctacgaacctggacacgtgtgttcaggttcctagctaggaattcctttttttagagaaagtagtaatacttaattaatcatagaaaaaaagtatgaattaccccctgaagtatcaagtgagtacgagttgcccccctaaaatagaaaaccagtcatttttcacccttaactatcgataccggatgaacccacccccctctcccccccgagcagatttgtaagcgtttttggtctgggtggcaacctagtcagcaagttttttattaaaaaaaaggatagggcccacctgtcagatatctcttctctctatctctttccctctcaccccctctctctctcccgtcagatgccggcggttgcggctcacgcgctgacagcagtgggcgcctcctccgctcaccgccgtcccctcctcccgcggtcgtcaatttcccctcctcgcgaatgcctcgattttgccggttggtgcggtcatcgaagcgcacgccgaacgcaagaaggaggtcggtgttgtcgacggcgtagttggcgtacactgtgccatgcatcccgagcatccgcagggagagggggccgtcgctggggaagtttccgatgcccatgagggtggtcgtcaacgggatgcccgtcagctccacgaagcagcgcagttcatcgccagacgcggagcagccgccgactgatgtagaggacgggttttctggcgtcgcggacgagacagatgacttcgttgagcaagttg

SEQ ID NO: 21523 - DNA, 663 bp, Oryza sativa
aggatctttcttttggtcttttgttaaggtttttgatgtttgcgtatagtcgcggttatcggattttcgtcgatcgcgggttttctcaaagattcgtaaagcttcgtgaagaccttgagcaaggcaagtcaccctttgatcaattgctcctataattgaaaagtcattattattttgtttgcaacttgcattataagaatcacacacttaacttgctggccctcggtttgcgtgccaaatcgacggacctacccagtagtcgcactaatttccgtaggtcgtactaccctgattccttgtcgctccacccttgtggtacctcggtattcgtgctctctgagcgcgtataccaaatatcccacatacaccgttgtttgttgaaaacttgggaaatgggtttgtgaagccttcaaaacccgacatgtggtgtcggtgtgtttgaaaataaaatgaattatgaaaactcgcgatgcgggggttgtgcctatgtggcactgtcccgtattcgcatataaggaccgattcctgtgggaaactcatcgaacataatcaaagtgcaaccacaaggtggaatgggacaccctggctaagtaactagtcggttcagggaaacctcgcatgccaatagttgggaacgccggggcggggtcggacaaaccgggt

SEQ ID NO: 21524 - DNA, 679 bp, Oryza sativa
taccgaaaagcgttggagcttcaggctttccttgacatggccaaagatgatggtatttctaatagttcagtctatatgttctgaactttcctctgtgacctatgcaatgactcatcttcctgtttccattagatcttatggaaggttacagagcaactgaactgatgtctgaggactcgcaattgatgactcaatgcaaagctatagctgacatgaaatttacatatgttgtctcgtgccagcaatatggaatccagaaacgttctggtgaagcctgtgcgcatgatattttgaggctaatgacagtgtaagtttttctttcccttgaatgcgcaggagagctgttgtgatagtgtaagttttaatcaaatattgcaatgatctggatatatgttatctgtatgtagcacaaattgccttttttttcttgctttatttcttttataatttatgcaatcaagttggagcacacatgattgttcttagtgcaacagtgcaatcgagtgtctttctgtgagtatatgtgaattgggttaaaacaatgagtaccatgtgcattatttttagtagcgagtaatgaaataaatggtagctttgttatttactatgctgggagtaccatgtgtaacaatttgtatcatctaaattcatatctattgaagaaacaacaaaaaacaaa

SEQ ID NO: 21525 - DNA, 1414 bp, Oryza sativa
tgattcagcaacgtagatctgcattcaagttgttacaaacatcatagctaatcagttattgagcctgataacattatttgttcacttttcatgctatgccttaatacaatatgggtacggtttgcactgttaattcctgccgtttgggagttgacatggtttaatttgtgtttgctggatataggtaatgcacatggtttgggagttgaagccttgcgaatgctcatgcaaatggtcctcaccaatgaggaagagcttaaactgaaatatttcaaagatgatctatccaccaaactttgccctgtggaagcttttctaaaggcagtgctggatattccatttgcgttcaagagaatggatgctatgctctatgttgccaacttctatttggaggtcaatcagctcagaatgtcatatgctactcttgaggtatagttgagcccttggttgaatattttgtacaaattgttttgcaccctttgttgaaagaagcaaaacaaaactttcatatgcaattgggtattatgcatatcaatatttacacaaatgatttgaatctgtgaacggaatagaccctcacttactgtttccttggttataggattactcatctctgagggtttcttatcggttttcatacaggcagcttgccaggagctgaaaaacagcaggttgttccacaaggtccttgaggctggtttgaactttggcaacttgatgagtatcgatacaggatctccgaattcacatgccatggaacccaacactctgctgaagatcgttgatgtgaaaggagctgatggcaaggctgctctcctgcaatttgttgtccatgaaattgtgaaaccggaggccacagtcccgtgtgcaaaacgaatgcaaatactactcagcagtatgatgtggaatacagaaaacatggtcttcaggttgtgtcaaaacttgcggctgagctgagcaataccaagaaagcttcatccatcgatatgatgaagctcagcagagatgtttcagagctcggcgtagggcttggaaagatccacgacgtgttgaggctaaacagcatggtgacctcagcggacagcgcgaggcggttccacaacacaatgagcatgttcctgaggcaggcagaggaggagatcctgaagctccaggcgcaagagagcatctgcctgtcttgtgtgaaggaggtgactgagtacttccatggtgaattgagcagcggcgacgaagggcacatggcgagagtttttggcagtgtgagggagttccttgccatgctggaccgaatctgtaaagaagctggagaggagatgaagagcagcggctgtatgatgggtagagactggaatatggctgccccaatgggaatgacaacgccttgagctgcagcaatgctggcatatttgttatg

SEQ ID NO: 21526 - DNA, 651 bp, Oryza sativa
ggttaagtgttagaaaatatcaaaggaaaccttgcggtgtgtattcatactctcatgatctccatgcagatcaagcctctggtacagccaaccaaagatataatgaaagagccgatccgggatttccagtggcatgaatttttccctcgtggtacttaagttgaaaactgatgtttttaccttttggaatttttggcacacttatttcaatctcaatttgcattttgcagctaacaataacattggtgttgttattgcgctgtgggctccaataattcttgtgagtgttgttcattgtttcctgttaacaaaagttgattagccaatattttgagttttatcaattgatatgtccaggtctacttcatggacacccaaatttggtatgcacttttctctacattgatcggtggtatctatggggcttatcgtcgtcttggtgaggttggtaaaatgttttgttatcaggcattcattaagtcattttatgactggtttgatttgttggacctgctttctctgataaaacagttttcttgtctaatataccgcgtactgcatccaatagcgtataagaaaacaatgttcttggactgatgttattcacagtgacatctctacgtttaagctacctttcccagttatattttg

SEQ ID NO: 21527 - DNA, 16403 bp, Oryza sativa
  unsure (1)..(16403): unsure at all n locations
ctaaactcgaaattaagctaccatgaggcagtgttaagaaaggatagatgctctctccctccgttccaaaatatcttattttaagagtaaattgcattggtggtacataaacttgttagttgggtgcaatttagtatataaacttgtaaaatgcttgtttcagtacacgaacttgtctagttcgtgcaaacgaggataaaaataacttggcaatgttaattttacgaagctgatgttgattaggatatgacgtgcatacgtgtagtaagtatacataagacatgcaatatttataaatttggtctctaattttatcttttatcatggaaaagatgaatttggtatatttctaacccttataccattgctcggttttttaatctttttctactatcgctatatcctactctattttttattgaagcttttttattgaagaggtgtatttctaatagcaaccttctcagatatatgtttacatagtatcctaaccagccctaaatcaataagattagccatgttttattgaagaggtatatgtctaatagcaaccttctctcagatatatgtttacatagtatcctaatcagcccctaaatcaataagattagctatgtagtgtctttttcaccttcctccgcacgcacagacaagttcatataccaaagcgagtattttacaagttcgtgtactagattgcacctacctgacaagttcgtgtaccgatgattcaatttactcttattttaatatgggatgtgatataatcgtagtgttaaaatgtgtcacatattttactaggttaatttattttgatatgacacgaggataatatttaattaaggtcttgtttagttctaaactttttcttcaaacttccaactttttcatcacatcaaaactttcctacatatacaaactttcaacttttccatcacatcgttccaatttcaaccaaacttccaattttaacgttaactaaacacaccctaaaacacaccctaagtactgtaaggaattgcattcaccgatgacaggaagtcttgtcgtaggagaagcactaggtccgtctttttgagtgaatatgcgtttctgagtttgagccagccaagaggttcatggtaccaatgctctattattgcacaagagtgcacgtgaacacgtcaccctgaacggcctgcgcagtgcgcacgagagccaatacatttggttttgcacctttgcttatcacgggttaatcacaaattatttgctccacacttttaacaatacaatttcttaaaaaaaaacgttttctagtgtattgattaaactacttattctaagttatttgttaaatttatttattaaaatatttaatttatacctttaataaatatataatgtgcatcaataatacaataaattattaataatttggttcaatcactgccatagatgagcaaatgtagcagttgctagctagctactagctagtagtagtaccacttatatatgttaggttcagctctatgctagttgcagattgcatatgagggccattcctttggatccatatgaagccgtatatgagttataattgcactttcgcgcgcgaaatgattgttcttcatgtatatttttttaaaaaaacgaatgttcttcctatctcagaaaagaaatctatctcctttcaaccgcatataaatagaaatagttggttgtaactaaacaccgcatctacaaaccttaatcttcactaaaccaggatgatctaaaaaacggtgggcgcgacgcataacattgcttataaagcaagcaagaataaaatgatcactctaacgtgtctaaataagtttcagaaccgtcggaccaatcacagccacatctgatgcgatatatagggcccaccttgttagaactcgacgtagatggaccccccgaataacctataatatatataaaatattgttatccgttgtcgtcttgcaacactaaccatataacacaaattgtttgttgtagttttaataacttgggaataaaatgttcagacttcaaaatggttttgaccaatttcctcctatctcaagacatcatttctaataaacttaattaggtgacaaaagaggacatagattagagagtaaataactttgagagatgtggatatatatgcatccctgcgtttgttggtagctcaaatcattcgccacaaaggatcgccgctagcgattcctcgggcaactgctcttgcactgtttcaggctttggtgcagagctcgaaattggccatgtctggccaatggccatacgccaaccgtaatgactgcagccgttgtcatgtgacggccatactgataaatgtcgccatagtacaggacttgcacgttgcagcgtagcaaacgagcataggatgcagccttcccgatgtggcaagcagcagatgcagctagcggcaagccggccggcgacctggcttttaatttccgggcactgttaacttttggccatgctaaagtctcgtggattccaagtgtcaatcatcgtctgcatggcagagggcaaaaaaagcaagatcttgtccaacaaaggtaaccatcggtggttatagctttgaccatgggtgcaaagcacaacgatgagtatcgttggttgaatggttgtccagcgtttggattccgttctcttggtaattggtctagtagagcctaagtaaacatactttagagaattttgtggattaaataagtattaataatttgttgtttttaatagtttgatctggcacaacttaaaataaatcaggtagatgaacaaagccgtgcaagctccgacaaattaaagtaacctagctagctagctagtaagcattgtatgagtttagtagataaaagataagctttgactcttaaccaccattcaacaacatgttaacccatgacatggcgttcgagagaagtttctcgaaatataactgctatgcatgtgcatccaatcaatgagataagagaggatagcataaatattaacacgaatcaggtcaatcacgtgtgggagattcgcattgtcgataccctttatctgtatgaccaattttcaggctataggtttcctacttttgtcgatattgggccactctttgttttattaaaatagatattttaatttgtacaaaaaccaatttttagcacgactatgaactgcatcattatttcggcttgaaatctactatgtaaacattataaactttcaaataaaactatatgcatagtttctatatatatggtgaattccccctttaaagaaatgatgaccagactgggtttatcatgaatgctacaaaggttttaggccatgtcaacttaataattgtcgtgtagtgcttgcaaattcaagtggtatattttttctaatctgcccatgaccgatgctgtgtgcctgtgtggtggactggtggatcatcaaaacacgcgcagagaactggttgcaatggttaagtttccgttaatttgttaccgcaatgacaattaacagcacaataacgtgcatgagtatagtattttctctaaaaaaagattatgtattaaaaccagaaatatggtgcccactagatgagtggaattaatatatcatattaagaaatgtagcaataaccatcattaggcacaggatgttcttatcataaaatatgcattttggtaggacctttgattagaaatttttctgtttataatatatttatttgcaaaactggttataataatatcgaatagattaatcaaagataggaataaaggaaacgccaaatagtcaacattaacaaaccacgaaagattatagcatactactctaaatgaaaaactttaaataccacatggaactgtgctcttaattaattgtgtctttggcaatatataacactaggaacttctgctatatgttggactctgtggttgtgcagaaataatgtggtttttgataaatcaccatctattacatatatgcaggtaatttttagggcaacatactggctccggctctggactcaactacaaaggtctaatgaagatggtgagttcataaaagttgcatgccagaaacttgagacgatggttatgcaactctttaccaattttggatggagattcacaaatagacttcaataaatgtgttctccttatcttagtttggtctctctttaaacattggtgattgttttcgatgtctttgatgttttgttgaactacactcttctagagtgttagattgtaataattggttgtagctctttgagcaaaggccggaatgttattccattatctaaaaaatataaactaggatacgggcgctcgcgcactagtgtacctggtgcgtattatgtagaatctgtttaatatgcagagcataatcttttttgtgttttcaatataagaaaacttactacatttgttaaataggataaatatattcttctatttaaaagtatgtttgataaatttacattcgtaaaataaaatgtgtatatgtgaagttttcatcctacttttgtccttcatatatctatacatttaattatgagtaaagttcatcaccggtccctaaacttgtaccgatgtatcatcctggtccctaaactcgcaaatcaaccgtttaggtcctcaaacttgttcgattgtgttatccaggtccctaaacttgcatatcactcgtttaggttctccaacttgttcagttgtgtcaccccggtccctaaacaggacggtctaaaaactttatatcaaaaaataattcataactttttcatgtgaactctaatgaagacaaactttatatcaaaattgtagccctcgacgcgacctacaactttgtagttgaaaagtttttgaattaaaactgtttagggtcccaaaatattgttgcatgtttatagattttgaaattttaattttaatattacattttgggacaaaaaatgacttataataaaaaaaattcaactacaaaggtgtagatcgcgtcgagggctacaagttcgatataaagtttatcttcattagagttcacatgaaaaagttatgaattatttttaaatataaagtctttagaccgtcctatttgatccagatgatattcaaatccaagtttagggaccggggtgacacaactgaacaagtttgtggacctaaacgagtgatctgcaagtttagggacgggatgacacagtcgaacaagtttgaggacctaaacggtcgatttgcgagtttagggaccgggatgacacagcggtaaaagtttagggaccggtgatggactttactctttataatattgtctcgacagtttggatccagctggcgaatcaagccacagtgcatatttgttttaggtccgcttttctgacctaccaaatgggctgagaggtcgagttcacgtgaatagatgtgcttttattaatggtactcgtgataaccccctttatattgatcacctcaagttgatccgttccactcctatgccgcttgttaatgtacttgcttatttagatgagtgttttttcgttactatctccgcagatgcatcatgattcggtaaatatataaaaccatttctttttacatgactaaagctaaaacccaatatccttccctttgttttaaaataatcaaacacacaattacatagccatgggagagatcgaacaagctgtactgtgaatatgtgagtatcccaaacggttttctttgccaaactcacggcagtgcaggccataagcgtgacacagaggatcgatctaggactaggacagcagcggatccgtacaccggaacttttaatttgatgaagtagtactaaacatggcagctcgaacaaaactaggttttagagatccaattcatggtggaacccatgcatgtgagcaccacggggtgatgcctcaccaaaccgccgtgcttatctgactcagcctccccttaaaaataagagacaaagaccacctgatcatgtcgaaaacgtcctaagagaaaggataataatacagccagctgcttacttatagcctatctatcagctcactcgtataatggttaactcttcactataaatatatggttcacatgtctgtctcacagattttcttggttcctgtgcctaagccggctgtaaacttacagcccgcttctcatctctctcctcttttctcctatccacttcagcattcagctttcttatagctcactattatacttgctctaatctcgatcgatcgatcgcccatggtggcaatagtttaatccccagaggccacaagtgtcaatcatcaggtcgatgggaagaaaagggcaagatgacgagattgacgccgtgcaggggattcccaaatggggctgattcgtccttttcaggtgtacatttcccatttttatactgcctgcctggagctctgcgatgaacttggacaactttatagggaagctacgtatactttgccagcctctctctccggttatcgcaagtaataaagcctaaagcggcacgttactctgtaaggaagttgagtgttaagaaggtaaagatgccatctgagcagtgcattacacaattgagttgattggtcagtctctactatagtagtagtacttacctttttcttatgggaggacagttggtagtgctagctagcttaacaatattctactttgatcatagaaaacagtactagtactaagttagtactacgttgtcgaagaggaaaaaaataagttatctctttgggacttaacaatactctgtttcctttcattagaaaaaaaaaaatcagtactgctaaataagcttatcttctggtacacgcggtacaggttctccattattttttttcctagcgagtccagcttcctgcttccctacctaggaggtccaactccaacccaacgcctccatgtgccttgcccctcctcccccttggccgagatgatgataagctgctacgccttgctagttgctcccatgccttttgaacgcttttgagaccgtgaccaagctggcgcggcgctgcatgcggcgtgagaacgagcgtcgcagcacgacgcgcgggcaccacgacgactccacgagtccacgagcgttttcacgctcgtttcgcacaggctcacgcgttgccgcagcccgttttgcagaggcctacgcgtggacggcctangctcgtggtgcgcggagcgggccgggctttttcagggcatcaccggtgttagttaatcgcagtagaaggggtatatgcccccgtgaccccaaatctcttcgaaagaaaagaaattcccctttttcttcaagttcaaaatatcgagttacatttatttaactggatcatggtatagtagtatcaagaggtattagcaatcttccctgcggatgatggagcccaaatcgtttaccttacagagatcaatcacaattcatttccataaacaaaaccgtatccgaaaacagtttgaatcgatctacagggtcatgtaacaacaaagatccgtgtaaccaaagcaagaaaaaaagaaacaaggttctcaaggatgggagaattgagatatcctcttaggttgacaagctgccaccaccctgttgccaaaggttgatgatatcagtggcctgattcagaaggatgatcatctgtttctgagagatccactctttctcctccagctttgctcttagctcctcccaggcatctttccgtggccagaagtagtatgggcttaacggaatgctgccatagccgggaaccaactggtcgagggctatgccaatgttcttctccatccatatgaacttcagaacaagcattggatcctgcctttcaggcaccttaaccttgtactgcgatacaaaatcaattcgtttcaaatctcataatgctaatactgattttgcatatctgagtaaaataaattgtgcagttttaacacagctcaagtcgtagtaaaataaattgcaacaactactgtacgtgttccattgacaacttcatttctctacaaaaggccccatttttcaactgtgagggtaactcccatataatcaaaactaatccacttttagtgtacatctctgaaatctgatatagtgatgaaaaaggaacttattgtgcctgttaatgttgttacataatcacgtaaatagctgaatgaaaaaaaactcctttcatgaccaaaacctgtcaatgctacagtttgttcaatagttcagttcttgcttacacatacaaccaaaaatggcacacgctcaagtttgtggacatgctttcatgtgctcttcgcctcttcatcactagcatacaccttttatctgcagaagtgcaaaactgcaccaaaaggacagcccgagtgcccaaacatgctcaactagactagaacttctctaatttactctacttgtgacttctcttaagctttcagctgtgcattgtgtctaaagatttactctactcgtgaattcacccaaatgtacacctcgtactgtatttcacctatgagctcaagtaatcagttcggtaaccaaaattgattcaagaaaaatcaaattcatgcgaaaccaaatgtgattgaactccatcctcttcaaaaaacaacacttccttctgaaattgagctcgactcggtaaaaaaaaaaaccccgtaatttcagtcactggcatggtttggagcggctactagcccattacctcctgcgcttcctcgccggcgctcgcatccccacctccgacttgcttctcctcttctccctcctccgcttcgacggcgccagaagcggcggcggcggcgaggccacggagcgagcgaaggggaagcctcctgctgccgaggtggacgaggcgtggagtggaggaggaggaggtggtgcagggggaggcggcggaaagcttgggccgggagatgcgggcgcgcgaggcgagggccggcgtggcggcggggtggacggacatcgccagcatcgtgtccgagtccgaggctcctgtgcggataagaggaggaagacgatggtgcggggctgcctcctcttatctttacccttaataatccccttctcgtcagctattagatgtgggctagaaagttatggtaaagcccaatatggcccagcacaaaacggcccggcccagatccaatctaagtaaaaagctcacagctcaatcgtctcggttattcgagaataaacgaaatggcatatttgtaaataaaaaataatttgtgaataaatcttttatatatatatttttaacgatctaaaagcaaagactgaaaaataaaccttcgataaaaaaaataaaatcaaccccaaatttaaaggtaaaaatttaaattttgactgataaacataagtataagcgaaaagatgaggccgtccgtttgccttcagcagggtttgcaaaaccgtctgtaaccgtgcgattaccgcgcttaccgtggggtacggtaaaagggaaaccgcggtaacccccttaaattcaaataaatttaaaaaataattttaaattttgataaattttacacggttaccgtgtggtaaccccggtccggtggtttgggaaaccctggccttcagtagtgctagtgcccagttgccaaccgcttgggcgtagtaaaaactgatagtggaatgaaatgaaccgggtacaaagtactgaaatgatcgtaagttttgaaaaaaaacaagcaggagtagtaactttgcaagtaaggatgctacattctctgatagtagtttcagtgttttacacattctataagaacaccgaacaaaacaagcatcgaatttcaaatgtcgatacagccttgaacagttgaagttcttgcccacaagtttaatcgaaagcattgtcaggttaacccaagaacgtgattaataattactaacattaatattagtcccatcttattcgacaatcattgctaaactatttactgtgtcatgagatcgaatcaagtttgatgccggcgaggttttctccgctcagaagtccggcgccggcgagtacgcgtgggaggcgggcacaaccacggccgtcgacataggtgccgacgaggagttcaccaggttcagtatgctgttccagtagttcttctcctcctcggtctcctggaactcgccgtcggcttccgcgtctctccccgccggcctcgggatctggttcaaggagccttcgaggagtaggcccgtgaaccccgctccggcgccggggaagcccacgtcggcggcgtcgacgtcgccccagtgctggtccttgcacgcctcgtcgtacgcctgcatgggctgcatggcggcgcgcgcggccgccgcggcggcggcgccgtgcgcctccagcacggtggcgagcaccgcgctctccgagaagctcagcgtggacgtcggcgagtcgaggccgtgagccgccgccgccgccgccgccgacgcggggggtgccgggaggtgcggcgcgcccggggtcgcggaggccgcgagcgcgcgcagcttggcctcccgagccaagcgcgcctccgcctcgagccgcgcgctctcccactgcgccgtgtggctgaggtgcgccgcggccttggcgtgctgcgcgcccgccgcgccgccggccgcacctccgccgccgccgcccgcgccggccacgtcggagcgcggcttgtgcgtgaccgggtcgatccccatcttggccagccgcttctttaggtgcgtgttccagtagttcttgatctcgttgtccgtgcgcttcggcaggtgcgtcgcgatcgccgaccacctgcaaaacaacaacaacgccaacgccggccaagaaaaaagatcaggaaaatcgcacgtcaaaagccctccattcgcagtgacaaaattaaacaaacagcactcttgaaaacgtaaataatcggcggtgtgatttaaggcgtgcgtggcgtagtacagacagagggcagagatgatcggaagctgtgagtcaaaatgggaagaggggcaggtggcaacagtggaccaaaccccagttttggtccacaatgatgggggggctcgcctccttaaatgacgagcttgaatgccgaatcatatgggagaaaagaaaggaaaattctgggccgagcctctcactgcccaaccttttcacactttttcccttgttgatgcatgcattgattggtctgtgctcacagctaatgcgtggttgttcgacgggcaaaagatgagcaatgcagcattacgtgtgaacaaaacgaaaacaagtgatgattctgttctaacgtaagaatttttagcctagcttgtgtgttaatctatggacagtacggtttgttacggacaaaatgctgaagcaggtgtgtacggggacagcaagtaagtagcacggcctgcgaaatttacacatcccctggctaagctccgtgttccaacccttgcattgcataaccctttcataaatgtctgccaagactacggtgcagaatggtggctactggctagtgtgttcttgacctgccggtcagcaacaagtactagcagtcaaaattcgtgcaggagaatcaagggttccatcgcgattacggaattaaatgtgctccgggtgcgaggtgaagaacgagcgagcagctagcaggagggagagttgtgcactacgtatcttgtatgcatgatgcatccatgcgaaaacgaagtaatcgatcacctgttgccgagaagggcgtggagctggatgatggtctgctcctcctgcaggctgaacttgcccctcttgatgtccggccggaggtagttcgtccaccggagtcggcagctcttgccgcaccgctgcagccctgcacacgattgtcacggtttgcatgcacctcagatcagagttcagagagtagccagcctcgaggatcgatcgcctcgaccgaacattgcagctaggattgcagaggttgagaagaaatttaagctagataagcggcgcttaccggccttggagggtagcgagcgccagcagccgtggccgtgctgctcgatgtaggccagcagcttctggtcctcctccggcgtccatggccccttcttgagcccctccttctcgcagcacggcgatcgccccatcgccggagaaaagcaacagcagcagcgagctctaggaaaactcctccccgatgatcttcgacgccctctggttcttcctcctctcctcttctctcgggctcaagtagtaggtctatgtgtagtagtacgtgatcgaggcaattcactacgagagatcttctttgcagggagctgtggctctctgcgagtgactaatgcagcagcagagtcagtgagagtgtgtgtgtgtgtgagagagagagagagagagagagaggccaaaagcgaaagagtgaggcacattgcgctgcgtagaggcataaatagaggagaggagagggggtacggtgtggctggctcggcacgcacgactcgactcggctcgcgcgaacgactcgatatcttcttcgggcgccgcgatctcctgccggcaaagtggcctctcactgtcagtgtacgtaactccaccccgcgagaggagtaggggcaggaccgtgatttcaccccccacggtgtacgtgtgccccaccccgtcgccgcgggaggaacgaacgaaccatcgctgccaatcgcgatcccacttcatccatccacccgatcagagggcgtgcatttaactcggcgcggggctcgtctctgcctctggatccccttggtatatgtggacgctacactacacatgcctacatggtcctttcctcgcgctaccgcgagtggcgtggacggcgtacggcgcctgtgtcgtcttcccccctctatcgcccaatccatccatccatccatctgcgtgcgtgcgtgcagtgcagtgcatgcatgccatgcgctttcatggcgctgccctgaccagcgctgttgctgccgcaggggagggggaatctcgcgcgctacagctcgctgcaccaaagagtggtcaggcgcgcgaacccgatcgatccaacagtgttccagtacaggacgcaaattccaacgcgaatcgttagttcgaagctggcacagcgtgcgggcgcggcggccgatcgaagggagagatcgaattactggctggtcccgcgattgttcatatatcgcgcgatcgatcgagcgagcggaggagtgcgtgctgttccttgtcaatagtagtatacgcttggcccggcccccggcgtgggcaggtgaccagtagctagctaggcttaggctagctcgctcggcttgcccttgcccccatccgtttggacgattgacttgattgcaaatctcgcggcgtttttgggaacaatttgttttactcattcaattcggtgccattgccgcaagtcacgactggcggtgcatggttcatgattgcgtcgcatcgcatcacattgcgtcgcattgcatgcatgccggtttcagttgtttgcttgctagctcggtcgatcggttggagtgtgagatccccgcgccggccgctagctcctggtttctttgcacatttcgcttgccatttcggggcgctagccatggccgatttgtggatctctccccctgcagattgtgcaggcgatcgtcccagatttaatttgctgtttgttgggccctgtatgtgttgctacgagtcgcggctaaagtgatctctgaaattagctggttgctcgtttgtggtaggtactctattcctagcgttcccatttctcagtaaagcttttgctctcctggaaaaatgtttgtcagtttccaaggaggacaaacggaagtctccaatccattttctgaatctctgatctcgccatccttaatcacgtactaatccagtactgtttatcacgccatcaagtcctagtccaacttactacccaccagatcaacagcttactgctgcgaacattgtacgggaggctgagaaaaaggaacagtactggcagtgaagggtgatgatgatgtacggggtagagagactaatggaacactctgtaaaattccgccaacctgcaattgcaaggcctgagcgcagggatggcttttgccatttattccgctgttcccggtgcccaatcgcaacagtagtacagaaggaccaccgctgtgaggtgaggggaatcattcgatcgaaacacagccgcatgtgcgtcttccccaagaattcaccgtgttctttttaccaccatcactgtaaactgtaaagcaaaattagcttcgctacttcggacacggatcctctacggtattatacttacagtagtattggctaacaggtgaacccgatcccacgtgtcagcgatagctaatgtagatacaatatacttcagacgattcccactgtcttcacttgcaccatcacatccttcagactttagaacttgctgtgaatgtcagtatgtcacatcacggcataaaattataggcacctgccagttgcttatttactgtactagcttgatcgatggcatggctctcaacgagacttaatcgatgctttgcttttgtttgatttcgtatttccatggcctacgttgggttgcagatagatgctgctgttactattctacggctagctacgatgggtatatacttagatatgcatgctagtagtatcgatcaaattaagtcctgaacagtggaacgcacagtacgtgctgcggtgatttggcactggcaccggtgtttaattagccatgcatcagtagcagtaggcaaaaaacttcaattgcctactgaagtagatcgacgccattagtacgtagctagtagtatgtagtatgagctaacctgtgtctagtctgcaataggaaggtgagttaagcccatccgctccgctgccattgcaccgtttcggaaagacgatatggcctcgccaccagatcatctgaaagcgaacgttttctcggacggatctggtagaggttttacgtccaagcctgtgtccagaattgctccgtcctaggaactgaaactctgaaaaggcaatgcgcgagaaatgggcacggcattgattgaagaagaggatcgatatgatgatcgtctgtatgcagtggagtgcaaaccagaatgtttgcctctaatgcatggctctagctgggatgcagacttaattcatttagagtcgagtgattgcctggaaaacgcatcatggtttattacaaactctctatcgtttagcgtgcagacagaacagtacaagggggggggggggtgaagtttgagttaattcaactgttgatcgcctgacatggccattgctcatgccggctggaccagctgattgacgtcgagaggggaatctgatcatctttatagcgctgacgatttgcaatagcgcttgtactactgcagcatcagggcagaagtttttcatctaatgtttttgcagacagcagaagttttccatctaatgttttgcagagatgcgatcaagcacatatatttccattaatgttataaaatcttataggactactatgtaataagaacatgcaaggcagaaaaagagcagctcgccatttagcaagtctgcgtgagctttattattgcgcaaaatggtggtcctgatgaacctttttctagggtccttttcttctccggctctgcgtggttttcctggtttttggcagcaacgtagcaccctggcctggtagacaagtatttaaaggtgtgagccctttacattttcgtcctacgagtactactcatcttttcttttttttcttttgaaaagaaaatgatagcagcgtactgaagtccaatccggtacattaatactccgacctctgttctcaggcctggtaggaccgtaggactaaggccgagtttagatacaaagttttttttttcaaactttcaatttttttatcatatcaaaactttcctacacacataaaattttaactttttttgttacatcattccaatttgaaccaaacttttaattttagcgtgaactaaacacaccctcagtatagtacactttttggctgtgtttgcaaaatgggtttggaatatgattttccaccccttcaaagggtaagctttaatcttagccatccattcttctcacccatttcatcatatccctccattcatttctattttttaatcccacctctcctaacccattttccaaacattccaatccaatgggtttcagcatcaacgctgcagcaatattggtctttagacccgaaatttgacctagttcactcagccaagttaaaaaacctactccctctggtcataaatatgtggcatttataacaagatttgatagcactgttgatactttgtattgatacttagactgtaagtaacttttgaaatgcttaggtaaaaacgaataaaatatatagtttgtgtggctttgtctagaaaagtaatattaattataatatcat

SEQ ID NO: 21528 - DNA, 8499 bp, Oryza sativa
ttagacaagcagcatctacagcagcttcggccgccattactgtttcatcgagctatactagagtatactaccaagaaggaaggagggagtgggctacttcctgtctctgtcgtcctcgctggtctccgacacggcccgctcggaggacacctcggcctcgccgcacggcatgccgaacctctggatcacccactggagcgactcgatctgctgccggtcgtacatctgcttctgctgcgccatctcccggaactgccgcgcctcgcgctccaccagcgccttctcgttgcggaggcacgcgatcttggccatggcctcgtcggccgcggacgccgccgcgcgcctctccttctccagctcctccagcgcggcctccctccgcctcctctcggccgcgagccggcgcctcagccgctccacgctgccgccctcctccgcaccgctgccgcagccgccgttcgcgtcgccggccgccgcgcactcgtcttcctccgcgttggcctcctgctccagctcggcggccagcgacctcgcgaccggcttgtcggagcagctccccttggagcgggccggggacggggtcggggacgggggcaggccgcctttcttcttcagggccagtatcttcgtcccgcacacggcgcagacgacgccgccgacgcgcaatgcctgcaccgtggcgtccgcgttcccgacgagcccctccacggcctcgcaccgcttgccgaggcgccagacccccgtcgccaggagcaggaggggaattccaacaaacatctggggggcgctcaccgacctcgccagcgcaacccagcgctccgcggaggcccagtcgccgccggcctcgtcggactcggacgagtacaccatcgccaagaacccagcaccgacccaaccaggaagtagaacgcgcccaccccgggcataaacgcgaacgacacgccggcaagcggcttcaagaatccgccgccgccgccaccggagatgcggttcccgccgcccatcacttccccaaattgccacaaataaaacaaaaccaacgaaaatgcgatctcgcggtgcgtcgccggtggaatcgcctgcgaccggaggaaatataggaggagatcgccgtgggtttagggtaggcgtggtgggattggggatgcgaaaagaatttggtttaagcgaaaaaaaaaaaagctcaagggtttcgattcgaagggggatctctgcggataagtcgcgggtggcctcgctgccgtgtgggtctgggagttcggaaccgtcctcgcgtggggcccgcttgtcggttatgggccgccgtgttgtgtgggcccggcgagaaagagtgcgacatggatagagtaaccggatcggagtgaaaagtcgtttttgcttaacggtgacgatgacaggtggggtacaagttatgtgtggcccacatgtctgtgtaagatatgggttatggcgtgtgtgaagttcggagagaatctatgggaacggaaatatggaatacgtgggcttcttttgggagaagaccgacttttattactgcggaaggtgacgctagtccaggatcttttttttccctcgtgatattttcacggaaacgatgaaaaacgactccacatcatcaattggctagtccacgcctgactacccacttgagaatttgtaatttttccagttgcctgtgtatctcgtttgaaaactccaattcaagatctggaactcggcattagtaacaaggacccggtttaaatttgtggctccaaagagacgttggattgctctccaccgctacagaatcgccaaatcgattccgtccgcttatctgattgcgcgcacggttggattgcgcacggtatccgctatgaagaaggcctacgaacaaagcgagcaccaggcagcaacacggtcgccactcggcaggccggcagcccgtacgcgccccgcgtgggccaaaaccacgggagccgcagtggactgaccggacggacgcccatacacgctacagttgctcgctcctctgccgtagtgccgagcctatttagaaagatctagagccacttggattcgtagggtagtaaaaaacataggaatagaaaaaacgtagaaattgaagtagtataattcttcaatcctgtgggaattaaaaacacatgaaaagatgaaatgtgcccttgatagttctataggaaaaaacacaggatttctcttcccaagaggtcagacctctttctttttttcatgtgaaaataaactaaagggatgcaatccttaggaatgtttcctttcatttcctatgaatcaaaggcatccataggaaataatccataggattgtgaatcctacaaaaaatcctataccgatcatttaaatcaaaggagcccttagattctcatcaaaagcatcatctaagacccctttaaatcacaaaaatgaaaaacacagaggaataggaaaaacatagtattctaataagaatgcaaatgtaaaacagaggattgcaaaacgcaggaaaaacatagggatgactgtttaattgggccgcaggaaaaacacaggaatttgaggagagataaaaactcaatagattcttaccatgaggttctacctcatgttatatttcctccaaaaattgcatgggaagaggcattccataggaatttcataggaccattcctttaattcaaaggactatataggaaaaattcctatagaaataaaatcctctaaaattcctatgaattttctttgaatcaaaggggcctaagaatctggccgataaaaatctagagaaattgaaaaaaatcagcttgtcttttagtttactttttagtttttacaactatagcttctcgtaatctagacaggttgtttataagaactcttaattatgaaaaaaaattgtacatgctagaagctcccacaagaaaatcgcatagcatactagaaaaattcctatacactctagtctatagaattattaggctcgcccaacaccacaaccttttggtgcttgggcgcggggcgcctatgagagtggttgatatgccactatgcattttatgactcctctaaactttagtcctacctatgggcagacgttaagatggtttgactcagttgagctcgttaggagtttagtgactgatgagggaggaggtgaggagccaatgttctggcaccggcacaagacggcaatggtgatgtatggtcgtgtggcgccaatgtagcagtaatgatgagtggagaatagggtttggatcaatatgaactttagtgttctttttagacctagtcaatcggtatagcatggacttatttttgtctagtagagaattgtaccgtatgctgccctagtggactattggttcagctcgttaaactcatgaatactccataactcgtaacctagctcactactagaattcaacgggttccctagagttaaaattgttccctagagttgttaaagccatccaagggaaaccaaaagtatccctagggagcaaattgataactctaagggaaagaagtattcctagggaactttggctgaaatgacacgtagctactccacatcagcatggtggtctgattacttccaatattttttttcaatttttttccttgctgcgaccaaggaacgcgccctcgacatacaaaatttctgcccaataaatgttgggcccaccttatcttctccacagctcaagcaaaccacatcctctcgtttttcttcaccccaacggccggccggcgtgcggcggccggccggcacggcggcccctgccctttccttgaccaaacctcgagctctagcaaccggtcgccagcaagcacccgacagctgccgctctcgacaagctcgacggagcctcctctctcaccacacgccgttgtctccgtcttgcataagttgtttcgatccaattttctcagctcctttcctctccttttttttcttcgtagcgtgcagcacaagagcgcactccagcaagcagcgagcaccacaaggttgctgatgctccagcctccatcatgatgctgaccagcaatggaagtacaaatccaagtaagtgttgtttcaactgagctcgaactgaagtttctttcatatgtgtgcccatttgcatattatcttgatctgggctgttgagcatgctatttgggttttcttttcaagaggcaagggctggaagcattggagaacaaacaagattagttccacttcagttctttgcggatgcagtttttcaagtttccactgttgttgcagaagcacgctagtatcaagtggtttagattcgttttcaagaacatgtgttgtcttttatgtttttatcgtttcgatctgagcgatgatagcatcagctcatcagcacatctgaagtgtgtatcatatgtttgtgagaggaattttttgtcaacttttcagctccactttgtactacaaaagtatatgtaaactgaagaatcaatgtaattgagtatttttctattgataatagaatggcatttttatttcaactaatgttttagctttgatgttgaggcaaaggaagacagtaaaataaagaaaccaaaataaaacaatgaaatatgcaattttatttaaatggtaatatttttcctaaatttggctgaaaaccaaaagaaatccactttacacgtcagattcagtttgcgccacatgtacaactatccctatggagtgaaactctagggaacggaatctttccctaggttctccttgaaaaactctagggagctgtgttgttcccgtagaatggatcccagggttcaccctaggggaatctgttcgccagagtttttcccctgatccctagtgtatttggctctagggaagttggtggattctagtagtgcgcttgagttgagccgttaaggtaaacgagctgaaagcttcatgagccacgagtttggcgataattttctccaggtcatcttatagctagtgaaacacactagattagctataatatgatgggtcacacaatactattttattgttttatacccattagttttctctcccgggtacttttcttccttgggtttgatgaggttagcatgcatgtaaagagcttattttggtttctgtgtgtagcccggctacaaattaatcgctcattcaccctctctctctctctccccttctctcttccaacttattttgcagcctgctgatatcttactgtacatgctctaatacgaagtacttcgtctgctccaacagttttcagttaatccctcgtccttttttaatgctcacgcaatcgtttcgagatcccacaccgggcattgatcttagctccagttccatactcctacatccatacttcttgttccatggatcttagacagggacagcactctctacctttccctagcagtaggctagtacagctaggatctcgtttccgcgcgatcaatgcttctcactgattggacaatgattgccacatcacttgatcaacaaagcatgctggctggctggatgcacgaaaccagatccatgctttccatcacgttacacagtgcccctacgtcccaacaaacgcagccaagaacacacacatcaaaaaaagcattaatcgatccatccatccggcaataaactccaagagatcttcgatacggttgcacgcctatatactctataataaaactgtcgtttatcgcacaaaacgacggtggatgtgcacatctaccaccgattcgtaaatcctaaaccgcgttttaggaggatgcagacgacgaagattatcatcggttgttgatcgcactcaacagaatccatttcggttctgcaatacaatatacgcagcggttgaaggagccccaccatgtaaccatgttcatacagaaggtcagcgtctccacggccgtagtgttggcggatgaccaaggtccaaatgacccccaatctttagtcgtttcggattctttttggcagccaatctccggggtctgatctgtattgtatctgtgctttaagccatcctgtattacgcgtcaagaagccagacaaaaagctctcttcctgcccaaaaggtgacacaaaaaatgaaccaactattgtctactgcgggacttccatttgcaagtgaaagttttgatctaaaaaaaagtttggtgcctaggtagtagttagattcacataagggaatatatccagcaatggtgacaacttgtacgtggtgtgtacagctgatcactgcaggagaattgagaccactctgtcgtagctttgcgtttttttgtgcgtgtctgattatcagtcgttgttcccgttggcttaagcgagccttaattctgtggtacagcaaagataggtaagttggtgattcaatattactgataaataaagccttttgcaaccatcgatggttgacacaccgctacgataattacgccatgatggcatctacaggccaccgaatctgtcgacggttacggttccaggacctggtcgtacgtccgttgtttactctgtcgtgtggcatcgcaaaaaagaaaacggaaactctgcatccagctttgtgatgtcaacatgatcctaccttcagctaacctgaattaaagattcttgatcaccgtttacaggtaaggagtagctccagctaacacctgtgttcgtgaaaacgaccggtaatacgcagatggtaaaacacactgttagccttgttgcaaatctaagtcagctacagttctgtgcaaatcttctcaggcactattgttgtacttctggttgttatgctatcaaaatcgcaacatcaacactagtacgtactgtacgtaggagggagggattcaggatcaacgcccggcaaggcaaagctttgtcaacgtgcatctctcgatctgagccgttggaaatgtaatcggacgtacgagatcgcgccgggatctcgtagcgcggttgcgaacttgcgatgtcatttgtggcatcctccgttttttctccttgtccgtaaacaaaagcaatggaaagtctcctttccaaattccaatattctgcttcgcttgtttgtttcttccctcctttcctcttctgcttctcctcctcctcccaccgccgcatggtgtgatcagccaagaaaaaccatccatccacgcagcgatgctgccaccgccggccgccgcggccgccgcgctcctgctgctcctggcgctctccgccggggccaacgacatcgcgtcggacgccgcggcgctgcaggcgttcatcgcgccgttcgggtcggcgaccgtgtcgtggaacacgtcccagccgacgtgctcgtggacgggcgtcgtgtgctccggcggccgcgtcgtggaggtccacctcccgggggttggactccgcggcaacgtccccgtgggcgcgctcgggggcctcgacaagctcgccgtgctgtcgctgcgctacaacgcgctctccggcccgctgccgtccgacctggccaagtgcgcggagctccgggtaattaatctgcagtcgaatcacttctccggcgagctccccccggagattctggctctcccggcgctgacgcagctcaacctcgcggagaaccgcttttccgggaggattccggcgagcattgccaagaacgggaggctacagctgctctacttggacggcaacctcctcaccggcgagctgccgaatgtcaacatgccattgctcacctcgttcaacgtctccttcaacaacctcacaggcgggatacccagcggtctcagcggcatgccggcgacgtctttcctcggcatgtcgctgtgcggcaagcccctcgccgcttgccgaacgccgatttccatcccaccgtcgcaggctccggcgctctcgccagaaggcgcggtctcggcggtcggccgcgggaggggcggacgccgcctagccggaggagccattgccggcattgtgatcggctgcgcgctcggcttccttctcgtcgccggcgttctggtcctcgcgtgtggcgcgctgcagcgcaagccaagaccgcaccacagccgtgacgtcgcggcggagctcgccttgcacagcaaagaggcaatgagcccgagcgtgtacacgccgcgcgtctcggacgcgcggccgccgccgccgccggcggcggtggtccccgcgatacaaccggccgtcgccgccaacgtcgcaggaaagaagaagctcttcttcttcgggagggtgccgcggccgtacgacctcgaggacctgctgcgcgcgtcggccgaggtgctcggcaagggcacgtacgggaccacgtacaaggccgcgctcgagaccgggccggtggtcgccgtgaagcgcctcaaggagacctcattgccggagcgcgagtttcgggacaaggtcgcggcgatcggcgggctggaccaccccaacgtcgtgccactgcaggcctactacttcagcaaggacgagaagctcatggtgtacgagttcgtcgccatgggcagcctctcgtcgatgcttcacggtatgtatgcatg

SEQ ID NO: 21529 - DNA, 7653 bp, Oryza sativa
cgcttgcttttctctccattttcagttctgacttgagctggcgattccaggaaaccgtggctccggccggtcgccgctgctctgggagtcgaggaggcgcatcgcgctggcgtcggcgcgcgggctggagtacatccacgcgacgggctccaaggtggtgcacggcaacatcaagtcgtcgaacgtactcctcagccggtcgtcggtggacgcgcgcgtggcggaccacggcctcgcgcacctcgtcggcccggcgggcgcgccgtccagccgggtggcggggtaccgcgcgccggaggtggtggcggacccgtggcggctgtcgcagaaggccgacgtgtacagcttcggcgtgctgctcctggagctgctcaccgggaaggcccccacgcacgccgtgctgcacgacgacgagggcgtggacctgccgcggtgggcgcgctccgtcgtgcgggaggagtggacgtccgaggtgttcgacacggagctcctcaggcaccccggcgccgaggacgagatggtggagatgctgcggctggcgatggactgcaccgtgaccgtgccggaccagcggccggcgatgccggagatcgtcgtgcgcatcgagcagctgggcggcgcgggctccgcgcggaccgcccggagcgtgtcgatggacgacgccgacgaccggccgctcaggcccgccgggtcgacccgcgagagctgaagcgttgatcactcagcatagttgctcgttcggtaactctatgaaaggtcctgaatttttttttccttcatttcattttttttggctgcgtccttgtgtttgtcttaggaaattacttacggtgtgatgttaattctttgaagtttcatgaatttcttgatacttctttcatcggatttcaatcgtccggttagctgcgtgtgtgtgtgtcttgagatgagatgttggtgataggagaagcacactggtgcaatatgtaattaccactacatggttgatgtcactattgacaaatgagaaattactcccccttcgaggttttgactcccgcgcgatttgaacgacatcgtcccagtcgatctcgtttggatcgtgcgggccactcgtgtcgatgtcatcatctagccgctgccgctacatgaaattgccatgcacacacactggagacagtgaaaaaaaaaagctgaaaaaggcgtccttcgcacgcatcctgctcatgctgagctcagtgacagctacagggacacagtacagctctgatctcttttttacacgacttgttccgaacaaccaaaccaataggcgtcgcggtaaaccatgtcgtttaagggcatgtttagatacatttgtaatcgcaaatgacaaaagttttagtgggaaagttttgacattgcaaaagtactagttggtgtttagatgtatgttaaagttttgccattctagcgctaaagtgagagagagaaagagagagggagtggtcccaaagcactttttggcacaatttgctactatggactagcaaatgccaaattgccaacttttgctactagtgtatagatccaaaatggtaaaaatgctataaaatgataaaacttttgccattttgaagtatctaaattgagcctaaatacccctaactaatgtcaatttggtgcgcttccccctttctatattgcaatgtgcgactaggattatagaagagttgtgcgagcaagcaacagcaaagaacatggctacgagttggcagcacatcaagaggcgttgtcccgaagatacgaactgctccaaccaaaacaacgcgttaatgcgccgcgtgccttgctcgtacgtacttgccgagcacaactagtttagccccgagagaatcccaacttttttttaaaagggcaagctagcccgagagaatcctaacctgcccgaacaaaataaagggcgagaagagaggaagatcaatatggttgtggatcatgcaacgccctgcctgtcattagttgtcatcgtgctctttttataaaaggagaggctgatcgatcactcgagccggccggggtcgcttcgcaccgctgcccccactactagagcacgaaggaatgataatcagtgggctattctctgaacaataatgtgtgacgtgaattattggccgccggtccttggaaaacagctcggccagcgatcgagcagcgattcatccatccatccatccaacccatttgcaatccatgtgtgcactgagctgagacacgcctttcggcagcaatagtagctctgctatgagcctgcctgcctcagctctactacactttcatccccacacaaggccccattgttatgtccatttttctgtccggttttgatcgctagatttcaggatttgggcgtgacgctgtaggggtaatggtggtgctaggggaggggatcaggggaggcacatgaagatgaaggcggcgcattgaagagaacactttggttgggagtaaagcaggcaagcgtcgtggtgcgcgttagaattgacgcgatgcgggcctgcccagtgcccacccctgcccgtaccagagagagcagtagagtgcagggcagatcgatcaaccgggcgcttttcgttgcgcccggtccccgggttccggccagttaggtggcccggacgaaaggatcacgtcaggacggacggacggacggacggagaggagaccgctcgatcgtcccgtccggcctcggcagttgcactaattagctcgccgagtgcgtaccaccacatgccgcgccgcgccgcgtcgcctcgctcgcaaccgcttctgcagttgcaacgcgactatgcgagcccccgcatgcgcgttttcgcgttcgctttgcagaatcgcactgcactgcactgcacggtggtgcgcttgcccgcgcttcggccggccaccttgacggcacgcgtgcgagacggcactagctagcgagcgcgtcggtgatccggagaagtagaactgctcccccgatctccatcccacctgcgggaatatgcgccgagttgggtgaaaccgtgaaaggcttgggccttatcagcgagcttgagcccatttataacggccgttctggtccaaatacgagcccattacacggtcttcgaatttcgcacggcccgttctggtcgaaacacaagacggcaagttttctttcttctgctccaaaccaagaaaaagacaatgggccaccacctgtcatacactcggaccggccgcaccttcttctctcccaagaaataaacccctccccacaaaacccactaaaaacacactcctcctcatcagatccacacccatcctccccaccccccaagcggcggcgagaccaaatcccccacttctctctcaatctctctctctgctagggtttatccctccgcgccgccgcccccggaagacgagagagcgccatggccggcggtcccgcggcggtgtcgttcctgaccaacatcgccaaggcggcggcggggctcggcgccgcggcctccctcctgtcggcgtcgctctacaccgtcgacggcggcgagcgcgccgtcatcttcgaccggttccgcggggtgctcccggagaccgtcggcgaggggacccacttcctcgtgccgtggctccagaagcccttcgtcttcgacatccgcacgcgcccccacaacttctcctccaactccggcaccaaggacctgcagatggtcaacctcaccctccgcctcctctcccgccccgacgtcgtgcacctccccaccatcttcacctccctcggcctcgagtacgacgacaaggtgctcccctccatcggcaacgaggtgctcaaggccgtcgtcgcgcagttcaacgccgaccagctcctcaccgagcggccccacgtctcagccctcgtccgcgacgccctcatccgccgcgcccgcgagttcaacatcatcctcgacgacgtcgccatcacccacctctcctacggcatcgagttctcgcaggccgtcgagaagaagcaggtggcgcagcaggaggccgagcgctccaagttcctcgtggccaaggctgagcaggagaggcgcgcggccatcgtgcgcgcggagggagagagtgagtccgcggggctcatttctgagccaccgccgccgctgggacagggctgattgagctgaggaggatcgaggtggccagggagattgctgtcgagctggcccgttctcctaatgttgcatacgttcctgctggggacaatggccggatgctgctcggcctcaacgctgccgggttcggccggtgatccgtcactccaattttacccttttagttgcccaggcatccgctctgtgttacattaaactggaatgatggtatggggaattatgttatctgctacttttggtaatatttagtctggatgtctttgaacggaatgtgctaatctttgtgatccaaataagttctgggtctaagactcatttatgttttatgatttgtctgctgattaagctttatgttgctgttcaatacgcatgctagttatgcttcttcttgtttatggattgttcttatcattgcaggggtgtatctttggttactgatgttgccttgctgaattagcactgccttgacacttgcagggatgattatctagttgccctgtggcatctcgaatagtcatgtaccagttacctgacctttcggtgataatattctttgatttgtggccgcatatgctgttgttcttaagcaaccgtgtcccgtagctcatctaattaacctggagtttgccagtgttacgggagtcaattttggatatggaatggcagtgcatagtcggttgatgctttgatatttgattttagcttcacaatgcgatttaggcatacattgtctaatttggtccattttattgttagagtttatccctaaaatttggtctatatatagctctttgatgcttgtgaagcactgacagattctgatagtatcgatacatgatgaaaatgttggattcatgttgataccatttatattttattatgacatgtaggatcagtgttaagctcttatgtacaatctgattgggattgcgttttgatcttagtattcataagtgttgggtggcgtattatatcactgtagtcccttagtttgtagcctcacgcattatccaggatttttatagttgaagccttgaaggctggtatcctctcaaaaatcttttgctgaatttcatctgcactgctgatgcactttgggattgcttgtctacttggaggccttttagttgaggaatccatgcctgcatttcctgcaatttggtttgtagtttttagttgattttttatttcccctcaagaaaacgtagttgtagccttgaaggcctatcgtggaacttccatcctgaatcttgagatgggttgacagctcttaggcttttgagttgatattaagttcatgtttactctgcatgccccttggtgcaaagttgttcacttgatgagtcccactttgtgattggtggtatgatacatgtgaatttgagctttcttaccatataattgttactgatgcttgtgggagttcttgatctacagtcttacactgctgctggtaatcaaggttttgctctgcctctaggaatcttggttttacccagcttctagaattagtgaattactttgcaaatgcttgttgctgatatatattgctgaaaacctaagcataggttattcatgctctcttggtgccgttgcccggaagttctacgccggtatatgtatctacttctatgtgcctatcttgcttatgctattcgcatgctataagcctatcgtgctctatgctatcctattttgtttgatatgaatggtcttgccttatcatttttttcctttccagcacttgttcttgccaacgccttcctaggggaacttgtatcgcccaaacattttgatacaagtctgttttgtgagtggcatatctgagcaaagtggctgaattctttgccgcaacgctgcgttggatgagtgcttacccggacgcaatgctgcagattacaagagcatgcgtagtctgtagtagtagtagcagctttgacagcaggttgccatgtagaatgaactgtgtggagtttctcctccacccaaccgctgtggtgctttgacaggttgccatggagcgtgaacttctcctgcacccaaccggccaaccgaagccttccatgcatctactgtcggcacggccctcatgtggtaggatgctggacaaaggccggactccgcgcgcgatagtacccatctgaatatctgatgcagctgctgcatgggctatctgaatatctgataaagctagcgcaaccgcggaacgaatagtttgcatccctaagccatagtatcaaaatttttgaaccctaacttgcgaaatcggactaaattagatcctgtggcaatataaatgtgtggtttcattgatctattgcaatataaatgtgtggtcgttctaaacttatacgtggtaaaaacaaaagtgacctcatatgtcctcatcgttctaaacttatactcctacgtggtaaaaacaaaagtgacctcatatgtcctcactctcttcctctattcactctacctctcttccccctttcctcgctctctttcggtatcagtagcatcggttggtgccacggtcgcatttctccatcttttgtgacgactccgccttgcgtcccccgagagtcctatcctggataacaacatcgatcccgacaccgttgtccctgtaaggttgcgatgatgccgcccccatcctcgggagccatatctcgtatggcagtgtcgatccacgacgccgctgtcctagctccgcctcgccgctagtgaggtcgtgacagtgtccctcctggtgaggtcccagctccgcctcgccccttcatccttcttcctatcggcctctccatgtcatcgttgccgttgcagaaagaaaaggggataaagaaagagataagagaggagggcagcacaaccggctcaggatgtgaaattaggacacggtgatggcaccaccacttgagctcgagttccaccattactgccgtggcgcttcgtccccatcccggctgctccatcccttccagcttcccgacacaactaggcggcagtagcgagcccacccctaccaggcacatcctcttcgacctctcctcccccattgccgcatatagccgtggtcccatcctctctagtcgtccactgccaccgcctccttcctgcgaatagctagcgagctcgagctcactgattccctcgccttactcctcttcttcttctccgccgtggaccatcgaagccctcctgttgccaacctcccatcactgctgccgtctcactcggacgagctctctggtgccgcttttccttagcacagcctcgctcccatcgcttgtccttcgcccggcctcgctctcatcaggcatcctcgcgactctcctccacattctgcccgtcctctctactacactcttccccgctgccgctccttgttacccctcttgcgatcaaagctgacagagggagatagagggataagaaggaagatattgtctcactaacatatgtgatatgtatagttttttttccttctggtgccacgtcaaccaaaacctcctacaatatcgtgggatctaat

SEQ ID NO: 21530 - DNA, 1837 bp, Oryza sativa
ttatcacgagatgatagctaggatgaagaccctctcttcacagtgcaagtatcgtgtgtgggactcagaaatatctgctagtgggatccataaactcccaagtcccaactccccaccggctcctcctccctcgtcacgcaatccccaaatccactcctccctgccggctctcccctcctcccttcgctgacgccgactcccctcctccctccgccggcgccggctctcctctcctccgggcggtggctcccctcctccctccgccagcgccagtgccggctctcctctcctccgggcgtcgtcctcgaagaagcgacggcagcgtcctctgagccgtgcggtggcgtcgtcctcggggccgagctacgacggcgccctcgaagacggcggtggcggcgcggatctggagcgcggaggacggtgcaagcgcgggacggcggcggcggcgcggatctgggctcctcctctctcggccggcgacgaggagacgaagccgctcgtggtcgttgtcctcctcgctttgtctccactttccgccgccggcggcgaggagagaaggacggcggcggcgccctcggcgacggtcctcggcgacgtctcatctcctcgcaaagtgggccccgcgcctgactttttaagcgaggttgctcgttcctctcctgggatgcgaagaacccagtgtagctatgggccctaccaacttttttcgccacatagactaggtaacacaccacgtaggactaggtaactcccactgtgaaaggcctaagcactacaacattttgacatggactccaccgtttctacataaataaacattcccaatactgaatgcacatttgggcgtgtttggttgcctggcttgtccctagctcgcatctcggatgcaacctgtagactgtttggttgactgcacgtgtcccacagccaggcccaacagatgcaaaaagtctctcgcagccatgctgagcaggaacgaccgaattgagcttcgttgctcatcctggctccacgcatgcagcggcgccgcacccgcgcgtgcagggagagccggagagacgatggggtccctgacaccaccctaccttcttcctcatttcttctatcttctcttctcttcgctatcgtcggtcatggccaccagcgacgaccatctccatctccgtcggccagatcaggctagctgcaagtcctgctcctccctctcttcttcagcaaggggtcgccaagagctctccgccggcggatccggagggcatgagctcgccactgccagatctacctgcacagagatgtcgaagcatgagcttggcttgagctcgtcgccgtcgccagcggcaccaccttcctcgccggcttgagctcgtcgctgcgcggacaccctcgccgccacggacagctacctcaaatccatctcctactcaccttttttttttcgccaaattcagaggttagaagctcgggcctgccagatccgagtagccacaacaccctcccggccgctggactcgctgcaccgacggcggcgaacatgcctagctgggtggcacgagcggctaggtaccggcggcggcaagttcctctgcgagctctgttctcctttttttttttctttctttcttttttccaccgaatgtcattaaccactgataaatatggtttatgtacttctatgcaactgtatatgctcatccgatactgttttcaattattgttgttaggagctccgaaatcaatgctttgtatattttgcatgtactattaaatctgatatatataccataaataaatacgcttttatttcgacggtaagaattctcactattaattctaagtg

SEQ ID NO: 21531 - DNA, 8237 bp, Oryza sativa
cactccccacccggccaaaccccaagagaacccagccggcctccaccacaccacacaccaccaccctcggacacaagaaccgcacgcgcggccggccaccgtcgatgccccctcgccactgccgccgctagccgacgaaccagcatatcttcgccgacctcgacctccatggaccgggcctccgaggagctggagcgccgcagccgctacctcagttcgctcgtccgccgcaccaagctcgccgacccgcccgagccggagccggagcctgagccggagccggagagggagagggagagggaggtggcggcgaaggagagcggtggcggtgaggggaagggcggtaaggtggtggaggagaaggaggtgaaggcggcgaaggagaagaaggagaaggagaaggaggcgaaggtgccgaggggggagggggggaatggggaggaaagaaggtggcggtgcgcgtgcgggcggcggacatgccgccggcgctgcagcgccgcgcgatccgggtcgccctggaggccaccgccccatgccgcggatcgacagcaagcgcctcgcgctcgcgctgaagaaggtatcatccatcctacgcttagcacattgttaatttcttccattcatttcctcgcggaattgttcatcagtttaagtcggggtcgaaacttgtttagatcatttgtaaatggccgtaaatgggggcatatgttgcacactcttaagattaagatctagagctgtttgttctactagcaatgatgttagctttctgccaacttcgggaaagcgtgcttctaaatttggagcatctggaatggttcgagaagctctttggtgttggcagtgaagctagatgagaatgatatgttgacctacattaagtgggaagtaggatggtgccaggtcaatttgttcatttatgagagatggtccactatagggctcgcggaatatttgtgagatttggagaacgtgacagtagttatatttctttgctgctattggtgctttaccacttccaattccaaccatgttcggagttgaatatggatgatatcatgataactaagcatcacatgctctagagagcttatggttctgtgcaatagagctagctttccagcttggtttaattagtaaatatgctagtttctcatttgatgttgagtgatcaagcataattgtgaacaactagttgtgactcatgatcaggaatcaggcagctgatatcaccttttaatgggatttcaaggaatttcttgtggtagagctttcttgatattatcagttggtacctttatctgatggctttccctgaggcggacctatcccttctgtcatttcctttgttagagtcagtaattagagcattgatcatgaaattggaaccctgctacgagtgttgtgaactactgaattagattttgtattcaccattatattttggcaggtagtaagtacttatgtctgtacaggaaaaatacaatcgcaaaaatagggcaagatgcctttgaataagttagttccaaatgttgacatgtttattacacgataaactagctatgaagtaaatggatatcctggagagttgaataagagaatttgcttgctgtatgtgcagcaagcttgttttttgccaaaaatattatgcatccagcttggcagcttgttgtgcaaaagatttgttccttatgacttctagcaagaatatcaagtttttcaaaagatattagtacgttaccctgatgatgaaccccatttcactagcatcctaaaaatacttctatgtaattgatgtgaatgcaaagcatgaatacttttcaagttttcatacattatctccccattctttaaacaaactaatgttgtgttacactgtctgggtgactgcttaaattgctgctttgttttgttattaccttttctctatgaactaagtgatagtgcctacttgtgtgtgcttgctctcttgctattacgttggctggacacttgaggatgcgacgttttcttcaatggccttacatgcattcacagtccttaacaatcaatggctgaaaatgttcctttcatttgctcacaggaatttgatacaacatatgggcctgcttggcactgcattgtcggcacaagcttcggttcctacgttactcactccttgggaggtttcttgtacttctctgttgacaagttatacattcttctcttcagaacagctgttgagccactaagctaccaacgataatgtgcgatatctctatctactgaaacaaaagtgtagattcgatgcaatttgtaattttgaactgaagttgtattagatgctcaacgagtagtaagcttgggtagaggtaaatggccacttctctacatgctaatgctaaattgtaagacagctaagcttatgtaactgccatgtaccacgtgagctcctgctgtgtaagctcgcttttgacttgcaaagctgtagcttaactgaagtttccaaagctttcctgtgtctgcaacaacgctctgtcaattcagctttcaagctgttcaatgttctctcatgggctgatggcctcgtgggagctcaaaaacttttttggtcctcctgatccgtgttaatccaacaagcacggataataatactaaaaactttcttggtgctcctgatcggtgtcaacccaacgctcacggataatactgacaatactcatggtaacattgataattagcctgacagaatgtgctacaccgagtggtgacagaaagcattctggtgagtggcgacagaatgcgctacgccgagcatggacaggcctaggtacaccgtctctgtggagagtccacactataatatagccagctaccttacttgttgccagcgtagaaagaaaccccacaaaactgaagcagcacgcagttgttggcttgttgccagcgtagaaagaaaccccacaaaactgaagcagcacgcagttgttgcccagtgtagaaaccccccaaacctgaagcagcgtgcagttcgttgcccacagcgaagaaaccccagaaaaactgaagcagagaccaagatatagacacaggattgaccataacaataaacaccaataaaaaggcaaacagaaaaacaggaagtgccaccaagcagttcaagaggctcccccacccccaaccaggcctggctccacagacccccacctgctctgctacgagtagcttaaaggcgagactgcaaaaccatcgctagcaacctcacatacgggggagccccagatttcccgacaacaatcacagccacataggtgtcattacacagtagcaaagcactagctacaagcttctagggcacataaagccggctttactgcccctcgctggagtcgcgcttcggagcttccctgatctcttccgcggtgtcctcctgaagccacaaggcacgattggtacagtttgttcagtgatcaggatgattttgacgaaacgggggtaaagatcgcgtgaagagattagtggtatttgagaaatggaaacgtaccgagatgtctgaagtccacagggtcaggttatcacggaggagttgcatgatcaaagtgctgtccttgtaggactcctcgctcagggtgtccagctccgagatggcctcatcaaaagcctgtagaaattggtaagaggggaacatcatgatgccagcattgtctcaaaaaaggtagaagcctcaaagggaccaaagttttctttatggggaggtcaaacaactctctaatggacttagttaatgtacaccacaagatttaactgggttgcaatcaaataacatgacatgaacaggctcagggaatttactactaccatggagacaaaatcaaccaacgaggagttgcatacaaaaggtgtggtaaatactcgaatttgcaatagggaaagtattgtttcttcagaattttttcacttgcaagatggcggataagtcaattagtaccaagtagctacagagcctacaactgaagagcgtattttacttttgtctactattctgttcaagccatatcgatggctaatgtaaattaataccataacatgcaaggatagattcatcttttaaaaaacatgcaagaatagatgcagactcaagacagctaatgcaaggtcagggtcaaccaaaaagaagtgtgatacttaaaacaccaattatcatacaaggtactacacatatagtatagtatggttctcttggattttttttccctaggcatcactataattgaagaacaatgcaaatattttgttctctccaaacaacacctaaacactgtaaattatactgttctacaaatccaagacagaacatcatggtagacaactaaaccaaaaggtgttggctgttctgtccgtagcataattgcatgaacagaaagtgcacataactatgactgcaacttttaaagttgatgttgccagatagcgaagtgtcaccaaatgaccaaaacacagtaaaggaggcatgcggtttagaaatgtaagagcattaaaaatagtacatagtaaaatcctgtgtgcgacgtatctacgcccactaaccttttttccttttgtggactaaacaatgctaacttttcaaagcagcatttatagaatagctatggaaggaaaggaatatgtgacgtgattttttaaaatattatccaaactactgctaaccatatgtattgtgataatcgaattatgtaatcgccacaacaaacatcaatacaccatcaagaagaaaaaaaatcaatgcttaaaaataacatgtaatctctccgttttacaatgtaagattttctagcatcgccaacattcatatatatattaatgaatctagattcatatacattcatataaatatatgaatctagattcattaatatctatatgaatgtggacgatgctagaaagtcttacattgtgaaacggaggaagtaggtaatttacaacaccaacctgctttgcgaggttgcaagcacgatcaggcgagttgaggatctcatagtagaacactgagaagttaagagctagcccaagcctaattggatgagtaggaggcagctcagccaaagcaatgtcctacatcaaaatcagtttgttgttaatttccacaaaacaaagaaagtataatattgcaccaacatagttctgttttttttttcccatagcgtgatcaaggaatatgaaaaaatattcacctgagcagccttgtatgccaccatggtattctcagcagcatccttcctctcagccccggtcttaaattcggcaaggtacctatttattaaaattgattcagcatagcaaaagcaatcacaaactagtaaatgcaaaaataccaatacccatcatattacctgtagtagtcacccttcattttgaggtagaagaccttggactcaggggcagtggaagaggggacaaggtgggattcaagcagcttgagaatgccgtcgcaaatcttggtgagctcagtctcgatcttgccacggtagtccttgatgagtgtgacacggtcctcgttaccacggctttcctccttctgctcaatggaggagataatgcgccatgacgcacggcgggctccaatcacattcttgtatgcaacagacaggaggttgcgctcctccacggtgagctcctcagagtcaaccgtcttggccaccttctccatgaattcgaccatctcctcgtacctctcggcttgctcagcgagcttggccatgtacacattctcctcacgggaaagctccgcctgtgccgacatctttgctatctataaatctaaaaactctacaaatgccaagtctgcaagatcaaagaacaaaaacggtgatgaactaaccgttctttggaggatccatacaaacaatttaaagagtaatccacgatgcagaataaaggcataaattcagaagcaaaaaacagaaaatgatgcattgttgggaaatccatccaattcctgtttcaagtgggcaagccaatgatctcaagtttgatttttgaatttggtaccgtagcacatttcaaagagcaattttgaattactgccccgcaatcgtagcttcagtattcccgagctaactgtacatcagagtcaatctaacaatagatcaagacgagaaaaatcaaaattataagcaaaattctgagaagcaaacatggaccagaaccacagaacccctacagaactcaggtttttgacggatccaaccatactccgtaaaatcacatcaaccgcacacagatcacttcaaaaccaccagagacccacccgattcgtgcagacaaacctaccactaaagcacgcctagcaaaaaaaaatcgctacgaaaacagcagggtttagctgagaattcagatggaaaacgatcccaccaaacggccacagatcacgcgggggatcatgctagcaagtactaccagcaccgatccaatcgaacggaaacacacacacacgaagcgaaaattctacgggaagagatcaaaattcgagagggggaggagagagatcgcagcgaaggaatacctctgtgtgcgtctcctcgcgctctggcgtcgaaattttggggggaggcggacgcgaggaggcgcccggggcccctagaaatgccccaccccagccaatgagcgcccgacgcgtgtccactccaccgtggcatgccgggcacgtggcctcacggccccaccacgcagccgcacaagccctactaggctacttccacgcgggggggacgtcagccgaaggtggggcccacatgtcagcgtcgtgtacggtgggtcccacggccgcgtcgtgctgataagctcggctccctcgcggtgacagcctggactccgttggaccggggcggccaagggcaaagcaaagcggggcggggtttgtttttttttggcacaggtttcggatcttacccgcgagggaggcgtgacgctgccgtgtggggcccagtgacacggtggccacgtgctacggtggtgcgggtagagagggcggtgcgtgtgtggccgtgtgaaccgggcggcgcggcggacagcgggacaggtgaggtgaggcgaggagaggcggcgatcgggggcgaggtgaaggcgtggcgctgagcaggccgcggggcccaccacgaggtggtgctcgtggccccgtcggtgttcggagttttgcagagaagacaccgaatttcgcagacaaaagttatttttgtgctgcaattggtggacaaacgtctggcaaaatttgtgtgaagtttccaaacaagcctgcaattaacatcccaaaaaactgcgtgttttgcgtgggaattcacttcctactacttttgaaacgttggttatttcagctaatcatacggcacagcgaggagtacagagtactggagctgtattgttctcctataatttgcttataaaattcgtgtctaaattgatattttccgcgtatttgccacatcgattctcctctcaaactggactgtcggctaatgacgccgtacgccacggctcgtcaaagtcgtttcgttctaatcctgccgatcacgtctcgccgccggatatctccacgtcaagactagctcggaggtcgcagtcgtcatgcaccgggaggctaatcctgatggaaaagaaaatttgataaatcgatggaggcctaccaaacacatccgctaattaaggcgatggtcgccggcgagaaaaagggcttcgccgatagaaaatttgcagcaacagttggtaggtcgccatcgttctaggcttctattagccctgtatgagatgtgaatctcgttttaattagaaaaaaaaaacagctacgcgtatgcaatgtatttgccatgctgaccgtagaatgagcttaaagcgaatttaatattttgtcatcttccgtgatgtcattcgtatgactttacgtgtaccagctccgttcggttaggctttgatctccaaaggaagtagcaggcgatcatttcgacactatacttggccaacttggcaacttgatgcatccatcactgcatttctttcttgtttttttcgtcggggacgagagaccaagtcggaggctacaaacacgaaatgaaaacaaataaaatcagcccaaagtcattagccgagcgtatgctgacatttgtacgaaattggcctctcggaccatttaggccccctaatagcaagatgctttgagagggccacggattccactggtgggctgaatcgctggcaagttcgacaaa

SEQ ID NO: 21532 - DNA, 2619 bp, Oryza sativa
ctccccgagctattgaaaccagtgcaatttgaatcgctcagcggttttgcagggcggttttgctgatgtggcaccgacatggcaatgttgacctagtcttcgtcccatgtggtgctgacgtgacattagaattaaacaaatatatgtgggacccatatgtgattcacacataaaaatatattgtgggtcaactgacatgtgggccccacatgtcatcctccctctctcttctctctcccttccctctctttctctctcatggcgcaataagccggcaggggcggcgacgacgggcgggagccggagtggcagcagcgatgggcgagggccggagtggcgtcgggcaagcagagacatcggcgagcagtggagacacgagcatggcgcaggggcccgttgagcggcagagacgcgggagtggcgcggcgttggggatgacgacggcggtgctcagcctcgatctccgccgcggcggcccccgctccggctcaccaccgaattgcgccaccgctgcctccgtcgcccctttcacgcccacctcgtcccctccatgctcgcccgctaccccgccctctcccgcctcgatctctccctctgcccgcgcctccccgatgccgccctcgccgcgctcatcgccgcgccgtccatctccgccgtcgacctctctcaatctcggggattcgctgccgctgcgctcgttgctgcatgcccgaactcaatgacctcaaccactctaatggcccaacgccgctccggcccttgcccgctgccgctgccgctccggccatcacccgccgccgctccggctcccgaccgccgccgccgcccctgccggctgattgtgccacgagagagaaagagagagaagggagagagaaggaggatgacatgtgggccccacatgtcaatggggcccacaatattttttatgtgtgaatcacagatgggccccacatatatttgcttaattctaatgccacgtaagcgccacgtgggatgaagcctaagtcaacatcgccacgtcagcgccacataagcaaaactaccctccaaaaccgctgagggagtcaaattgcactggtttcaatagtttggggagtcgtcctatccggttttgcggttgagggtcacggattagattcgggtcactttttagggagtcaaagtggacttattgcccacaaaacctttcatagcaaatcagctcaccaagtatgatgggcccatggccaatgataatacctcgccgttgctttgcagcctgtccattccattggattcattacttcagcctgtcatcgtcaattcgtcatcagttcatcgctcgtgtctgctctgtttagacattcagtcgtgtttggattcataaaatcctgtttagattcatgatctacggtgtttaacctaaatcaaccatctttcctcaaacgtgttcattatctaaaccaaaacacatatggtcggcatttcggttcatgtgccacgattgatctactcgattgatatttaggggaagcagacacaaaagcgttaattcccaaatgcccaaagaatccatctagatgggagattaaatctaatcatcgaaatcaccatcatctcgacataacagaaaccaaatcattgctttactgggggtcatgtattgctcggaacggggccaagattccaccggttctattcggcacccccttttgaaccgcgataagttttgataaactgaggatgaacagaggcctctccttttgtttcggcacctaaccaataatcatcgctcttaattatgatctacctactttatgtctgcacccgaatttttgggacttcttttccaacatgtgtcataaccaggaaaaaaaagcatgaaccccccattggtttagcttctctataagtatgtcctgtaatcaacagctgtttgcgtgcaccgatcagacttgagtatggtcacttcttcagttcttcctaaggtctgcgaataatcacactgccattttttgtgaccaaaacgtgccgaagctgactagctagcttggaattagtgtccgtgatgttgtaatctagtggatcatggatggaacgaggcgtatatgaatgtgtctagaatgcgttaatggacatatatatcttccatcgatcttctgcttgatctaactctacacgcattttggggtctttttctttctttctcaggtggttgatgatgccggcgagggcgaggccaaccctcgccgggcgaaatggtggtacgcgacgttccacagcgtcaccgccatggtcggcgccggcgtgctcagcttgccgtacgccatggctcacctaggatggtaagtcaattatactgtacgtacgcgcgccatggctagctggagctgtgtgcatgcagcgaatgactgtggtaatcgatcgaacgatcgagcagggggccggggacggcggcgctggtggtgtcgtgggggatgacgctgtacacgctgcggctgctgatcgagctgcacgagtgcgtgcccggggtgcggttcgaccggtaccgcgacctcggcgcgcacgcgctgggcccgcgcctggggccctggctcgtcgtgccgcagcagctcatcgtgcagctcggctgcgacg

SEQ ID NO: 21533 - DNA, 12471 bp, Oryza sativa
  unsure (1)..(12471): unsure at all n locations
ttcctgcagccccgtctccctcgccgccgccgccatgtccgtcggctactcgacgatatcatgggcggcgtgcttggcgaggggtactcccgcggcggcggagggcggcggtgggggggtgagctacgcgtacaaggacgggacggcggcggactcggtgttccgggtgtgcagcgcgctggggcaggtggcattcgcgtacgccgggcacggggtggtgctggagatccaggcgacgatcccgtccacgccgacgaagccgtcgaggggggccatgtggaagggcgccgtggcggcgtacctggtcaccgcgctctgctacttccccgtcgcgatcgcgggctactgggcgttcggccgcgacgtctccgacaacgtgctcgtcgcgctgcgccggccgccgtggctcgtcgccgccgccaacatgatggtcgtcgtccacgtcctcggcagctaccaggtgtacgccatgcccatcttcgagaccctcgagacgattctgatcaccaggatcaggctccctcccggggcgctcctccgcctcgtcgcccgatcagcctacgtcggtaagaatcgatccgatcgaccaccacccatcgctgcaagaactgatcgcatattcgcatccgttcatggctgaatcatatctgtcatggcacgcagcgttcacgctgttcgtcgcggtgacgttcccgttcttcggcgacctgctcggcttcttcggcggcttcgggttcacgccgacgtcctacttcgtaagacgcgattgcccatccgaaatgaacactttgccataattctcgtaacattcggtcttcaccatgacaccatggatgaaaacatttaaatttcttttgaatgcagctcccctgtattctgtggctgaagatcaagaagcctccgaggttcagcgcgtcgtggtttgccaactgggtaaataaagacacacatttttttccgtcttccggacactcatatgaagcaaaaactaaactgaatgcatgcatgtaactgtagtagtagagattcaggtttgacaggttctgtttgtttcttctgcttcatctgtcagggttgcatcgtcgttggagtgctgttgatgatcgcttccaccatcggcgggctacgaagcatcatccaggatgcctcgacgttccagttctactcgtgatgggtgatgatgcatacgtactgacttagtacatacagaacgtcaggatcaactgtaaccaggccaagaaattagaggtatcaagagtagttgcaaacgatggccatattattctgtgactttcattgatcgttggcctcgcttgcagcgtgccggccagcggtccttgcgaaatgtgtaactgaagacgaattacagtagtgattcagtgatgcgcatcgaccctgtctgtgcaccagatgtaatagaccttgctgacacacggtttcgcaatcctcatgctgaataacatcgatggcgattgcagggagaaaaatatatataaacatctagtaatacaagtttactatcgcagtgattgcgaatcttctattcttctgtttcgagtgcctcgtctttttcgtttatgtttatatttgtcagccaaaatttgaattttcaactttaaatttgaagctgattttaaatttcttttcattgaagtttatttttcagcctttgctttaaatcgctaagaacacatatataaaagttttattcacaaattactttttgtttgcaaatatgccgtttcgcacaatggctccgcgagtgttgtaactttaaccttgaaaaaaaaggggaaaaaaactcagaattgtcttgtacatactttatctgtattataaaaaaccaatctagaatcggatatgatatatcctatgtttagattcttagcacttcctctgttttataatataaaactttctagcattactcatattcatatatatatatatatatatatatatatatatatatatatatatatatatatatgtctagattcactaacatttatatggatatgagcaatgctaaaaagtcttacattataacatatatatgtcacatcggtattaggttggtgttgacgaaaaaatcgaacacactggcctgggagatctgcttagctcctgtgcaggtccaaatcttgatgagatgcgggcgtgccagtcagtttgatcctgtaactgacaagatatgcaaatagtagatcaaaacagccgatcgactgacaagccgatggagtagttccagccgatagccaataatagccgatgccgataccagccgatagcgatagggtttaagcaatcggctatatgtccaatgtagatgatgatataaaggcaatcggctgatgacgatgtaatgaaataacaatataatccagtataaaccaatcggctagcaatgatatgataaataagcatcaatctgaaggttaaagcacacatcggctggaggtccgatgtcatgaaatctacaagattagattaaacagtgaaacctttattgtcatcggctaaatccaacttatatgtatatgcaatccttatgagccaatgcaacgtccagataactcaccggctgaagccctgatgaaacccttattggcaatcaagaagcagactagagattatggttctaagcacgacttagtagatcaaacttaactgatgcagcactaagtatgaaaagaaacataatatctagacaatcaagccgttgactgagttttcagggtggtagatgtctaagctaatctaatctagcaacgcgatttagccgataccggcataaatcctaaaacgagaagcagccgatagagctaaattgatatgctaagactagattaatagagacatatgataaataggtaggcaaatatatcatccaaaccagagcaatccaagaggtcgaatgtactgatgcagccttgaacgacgccaacgtaaacgatacaattgcccgggccggtggaacattggacttaccctttagccggagatcaaacaccgatgcagccccgcgtcaggtgccaagtcccgccggacgataaaataaagtagaaaaggtaaaaggtggcgatgcgccgaattgtattcatcgtgaagatagattacatagaccccaagtgtacatatttatacccatgggttgatacaagtctttgtcggacaagaaagaaactttactaaagataaaaggaaaagataaagtccttataggacactaaacacactttactaaagataaaggaaactaacaaactatttctaattaatagataactgcattatctttgaactcgatctcttctggataagcttcctttagtagattaatttctttaaccgaatatagtaagaatccgacaactgacgacttacaactcttatcggctaatctcaggactccgaagccgatgctgactctaagccgatgactactccgggcttaccaaatttctgttaccagttggtttttcctgagacaaaatccatcccgttttataagttgtaatatgccgtgaccatataggccacgtatacgacaccttgttccacacaaatcgtgcgccgcagcgtcgcgcccggaaaaaagcgcttatcccccgcccctctccaccccgctccgcggccatggcgatggcggcgcgaaccctcgccctcgcattccccctccccctctgcgccgtctcctccccgcgccgcgccaccccactcgccttgccccgccgcggggcggcacgaccgctggcctcgctagcccagtgccccgcgcgtggccactccccctcgccgcggcgagcagcggggcgggcccttgcgccgtgcgcggccatgcgtggcagcggcggcggtggcggtggcggagagtttgcctcggacgatggcggcggggcgcgcgcgctgcttcgggcgacgctgtggggcgccgaggccgcctacatcctctggctcttcctcctaccatacgctccggtctgtacgtaaacacgaactttttttgctcctgtttgtgtagatttcgaagacaccagattttggacattgcttcaatgaactggattaaaattttgccgccagtaatgcattacagtacaggcttacaacattagttcgttccgatgtacttacaaatagggattactagcattttgtgtatgactatcttttgattactcaacatcaattttggtacatttgcatctatgaattgtatttgtacagtttaagaccaaaatgcattagtgcttcttcgatgtagttagcaacatcggtgtatggcaatacttttgattcgttcattagtgcgtcccgacgtagttagcaattaacatcgttgtatggcaaaactttgattcgttaagatcatgcagggtgacccggtgtggggtatctcgcaagcaacgatcagtgacctcattggcttgtcgctcaatttcttcttaatcctgccattgctcaattctggtacgcctgtaatttaagaatctttagaggcactctaatttgaagttcacagcattacggccattgattctattggtgagttttctgggcagcgtagctggagttcacctgctcgaatccccggtgttgcacccagtaagaaatcgatctgcatccacttatcacattgtgattgttgccatgacttgtgggtacagcatttgtgctaaatttggtattactcgcctaggtggctgaaggattgttcaattttgtgatcgcttggacactgctctttgcgccgcttctcttcacggattctaggagggatcggttcaagggatcactcgacctactgtggggttttcagatgttcctcacaaacagtatgatctaaccgacaagaagtgctttgcagctcatggatagatcacttcagattatctaacaacaatttttatttgtttagctttcctgataccttacatggcaatccgactcaatgatcctgacaaggacaagtctccaccacaaacatcaaaattgggttcagttatggtaagaggtgctccaattgtcggcctaactggtggcttggtctgtattttgtcgattgcttgggcactctttggtcgcgcggatgctagttttgggggcattgctgaacgctggcagtatgtccaaagttatgtcttttcagagcggcttgcttatgcatttctttgggacatactgctgtattccatattccagccatggttgatcgcggacaatattcagaacgtgaaggcaagtgctactgagtttgtgaattcagtaaggtttcttcctgttattggtcttgttgcctacctgttctgcttagaggacagagatgattagctgctgacatgtcataatttctgtggccaagtatggagagatttatgttaaatgaattcttcacttggtggcacattttctgctctcctaatgttcatggcaaggaaaaaaaatcgatggcacaaagtacttcccttgaatgcctcaactgctaaatccatttgctatgaaaaaaacaacaggggacaactaaataacttctctacggcacaattctaatctcccctaagtcttcagaatgtcagagctgacaccaacgccataaaaccaagtgcgacaggaacgcagtcagctatcagcttgagcccgctgctgtattccggcgtctggctgcttgtcttcggtgacggtgtcatctgttgcggcggcgcccgtgtcaccgtcaccggcgtcggcgtcgatggagcagtggagttcggcgtcgagcgcgggacgctcaccggcggcgatggcgctgctccccctagatcaaaccctacaagagagagttggaagaaatttttcaggttggtcgccgacgaagaaagacagggaagaaaaaaactcgggacgccggcatgcgatggattggacgcggcgcacgaccgaggctgcacggcgacggcgagatcatctcggttacctgggcaggcggtggccgccggcgggaggtcgaggcggcagaggagaggcagctgcaccgcgcgcgtccggttcacgggcaccgggatcgcgccgccgccgccggactggctgagggcctggcagaggcagagcggctcgtcgtgcaccatgctgcccaggttggcgcagcacgtgttcgacggcgcggcgttgttgccgccgacgaagccgaggcatgggaggagccggatgaggccggcgttgcagccggacccggacgacgcgccgccgggctgcgccgccgcgccgggggcggtgaccagcagcagcgcagcggcgacgacgacgacgcaggcggcaacgacagctgaagaagccattggtactggtacgtactacgtatcctctcctagcttagctactcctttctcggctgatttctatgtagattcattagttgctttgagatgctaggatttatataggcatatagcactggaggaatcatttaatcacaatgaaaacgcgtggttgctatgcatggcagcatgggaatggtgtgcttgatcttcttgggggcgccgattcggtgattcctgtgaagttgaacgcgccatgcatcgcatgcaggatgtgcgttctgtgtgatcatattgtagcgtttaggatcgagttggcatcgtgcatggtgtgcatgtagtaccatgtactgatcctctctaggtcggtgtgatttctattgaaaatttggaatcagctgttacaacttaccagccgcttgaaactgctaccttgcatgctgctgatagctaagctaaggttagcagagtttagtttgatgccaattttggcgatggctacctcttatcaagctttgataggagtgaattgatttgtggagcatttattttgccgctaaaatttgggaatatagcttcctcacttggatctatagtttgattcatccccaaaggtgaaccattgttgggagtaaattagtaagcttggtttggcagacttgccaatgcatttcccaattggtcagtcgctctcctctagctcactaactagtgagaggtactgggccacgggttttgctgggccctttccgattgaatgctattatgaagaaggccacatcttcgcttgttgggctgtcgtagggatggcaacagggctgggttgggcaggaacgcccccagccccgctaccttgttcggggcaaaaagctcgaatttttttcgtttttagattttttttaatatttacagaaataatctatcaaccaaaaaaattgcagaaatagcccctgccgcccacctctgggacggcaagctgacgtggcaaacgggggaggaacgggcggtgacggagggagggttttttttgcaggaaaacccttgccgccctctggtggggcggcaaggggcccgaatgcaaaaaagccagtcggggccggctattttgcaggcggccccttgccaccctctggccgggcggcaggcctcgctgcctataaaaggcctgctgcccagcccccagccctcattcttctctcctcaattccagtgaaaaaaaaagaagagaggggaggagaagagaagaaggggcgaagccctgccggattcagacgccgatttcaggtaatattcatagatcctatatgtgactattgagttaaatagtgtgtattctttaaaaatttgtttgaataaatgcattatatttttagggttttagttgtactaatctagaagtgcgtattgtagatatcggtaactacgtagatctgctagtttagaattaatacattaccgttgcattggcttacacaagaagatattacgttgtagatgtttattgcatgaaagagtaatatgatctagttatttcgttgacagatatgtcgaacaaacaaatattccaagtttaccatggaccaagaaacgtccgttacgggccaactggggtagatctgtcagattttattgtatcagaaaggggaattgatagaccggctgagaggagtgtaccttctataaaaggatggttaatgaggggcttgagagttgatccacagacaagtgacataacaatcaatgttatagtaagtcgggcaactgagggtttttattgggaactaatgccagttcaaaactctcgagtgtggagatggtatttggaaaatgcattgcaacgcgggtggcctctagctttggttccgtttgttcacccgaaggatccaggtgtgcagacgaacatggatgatggcgaggaaccaagtgttgaagtaaacgagacttctgtggaggaggtcaatgcacgagaggacgggggcgtagtagctccagtgggcattcaaccaggtggagtggccgacgagggggagactgtcggtgccattgtggatgaaatggagagggaggattctgacaacgagcgtgtaaaggaaggtgattcgtcagatgatgagacggatattaatccagcagaatgggctagtgaggatttttctgggctgatcgtctctgaagaggatagtgtgagatgggagttcaaagaaaatgaggttatccagggagcgatttatagtagagcagaagatatgaaggaggcggtaaaacattttgcagtgtcacttcatagagagttttgggttgccaagtcgaaccggtcgcaatatgaagttcggtgtgttaaggaaaaatatggttgtccctggagagtgcacgtgtataaggggaaatggaaggattattggacagtgtcagttgttaccaagcatacatgttttctacctggtgttcagaaataccacaggaacattacatgtgcatttgttgcatctgagatgtatgcgcatgtcatcgataatctcacatatgaaccaaggtcaataatccgacacattgaagagacatacaagtatactattagctatgctaaggcctggagggccaaacagaaaataatagagatgagatttggaacttacgaagcctcgtatgnnaccaattctgnnccacgnnncctgncttggnntgttatcgagnngaaagaaannncctgggnnagctcttacnngaaagtgaagaaattcccctcaattgaacatcctggcaagagtgtgctgcaaagggcgttcttagctctacatgcatgcaagatggcattcgtgaactgtcgtcctgttctctgcattgatgggacattcttgacaggaaagtatcggggccagatactaacagcaataggggtagatgggaacaatcaggtattgcccttggcatttgcttttgttgagagtgagaataccgacagctggtactggttcctgaaattggttaaaacaaaagttgttggtatgaagccaaatgtatgtctgatacatgataggcacgctggcattctgcgagcgataggagagttgcagtttgggagtatggaacgaggataccccggtgtttgggaagatgtacagagtaggtggtggatgcatcatatgggagctaatttcttcaagcaattcaagaacaaggagctcatgaacatgttcaagaggctgtgcaatcagaaccaggagaaaaaaattcaatgagctttggaagagattaggtgagttgacagccaaatgcagtgatcagcgtgcagcggctccatcgaccgccgttgctgaccctcctcaagctcttggacctctcccaacggatagtccaacattagttagaagaattggattggagattcggaaattttctcagtggattctgcatgaaccaaaagagaaatgggccaaggcttatgacacaggtggtgctagatatggaataatgacaacaaatttggcagaagtttacaactgggtgatgcgcggtgtccgtggactgccactagttggcatagtggagctcattttacatgggacatgcaggtattttagggatcggttccaggcagttcttccctctatgccgaacaacagcattttgtttggagctttcatgcagaaaaagctagaggagttgcgtaaaaaggccatgaaacatcgagctctagtgcaaggtacccaacagcacaggtttgagatactatgtcaagataaggcaggcaggggtatctaccgcaagagagtgaagcaggagtgtgttcttaaagccgacggcacatgtcattgctcttgtgcaaagccgaagctgctccacaggccatgcacccatgtcattgctgtcgcagcggagtgtggcataccagatgcagtatatgtgtcacagtacttcagtaagcaagcaatatatcatacatggagcggcgagatttatgggttcggcatagctggggagttcacagagactaacgatgaagtactcaatattcctgacccatcgaagctccgaggcaaggctggaaggaggaggactcgtcgcatccgcaacgatatggacgagtcggaggctggcagggtgaagcgttgcagcaaatgcgatgaacatgggcacacctacaagcattgtcctaaagacaaggagaaaccaagtgcggcggaggcaggactatcaggatcagcagcagatggagctcgccctacgggtgaaggcactacctccactcgaccacgtcctaggcgtcgtcgtgccacgtctagctacgtggtgtagttcttatgttctatgtcggcatgtggatttgcttgtaattcgtttcgaacttatcgatgtgtttatgtttcgtcgtgtaatgtcagacttcggcatgtcatgtctttaggtctcgtgatgtaacgtcggactaaggcgcctaacgtctttaggtatgctgatgtatgtcggacttcgacacgtaatgttatgttatattattgaactctacatatatgttaaattgcacgtcatcgttatgtaccattagtaacgtttgctatatttaaatagcctgtactcttgttgtacataattaatctcatgattttattactatttcataattttgcaagttatcttttgttttacagtaatattttttgaattgttctaacacgaaacactatatttttcagagatggcacgtcaggatacaccttagttgttggacccggcgatagatcaccgacaccggtctcaccttactgcggtgggtgctcagcttgggacgttccgggcacggacgtgcggtgagctactcacggttcacgactcctttgtcgagaggtacgaacagtgttttactataagttagttgcactgtagagcagtcttctctttgtttacttgcttcactttccagtactgtatgcttgtgtaatgactacgttgttgttatatatgcacgataccttttggcgcatgcacgatacctttcggcgcatgcactactttctgccgcaccgatgcagcctcctttattcgcgtgtgatacgagtatttgcccgccatttggcacatacgaccaatgtaactttcggcgccgatcatgcatgtatctttcggcgccaatcaggcgtacccaccataccccaccacgttcacatgtcaggggtatcactcgattttttgcgcttatataagtcgccttaacgagtgaggcctcacaatctttcagaactaagtcacattcagtactctcttccccacttgcttcattacaaatccgaccggctttcgtcaatggctagacgccgagatgttgaggatccaaactggcgtagcgatccttgtgtatacctactaccaccttggtgccagcgtcctctctgcctatgcggtgatcgatgccaactaatggcttcgaggaatcctgatattcgaggaaggcgcttttttaggtgccctaactatgaccgtgaggtattttattatctgcatatgcttattcattccgtatgggcaatcgctttattcttcgtaacactactctattcggcagacccgcactacggcttgcgcatacatcgagtgggtcgatacagaaaatcccgttctcgacctaaccacttgtttacaagaaggtcgctggtatttcgcatccgaaagtactgagcaatacttacagagaaaagcagcttatgaacgacaatgtcgtgaacaacagagcgactggcgggtgctaactacggcactccctccatgggaagcccgtccaagatgcaagtgtggtgatcgttgtcaggttcttcgttccataaatcctacaacattgggtcgaaggttctttgtttgtccaaatattcttgacgacgatttcatggtaagaatattttgattacatgaatccttattttctcacaacatttactaactttgcttgctttacatctattctttcctcccaggaaccaccaaggagatgtcaatacagagaatggatagacaccaaaagggttctaactccacctagccgtgttgtgcagcttgaactaccagagcaatacagggttactaaagcgcggtttgagagaggagagggatcctcacgtaggggttagctattatcggacaacttagcatattgaaatttctactgtcatgcttccttgtccca

SEQ ID NO: 21534 - DNA, 12383 bp, Oryza sativa
tgccacgtcagcttgccgcccaccattaggacggcaggggctatttctgtaatttttttggtcgatagattatttctgtaaatattaaaaaaaaatctaaaaacgaaaaaaattccaaaaagctcacccttccccggctccggtgggttcccaaactctgaccggggcccctcgggtggtgaaagaagaggagaaccgacgacatatcaggctaccagtgacagcagattgggttggggcgagggatggcaaactactggcacctcgaaaggagacgtaggagccagaggagtttcgaattgtagccgaggagcgtggtcgacacatgtgttggaatgttgcaggggaggagccccggacgctgtcgggaagatgggagcagagaaggtggggaagcttcgtactgcaggaaagaactttgcgttgagctgggaagagcgccggctgtcgcgggaacaaagcttggtgggggcacggcatgtgcgctccgcctcttcgagaggcggacggcggacagagggatggagacatggagtcacggagagatgggggcagctataaaaaagagatatacagatagggttgtgctagtctacggttcatatttgggctagttgttgtgggctttcctctctaaattgtgatatttgggccaacttgcctctaccaagtgggtctcctgggcttgcagtgtactatattttaagtgctaacaaataccccggggcctcgcgggtaagtttcatcccccgtcccctcaaatgaccgggaccctgccccgacttccccatgggttagaaaatcccccgtccccggtccctacgaggaaattgccacccctaagctgtcaacagctctgtctcctttcggctgatgggtggtggcggtgaaggggtagaggtattgtaggaggtaaaaaaaactggagtaataaacaagcatcttagctcactgcatatatagtgaagagtagcaaacataccaaaaaaataaatattaatccaacatttagattttttttgtccgtttgctactctttactccctccatctacttttgatagacatatttttaaatctgaaaaaattatttttatagacatattttaatccaacaatctatcatcttaatgactttctcagatataatgcgtgactctccattccttcataagattggctacatgtgcatcgagaaatgtaaatattaatgaatcgcttgtttatgagaaatgactggtagcatgtttaaatggatgataagtagaattacttatccttgatctgtgtgccaagatgaaacatgactatcaaaagtagatggatagagtaacatatatggctgagattctgatttattactccatatttctttttagatttttaccttatcaatctcatcaccgcatgattagcaactattacggtgtaggggtggagctgcctacctgccatagtgccatcaaatgctggtacgagatggaaatagttacgttagtttcgtgcttaggattagcacttcgcgcgattttgatacttatgattagtgatgcaatgctggattagacaccgaagtcaacacacagtactgaaaaacatgatgagatatttggtcacaattaatcagtaaatgaaattgtttcagttttgcattgaaataatgaaattgttttgagttttgcattcaaatgaaattttagcgggttgcaaaatgaccaatgatttttcttaatgaaaatctggtgttgtggcccctttctctaaaagcaatgaggttgtttgaaaataatgtgtaggacttctaaatccacttcacatatgtgcatgctctttacacgtacttagcgataattggaggcgcctaaagatccctcctgaaagacatgcacatatgtgtactcttaaaattattaattgtacggaatacagtgttgctgatgccatagatttggcattgttggcacagtgcacatgctagctatttggccacaagccaacatcgatcctagttaaatcacttacagtagatctttttttttaaaaaaaagaatactatcgccggtatggattctaaattgtacaattttttttcgcggacaaaagcttatataaccacccaaaaaccgcgttaaattgatttgaattggagtaaatttcaaggggaaaaaacgtgcattgccccatcttctcataaattctgtgttttttttggttaatttgatcttgtcattgcaaacgtgtgacttttacagtacaatatacaacaatagtatatactgcaagtatacatgatctaacggtgtagattgatttgattttttagttaattagattacagtataaaatttgaaagagtaattttgtcttttctttgttattctatcaaatcgtgctatcatcacgtgtttcgtcatcaaatggcggtcaggatgctcctcctctagtgcaccataagatccaggactaggtactctcaattagagtcgctcagtattttttttatgctttcaaaaaaaagtgtattttttattttctatcaaatttctaacatgtcattctatatactaccagtatatattgatagtatattgtaccataaaagttctatgataaatgccattacaaattacctattcatagccgtgctactcaaattttataaaattagaaccataccatcaccgtgacgtttttcatcttcttccccatctgcacgtggggtccacccctcagattcatcttcctccttttttttctttcttttttctcattccctaaacacatttgcaatggcacggatcaaatcaatctcttttttttttctttttgctctacattgtcttcagtacaattatctgttcggtcctacccgttgtcggtgatcggaccacccagctttccggtccttaaaacggagtagaagaacgggagatatcaacgtgaagtacggctaccggagtagtagcaagttgcaagctctccccggttgtttgaggctggccggatggccctggctcctcgcatcaatcacgggctgcgccgaatcgtcaagaggcgtatcgttgacggatttatgtctgatttgatcgagcttgagatcgcatgtatatttgtcgtaaaactacaaggccccctcgaagcttgaatgctatcaatgcaaagggaaggagccaacgaaggagaggcgagagcgttgagtttggtaagaaaaaaaaaggaaaaaaaaagaaagctaatagaatcgaccatgcatgcaatgcaaccactttttgatactgatgtccgaatagaattgaaatcaacattgattgatggagggaattggctagagagtaccccctgtcttaatgctttggcttatatggctaagtaacaatgattagcttggaggttaagcccaggaggtaaggtgactcgatcttccctccatatgatgccctttagaccctacttaagtctcatccaagagaattatgcatcagtatcatcactgtattcgctagtctgtcctgtgccgcgtgcaactgatgcagtgccatgtttgggtgaaacatgtcttcagaagttcagatgtatctctggagagaggagcctgccactcatcccatgcacttcaccgacttggagggcactcaattctatcccaagtttccaaccacatccagggcccggacattcttcaaggatgctaccaatctaacaacacagatacacaagggtagggcatatatggtacagtttgttaaaaacacacctcctgacagcttgtatgtagtactaccagtagctgtaaagaccaattcaaatgtgtgaggccaagggcattgaattgttctcaggggagaataatggtctcagatcagcaatggtaaatgggggtactgctgctgataatattattgcttgcatgagggccatagcccatacagccttggggtaaacttgcatgagggccatagcccatacaaccttggggtaaaaaacaaggctgcagagagcacacaacaaacttgcaaagggacagatgaacaaagacaacaggagcaactggaggctgctataaaaaaaaagtgaatttctgtgccagattgctttactatacatttgaatcttactgaccatggtagtagtaataaattagtaacaagttcaaactgagctgccatgtaacaagatctagttttggataagctgtggtccatgtttagtgataatgatagtatattacctttgggttatatacatatgacatggatagcatatagtgatagcggttatcaagccccctttagaacggagaaatttcacgggaatttcgaaggcaatgaaccaattcatgtaaaattcatgcattccaaaagagcatcccagatttcttcagatattaatttgtgcctcatgtagtgtacccaacatcgtgaaatcaaaccatttttctatacccagcttcgtctttaaaaaagtaccaaatttgccaacgactcctttggaacaaagtaatcttggaggaatttttatagaattcaaatcctatggaaagtgtcctataggtccttttggaacaaagcaatggctgtttttggaggattttcaacataagacccaacctaatttaaaaaaaaatcactctctttctctctctctctctctccatctcctaattcctacattttccatgcgttatatccaaacaattatttatgtagttttgatgtgatttttcattcataggatttgaggtgccaagtattcccgtgtttcggaaatttcggaacactaaattaaaaagaggagtaattgcccaagagagaaaaaaaaggaagtttgatacagcaggtcaagctcaaggtcaaaacccaatggggcaggtgcgtatggaggcggtgacgcaaagcatatacacaggtacatacatgcaacaatgccgtcactgactcgccgctctgctgcacggacctgccattgccatgggattccttggagtggcattgaagcctagctagctctacgtttgagctgcccccgtgtgtacgtgcctgcccgccgatcggccatccccttggatctcgcagctttctccagtttcagcttttgcttctccttctcccacgtcctctctctccctgaccctgagccaaagaatctctccatcctccatccttgaaatggtttgatgcctgcaggcatcagccatgtccagttcagccagaggaatcaccctcctctgcctcctcttgatcgtgtcatccactgttctccacttctcgatcggcggcggcagcaatggcgagaagaggagagacgatggtgatggtgacggtgacgatgagaaggtgaggttgttgcttggtgccaacgctctgggcgagcgggataggcggcatgggcatgggcatggaggtggtgtctcttcggcgccggcgccggctccggctccggctcgtgcccacctgccgccgccgctgctgcacaagaacgcgcggctcccggacccggtgcccggtagagtcgggctcgggcacaggagggggaacgccaccgcggcgcacagacggcgcagcgagcgggaagggaagaagagcacgccgcttgtcgtggtcgccgcgggcgccgcgctgtccggcgcggcggcggtgctcctcgtcgtcctcgtggtgttcctggcgtgcaggaggttccagaggagggccatgccgggcgctgaccagagcgggacaaacaaggtgagcttcgatcctggccccgacgtgttctacctggacgccgtcaagccgtacgtcgaggccgaccatggcggcggcggcggtgttgtgaagacggcgccggagttggccgggccgaaggaagagcccaggtgcgaggaggaggacagcggagttgccctgtccgacgacggcgccgactccgtccattcctcgtgctgcttccactcgtcgcacttctcctactccgagctccgggacacgaagccggggagcaatggcgtgtcgccatcgccatccggccggtcaagacgacggagctccgcccctgtgacgccctcagagaagaacaaggctgcgagcccttattcgccgcagtgcccgcgcacgccgagcaacagggagcgatcgtctcgcgcccactccccgagctcgtcggtttcggacttgacatcggtgtcgacatcggtggtcaaggatcatgaagtccggcgagccgtccattccctgatgtttccagaagcgcagagcggcggcgcggggcacgtgaaggaagacgaggcagaatcaggcaatatgaggccgcctcctcctcctcctccgccgccgccgccaccgccgccggcagtaacacagcagcaggatgtcaagacaagctgtggaccggccgttcccccaccgccaccgcctacgcctccgccgccaccgccactgctcgcaccgaaacagcagagcagcggcggcccgatcctcccgccggcgcccgcgccgcctcctctgttcaggccgtgggcgccggcggtcgggaagaacggcgcgccgctgccgaagctgaagccgctgcactgggacaaggtgcgcgccgcgcccaaccggcggatggtgtgggacaggatccgatcgagctcgttcgagtacgtacacccaaaacccaccccatctcccctacgactacgaacgagctcgaggtgttcgacacttcgaccacacgagcgtacacgttttcgcgccacacgctgatcaaaccacgtctgattcgcaggctggacgagaagatgatcgagtcgctgttcgggtacaacgcgaggtgttcgacgaagcacgaggaggtgcagagccggagcccctcgctcggccaccacgtcctcgacaccaagaggctgcagaacttcaccatcctgatgaaggccgtcagcgccaccgccgagcagatcttcgccgccctgctgcacggtaaccaaaccgcacggcacgatcgagcacgaatcaacaccgtcctgcacggcacagttggtgtgtgtgtttaatttgagttttttctttctttctcttggtttggatggattggtcgcagggaacggcctgtcggcgcagcagctggaggcgctcatcaagatggcgccggccaaggacgaggccgacaagctgtccgcctacgacggcgacgtcgacggcctcgtcccggcggagaggctgctcaaggtggtgctcacgataccgtgcgcgttcgcgcgagtggaggcgatgctgtaccgggagaccttcgccgacgaggtcggccacatcaggaagtcgttcgagatgctcgaggtgaatcttggggtgttcgtcgcaatggcggtcttactgattctgcagctttgtgattatactattaagattctgagtttggaaatggcgtgtcgttcttggtgtctggaaggaggcgtgcagggagctgatgtccagcaagctgttcctgaagctgctggaggccgtgctcaagaccgggaaccggatgaacgtcgggactgcccgcggcggcgccatggcgttcaagctcgacgcgctgctcaagctcgccgacgtcaagggcaccgacgggaagaccacgctgctgcacttcgtggtgcaggagatgacccggtcgcgcgccgccgaggcggcggacatcgccgcggggctcggcgccgagctcaccaacgtcaggaagacggcgaccgtggacctggacgtgctcaccacctcggtgtccggcctgtcgcacggcctgtcccggatcaaggagctggtcgggagcgacctgtccggcgacgagaggaaccagtgcttcgtggcgttcatggcgccgttcgtcgcccacgccggtgaggtgatccgggagctggaggacggcgagcggcgggtgctggcgcacgtcagggagatcaccgagtactaccatggcgacgtcggcaaggacgaggcgagcccgctcaggatcttcgtcatcgtcagggacttcctggggatgctggagagggtgtgcaaggaggtgaggggagccaagaattgccatggcgggaatcctgccctgaacctgaacaatgtatgataccgcaaatattggggtgaaagaacaacattgtaattcttggcttcggattgttcttgacatgatcttgccagattagaacagatcagttcgtttagattacaagcatccagctcttcatctatccgaagttccgatgtgcattgcacaatcatgcaagtatgccaaaatcacaccgtacaagcgttcctggtaccgcaaagcagacagtaccactactatgtctgatacactgaatatcactcttgatctgggggaaccagtgtttgaacgttgagggagttcaaaacaggaacacgacaaggttgagatgagatgcgcgaaatagcagtggtactggtcgaagccgtttgtttgctcccgcgtttcttccgcttttgtctctttgccatgattcctttttcccagcagaatttgaatccgtttgcgtcacctgcagagtatcagaggcccacgttgttatcagaaccgctgtttatttccactgctgctgtgtctgcctcgtgcttcttcaggcccccccgaggagttttactgccgactatataactagtatacgacaagtgacagtatagaaaactaccgtactcatgttagtgttgtgataagatacctacgagggatatcattatcacgggagcatggagagtttgaacttttgtatccgtaagcagagacagtacgcatgatatgtgctaaaaaatagtactagctgaaatatacatcaaaagaggcatctgaatcttggagaccagcctgaggtaacagcacaatggtcttcagttatatacttcgatttagagagtaagagcttttcgtgatatactgtatttgatcttgataacaagcagagcaagcgtgccaaatggccttggccggaaccaatagccgtcggaataattaactatttgccactcttacgagcggtgctaaattatttgcatccggtaactgagagctcggcccatgagctacaattgtcaccactaagaaaaaagtaccaaaggtccctcaacttgtcatcgggatataaaaatgtcctcgaaccgcaaaaccagtatgcggggtccttaactatacaaaattggtcacccgaggtcctttggtggcggctgagtcagcgtgggacccacgtggggcccacatgttagggttatccacgtcagcctcctctccctctttcccctcttctctcccttcctcatctctttctctaggcagcctcctcatctccttccgccgctctgggcaggccggcgccccgcccaacgggtggggaggagagcaaggcggcgacgcgacgcggcggcggcgccaactcaggtgacaagttggactgcgagaccatccgctggctcacccgcgagctagggcacaagtccgacagcgagaccatccgctggttcatgcagcagtcggagcctgccatcgacaccgccacggggatgggcaccgtgcccgcgatcaccaccattgtcgacggtatcctccgcatccccactgagtcgccctccgccgtcgcggcggctgcccgcggcgatgagcccaccccaaagcggcgtagcaagctccagccgacgcgcgcggcgaccgacgacccggtggaggcgctggccatggctcatcccccgcggtctactacccctttgttgctgcccccctcctccaagccaacggcggtggctcgatctcaatatccagcggcctcgcccccgcctcatccgcaacagcacccacagccgctggaggcagcacaatcccgttcatcgccatgccggcagccagtgacggcggcaagcaggtgatgtcaccggtgactgtgtggatgctcccgcccggcggcgcgggcgtggtgaaccagccaatgcaatacttggcgttccaacccaaccgcgactaggccaacttcgccagcagctccaactcccagcattagccattctacaacgtggggcagaatcccggtgtccagaattcctcggttctcctctccgccgggctcctccctcgccagtcgccggccgcgccggccctcccctccgccgcgccgcccgcgccaccgtgcgttgccgcctcacctcgacggacctccagctgctcccccgccgcccgcgcatggagaaggccgccaccgctcttctccccagcatgttcccgcctcaccactgctcttctcccctgccggttgccggacctcctcctctcccgcaccaagtcggtgccgcaccaagccgccgccgcatcgcccgtcatcggccaaagtgagagagagagtggaagggagagaagaggggaagagattgtcctacgtggcatcatggcatgtgggacccatgtgggtcccacgctgactcagccgccacgtaggacaaatccagcgtcaatactgccctaggacctcgggtgaccggttttgtatagttaagggacctagcatatctggttttgtggttggaggatgttttttatctcgctgacacgttgagggacctttggtgctttttcctcaccacgaactgacgtcaaggcccaactcgttttcctgtcctggtcggtcaaatacctgaaaagcaggccgtgcacaacaccccaaccagagttcagtggcggttctcctacgacaggcttatccttagagcagctccatgcgaggataaaatcgaaccatgtgaaaacaaagaccgaacatagcaattgtatcagtcgactgctacgaatttgagaaaaaatccacctccaaagaggagtcgaaataaaccgattaatgccccgcccccatcgggatggctatatggctgtcgactgattttctatagctggatcattcgttttgttggccgtttgatttatttgagattcgtgcaagctggtagggcctttgctagttgggtctgtgggctttttattctgtgtgggcttttggttctgaatttgctttgggcttggacaattgcttcgggtgtatagcttggacttttggtctaccatgggacccacttgcactgttgacagagagagactgagtgactgtgtctgtgagagagagagagtgagagcatacagggcgagaaaatttcttgctctcatcgtcccacgcgatgcggcgattgtggaaggcgacacaacatcgattcgccggtgatctccttctcctcttctccagtgaatttagttcccgtttgtttactgctttgttcatcgacgcgtcgactatttgtattttgtagtggtgggtttttgacgctgatttgtgggagtcatcgacgattcgttggcaatatcgttcttcctttctccggtgagtctcatagtcgttgtgtagtgtgttttgtgtcctcgtcgtcctcgatccgagcttgtcgttgtttccttgtgtgctgcaaggttttagttgtttcgatttggatatgtgatgtgttcgattttcgaatgtaactcggtaaatccccttgtttcttattcaaatctgacatggtgatctccttgtgtgagtttttcccttttatttagggtattttagtttttttgtggggatttgtgctatgcaatgtttcaatttcgagttgtgtggtgtgagttgtcacggtgagccccttctgtgagtttttcccatttgtttagggtattttagttgtttcctgcggggatttgtgctatgcgatgttccgatttggatctgtgtggtacaagttcctcatgatacatagagtagaagatgaggagaagcctttgcgatgcattgttcagccttgctagcatgctattgaccttctctgaatcagaattaacacatgttattttgatgacagtgactgaatctcttgaagcatccatggccttcttatgctaaaagtctgcagatgctatatatgctatgtggaatctagtttggtatttttactcttcggtgaccaccttagactaattttattagatctgtaaagagcacaagttattgaaaattttgaaatgcatcaatgagtttccaacattttagtattatcatgcagattgtctgacattttcatgaccaagtctgctataaatatatagtgatgcacttttgctgcaacaataaattgtataaaaatgattagtccctcatgtcaaattagaagtagtagctaaacatgattttcttctagtttgatttatatgtaagaccaattagtgggatatgattatgtatggttctggacaagagcttctttgcttcctatgagcatttttttcttgagctgattgtccaggattgagaggaaaaggacacatggagaaatgggctagtctaaaaaaatagaaagcatacatatatgcacaactgattga

SEQ ID NO: 21535 - DNA, 7347 bp, Oryza sativa
agtgttgcatagatagaattgacaagaccacgatctataatggtttggagaggtttggaaagatatttcatcttggttgttgtttacacccaaatttggcacctagggtcgaaatagaaaaaattgcgaaagtttggggctctgccggtttcctccagaaagggccggtctgaccgccatatgtgggccggtcagaccgccgccggagagccggtcagaccggtggcatgtggccggtctgaccggtagagtctgagttagactccgttttcgtcaggtctcgggtggttggcgactccatatcaccgcaaggcgtttaggtgctgcgatcgtgcttgttgacttgtcacaaaaagttgctcttgcctttgataccagctcttgcccaaacaccatatatattgcataatcatcccaattccctccttccacaatatatacttcggacccagccaatagcaccatgtagaccgtgtgcctacaaagattcttaccaaaagaaacttaaaggccaaaatcccatgagtaccgcatatgaatatctccaacccagattgagcttcaagacagagcaaattttatcttgctttgggcaagacatcctcgaccttgtttggcaaaagtttaaagagagacaaatgaaaatatttcaagattatttctttcatctcttataaggcagagaaagaaacccagccatacaagtaatcatatacatgcttcctatcttaaggttagatgatcatcaggtaatctctgacccatcctatagattcatggttctcaaagccgaaataaatctccaaagattccgaaacttacccacatacaaccatgatgaaatatctctccaaaccattatagatcatggtcttgtcaattctatctatgcaacactagatcggattcttcaatttgatttaggaagcgctgtaaaagatgtctgtagaagacttagaaatggaagatacaggattatcttctcctccataccacctaaattcacaccacatgctcgtccagcaattcactatatatatatatatatatatatatatatatatatatatatatatatatatatatatatatatatatatatatatatatatatcatgaataaacaatttaattttcaagaaggcggtcctagcaaattatcagatgaacaagaagaaatgtatacaatgattgcaaatcatgagaattggagattattttctgaagctgcagaaattgaagaagctattaccatagattatgaatatcagttggttttccaaaacaagatcacaaggatttttattagcagatattataaccaaagttgtgaatatttcaagggagcaggacgtataattaaaccagattttactacagaagcctggctcagtggtatcagaaaacagagccatcaaaaattgacatgatgcaattggcacccatgatatacagtgaagataatgaatgaagatcttgtcatccccgacaaaaaacactattgaagataaggaatctacactattcaagataagatatgcctatagtcaaaaggcgatattatgatacttttattgaaggtcaaaagcgtcatcaccaaagattctctccgtgaagtctaaagggataatcataaaaccccttaaagtcaaatggagatatcataaagattcttcaccgagtcctatataaggggctcaggaacacaaccacaacacatctcactcaaccattcctcttcacctctccaccagccatcacacttcactccatctaagtgttagtagatagttatagttataacctaaataaaagacttatgaaattctaagtgtgagagtctatgtaagagtccttgtgagagtcatgtacctgtataattacgaacgtgttgtaccaagtccttggtgtaatcttcagaaggatctaccttcaacctatcaaggtatatgaatgaacacatggaccgttctatataaaactactatgttctaagtatctaatttacattatgtcttgtacataattggtatttaccgtttgtctttactttctatactgcatttatgtttgcatagaactttaaaaattcaacaaactggattaccatccattatgttctaagtatctaacattcttttctctaccccacacactattaaaacttgattaattcactccctttgacacttgtctccttgtagatgccatcatactctactccctccgtcccaaaatataagcatttttagctatgaatctggacaactgtgtgtccagattcatagccaaaagttatattttgggatggaggtagtatgttaatattattattggaactgttcatgaatgttactttatttttgaaattttccatgtctttgcatgcattatttcattttcatatctcgggggattaggcgctcccaacctagtgaagtacacattacaaattccaagaattatttgaaacaagttatgatgtaattattacccaaggtctcgtgcctagtataaaatagtttttctgatatacataactaataatcattctatccggtggtataagttagtaacatgaaagtgcatgggtatttaagaggcacaattagaggtgtaaggtccaagttcttgggtcctggacaaaatgattctttcgctataaactttctggacatattacattgatgtgcttctgattattttatgtgtataaagttttgctaaaggtactatttgcgagcatttcttagaacagtaagaaaagttttaatgagcacatgtgtctaaaattattaagaaagattgaacgctgatacccagtggcgaagccaggatctaagtatgagggggcccagctttataagtgattaagattataaaaaaaatagcgtagaaaagtttatgctaatctaaatgttccccataggtaatataccgtatcagtataaaaaaacacacgacaatttaaaacacaggcaggttaatttagccttatgagcagacagattataagcagtgattgtaccattcaagctaaaagtgtaggtaaacaggaaaaaaataaacaaaaaataagaactagattatggcaaaaagagcaacaaactatccatctgttacaagtattaactaatattttagaaatttaaaatttcaatgttagccacctagtgatgtaaataatacaaatgattagtacatattactcggtattctaaaaggaaaaggaaatagatggtgttgtgtgcctacaaggctagagtaaagaccttatcgctcttgctaaacatacatacgtgcaagcacagtgcctagctaatccatcagcagaatagaagggtggagggggtgggaagaggccaggcccctccgccccctggcgtcgctcttgctgatacttttcttgttctggtacatctgcacagataaattataatgccttttcatctcttctgtctgcttatggctttttaagataaaacagagcattgatcttgcatgctctacacttcgcgcactgtttgtttttgccaataagtttgcacacatgtagctgtcatttgggtaaacaaacttgcagatagtgccaaatagtcataagaaaataattttcatgggctcttcagataatacatttttattcgaatagattttacagtatcagatattaatcatccaagcatgcaaactgtgtcttgttatgtgttagcttctttatgaccaatacattttaagagctctgaactgtagcccttaagaatagtgaaaatataggcaacacttccacaccataaattgtcatggatgcaattggagcctgcaataatttcattaagttataattgatgtttcactaaagaactgagaatggatagatggatcatgtgcagaaaatctgagttaccctagtttaggaggtgtggtttgctcagcatcattttgttggcttgggggattgagttcaagacgagcaggagtgttggcttcctcgataaccgcaaagttgtatggagttgttgaatctcgattcgcttcattttctgcccctgtctcatagagctgaggagagagattagctgtcatcatataatgaagcgtatatcctgtgaaatcatctatctgcatttatcaagtaccttcttgtacagctcagcattttcttggcgaatcaggttgacctttctgtacagttccatgttttcttggtggatgagacttccctgcaaataagccagcaatagagttagcttactagctgattcaaagatttagcaattgtacatgatgttgtagaacctttcgattcagttcgtggatttcatcaatcatgagctggtcctgaaaacaacaatattgatcttaagttaatccattatataatcaatcaggtgcccaacaaaaaaatatggttagtaggttgaccttttttgtccggatgcagcgtatgctcatttctagctgattttctagagtttgcagttccttgacacccaatccagaaagatcttgccccatcaactgcctgccatcaaccaatggatgttatagtgttgttctgatgatatacagagtgaatattgacacttaattttagctgatcaacagacagctgttaattgataataaaaataatttgtacctttctagtttaggtattgtaaattaggcctgaaggacaaaatggagtgtttgaacaataatttaccaggcagaaagcacaggtgaagaaaatgtgatattcactctcctttgtaaatttggtctgtccgcctttgatgggtgctcagttctgtttttcttttagagataaccggaaatgcataaaaatcgaatggctgaaggtatatatttcttacttttaaatgatatagaaaattcacgtgccttcttcatttcttttgtttgtgaaggttaaacaatgcattatctataggaaatttggaatcagcatatatcactttcatactctgttttttcttcttttttctaagtatcatatacccaagcactaggtgcttgtttttatgatctggtactagtttatatttactatacaatcaggtgctggaagtattattgtcgctagcagttgctggattcatgagcaagtccccacaaaaaaaaaaagttcatcatcaagggttcatgatgcatgtatttcatagtagtagatatatgatggtttatgtttttctatcttgaggaattttctgatggaacattgaaaaacttgcagggttttatggccataccgatgattttcttgcaagctgtgcagttgttgtctcaagcttgctgcctccctttgccagaactattggatatgaaaacagagtcaagaaatgcagaatccaggtttgccaaaagcagcaatataaatatgttgtgtatacccatagaaacatgctgggttatcaactcactagtttttttttaaaaaaaaggaaactcaattacattagacaagaagactatttgaactgaggaagttattgtgtatggtaaaagaagtaacaagaggcaaacaaagaaatttgttgtaaacaaataagggaagtagtattatctttccagtttgaagacagtttttttttccagataagacgatgagctaccaactctattgaatttggtactccattatcagtcctcgttttgcggggtgttaccccctattgtaaaaagcttgtttgtctaagcaaaatgcttccaagtcccaccaaagctagattaactacaaagtatctgcagagtgcacaagtcaggtaaaaaacttgtttgtctaagcaaaatgcttccaagtcccaccaagctagattaactacaaagtatctgcagagtgcacaagtcagataaaaaacttgtttgtctaaacaaaatgctcccaagtcccaccaagctagattaactacaaagtatctgcagagtgcacaagtcaggtaagtgatgattatatcatcctggtacaagctttattgcggtgaaagataagcagttagtctgaaatctgtacagatctgtcagctgttaccgaagcaaaaggttcaatgtgaacttaaagatgcagtactgatccttttaagaggatttaacacagatttaacaggtacgtgccccttgtgattctttgttagttttcttgttataatgatgtttttatcctctgaattcaagcagggtgttctgtatgcgagctgtgatgggatggttctcttcagaagcattttattttaactaaattcagaagcatttcgatggcatgaggactgttcgattgacaatttgtatgtacatttccaccgtttacgcagcttaggaattggaccataattagttgtgtacctgcaagttttgtatacgaattatcctgaagggtgttcggtggattgaatattgcccttttggttgttttgcgcatcgtggatgcggctgctctacatttttcttataggaaatcagcttctgataaaagggattattatctgtgtgatctactgatcgatattttacccctctagctgagtttattaagccaattgattatcgagtgggatcctctcaacgacacatgagcatgagcatccggctgtttgttgattaaggccctcttttgtttatgtttaaacctaaataaatagatattttttcgtttgtattttttaaggtcataagtcactctatgttaagctaaaagctaggttacagtagcttttctggtctatgtgaagctaacagtctactacttaaggtttaaaaaacagcggcttaaacaataaaaatattcaaaagaaccaaagcgagagggcttaaatggttcagccgtactttaacggaaaattttttggaaagacaaaatggcaaagttgattgtcacccattattatccaatttcgacgtttggacaaatcctcaaattttaaatgataaaaagtactccctccgtattttaaacgacaccgttgacttttcgaccaatgtttgaccatttattttattcaaaacttttatgtaaatatgaaaatatttatgtcatgcttaaagaacatttgataacgaatcaggtcataataaaataaatgataattacataaattttttaaataagacgaatgattaaacgttgaacaaaacgtcaatggcgtcatacattaaaatatggaggtagtaatttagaaggtaagatattcctttacatgtgtggtcgagtctacggaatgaggattagcgacccacacctcgtgtggtagggagtatcagatcatctgcccaggagccatagctacgcatgctgatctatagtggttcacccataagttctttaatacataatcgagggctgcagga

SEQ ID NO: 21536 - DNA, 7985 bp, Oryza sativa
gggacatcatagaaccccttaaagtcaaatggatatatcataaagattcttcaccaagtcctatataaggggctcaggaacacaacacaaccaaaacacatctcactcaaccattcctctcacctctccaccagccatcacacttcactccactccatctaagtgttagtagtatagttataacctaaatagaagacttatgaaagtcaagtgtgagagtctatgtaagagtccttgtgagagtcctgtacatgtataattatgaacgtgttgtaccaagtccttggtgtaatcttcagaaggatctatcttcaacctatcaaggtatatgaatgaacacatggaccattctatataaaactaccatgttatggtatttacagtttgtctttactttatgtactgcatttatgtttgcataattattttttaagaaaatcaacaaactggattaccatccagttgccacataccaatctcacatccaacattgcatctagatgctgcattcctatcctcatatctggtgactagacccctagcactgcctgggcaagagctggtatcagagccaagtgctcgtaacctccccaagccatcttctccgaaagggggaggggggaggggggggagagaggggtcgggtagcaaatagtacttttagcaaaactttatacacacaaaataatcagaagcacatcaatgtaatatgtccagaaagtttatagcaaaagaataattttgtctaggacccaagaccttggaccttacacctctaattgtgcctcttaaatacccatgcactttcatgttactaacttgtaccaccggatagaatgattattagttatgtatatcagaaaaactattttatactaatcacgagaccttgggtgataattacatcataacttgtttcaaataattcttggaatatgtaatgtgtacttcactaggttgggagcgcctaatcccccgagatatgaaaatgaaataatgcatgcaaagacatggaaaatttcaaaaataaagtaaaattcatgaacagttccaataataatattaacatactacctctgtcccaaaatataacttttggctatgaatctggacacacggttgtccaaattcatagctaaaaatgcttatattttgggacggagtgagtagagtatgatggcatctacaaggagacaagtgtcaaagggagtgaattaatcatgttttaatagtgtgtggggtagagaagataatgttttggtgattaactacactagcaaaataatttagcgatagtaataataagacttacgattttcttgcaagatatgcagttgctgtctctagcttgccgcctccacttgcagcaactagcagagaaggcaaaggaagaattagtcagctggatcaaaagggtcatatttgaaattagttgctagtgctattggcagttaaaaaaattgcaaacatacaacaaaaagttcattggcatactacacaaatatttgcttaacaaatttaaatgttgcagtaatgcagccttcccctttcccttactatgaaccgcgagagttcgtgttaaaaacaagtttatgtttcagtaaaaaacaagttgatgtttgctcaaaatgcagaactagaaaccttcagttgtagctcaaatggcatggaaaactatttccatacaaattgttctacaaactagcttttgcattgcatgtgtttctagtagcggtgcagtgctactacaaagtacaaactgtcctgaataataataatcatcaggaaaatagcatggaactagcaaaggttttgtatgggaaacttggttaatacaattgtatattcagtatttcttcactgaattagaaactttagtaaagtggtaaatgctcaaaagcagagggcatacaatgtgttcatcaaagcatacaaaagctcatatcagcgaagaaagaaaaactaaaaatcagagatatgaagaatcaactgctgttctcagctaaattcaccccatagtaccagtaggtcaacccacccccccccccaaaaaaaaaaaaaaactaatctatttggcactggtaggacatgctcaaaacaactatattcataatttagtgactaatttgactggcccatcaaacattaaaagacaatcatgatacagggctgtaaaaatagaaggcctgatcatgttgcaagacatgagttcacaaccaaacagacactacaaaaactagtcaactcaaatgctctgtttcaagaactgcataatgcaagtgctggtccaaactccaaaactgtgaagataactttgacatcagataaacaacacattgggtatgcaacttagtatctcttttgttttattatcctgccaatagcaaggatgatatttatatgatgagacatgtattaacactaaccagactccatcacactagtgtcatgctcatgtcaaaaaagaatccaataatagtatagcgctaatggcagaacaatctgccatgaaattttcattaagctcaatttgtgcaaggagaaaaggttgatatataacacagtcacaaaaatacaaccttgagcacaaaatatttttcaacgtgtctgtaaaaactaaatgtttccttgtgctgacagcagtggggataggaacatgaaagtcttttggcaatgggctattgagaatggagtatgtttgggccaaggcccatttagtggttgttataatctgaggtgttaagatgaggaccatacaaaaactgagcactgctttgtccaaaagagtagatgaaataaaatagagttatttctgtatactttgcttctcttctatcttctcaactccattctgtattcacattggtattgttgcattgcgattgggctcatcagtcatcacctcttgggacgtgacacaaaaatgcggcaaagagatcttttagacaatctactactagtatccccacatcacactcatacatccaacctaaaattcacaaagttgttggttatgtttcaaattgttcaccataattaccatccatcacattcttttattactggaaaggtattagtgttacggaatcctttccaagttccaacagtgaaaacattttggaaataataatgaagcaacaagtctaagcatgaaaaccatatgctttatatttttactgaattaattcatcaattctcaaatggtcagcccacatgccaatttgacctccagcattggcagaatattttgcatttttaactatttattcatgcacctctatgaaactattgcatgcctatcaacaaaagtaaactaccataagatatactgcataaactcttgagttctacaaaaccaccaaatagacattctaacatgcagactgaaactcagtaaatgcatctgaagaaatgtaactacagccaggaagtttcagaataaaacattctcttgaatgaattgtactatattatgtcatatagaagggagtgttaaactttagcagcatgcaagagtataactttagcatactcatatgtccgttacgcataatgaacacatacatccgacatatacacagatcagataaactgtgtatacatcctcagttagaaaacatatgttaccacacttcacaagccaaaacaattataaattagttcaaacttaagctttcattatatcagagtggatgtgcagtacatgactacatgtagggcgctgacactaaagtctagaaagaagtactagaggcaatctcgttagagaccaatacaagagttatccacttatcctaaccacggttaaaagcagcaaaatcctcccaaaacaaaactaagtaatggcaattctagtatcagtgcaactctaaaaaaacaattaataatgcactccctgatcaagaaagaaaagaactaagctaacattaacactggcattgacaaccgtacatgaaacaaaacgcataagctgcttgtaatttcatgctacaacgaaactaatcaaacttttcacacaaatcacaccaaaacgaccgcacagctcggggcattcagttaactcagtatcagcaattaacaacttaactatgcaaaaaaaaatacatatatatgagagcctgaggagaagctgtaaaatcggtggaacgtctcacctgagaagccggctcgaaggttgaaccctagatgaagagaggcgggtcgctaggcggcacagaatcaaaatcaacgcaagcatatcggctggggctacagcctacaggagcggcaatgggagaagctaatcggggagccaacggccaccacgatccgagggtcgtggtcatgcgacgggcggcagcaagctagatagctacctcctacggaaatctagggggggggggggcagatgccatggaggacgagaccgcgattggcgcgatcctatccaatctaagcgagggggggctccgagagaacgacgcgaagacgacgaccgccgcgaggggggggaggcgatgatggattttgcgctggatttggtcggatgcgacggagcgtgtggtggtggtggtgctctttgtagatgaagagagagagagataacccccaaagcaaagcaggcgcccccacgccaagtggggtggggtttccgggggagtaataaaaaatgcggcggacgagcggcgctccggcggccacgtcgcccccggcgccattttcagagggggggcgctgctgcggggcaccccgacaggtgtaccgtccgcccacccgccaccgccgatcgccggcaagtgggcgcgtgggttgggcctgcgcctcctgcatgctctgcctgtcgagaaggctcgcgaagacgcgaagggggcgcgtgcgggaaatcgggagccgtcggatggggaggtggatgggcgagatcttcactggcggcgacacctgtccaggagagagagagagaggggttagatggtcgaggaacgggaactaccaacgcgcacggtgatgtttttggatgacattttaaacatttcgccgtacgtatattattttgtttgcaaaatgcaacttgccaatttttgattatgcattttaagcctgtttcgagcgtacacacaggaaactattgaaaatatgatgaataggcactattcatgtcgaagaaaaaaaacatagggctgctatgcgaaataattctatgtgagccaattatttattttgtatacatttctactctattcctacttttttttctatttcctgtgatttaaaaatcatcttaatcgaagaggcaatgctcaccatatcaacaaatttcaagtactcaaaatgtaccacctgcagctaggaatttgtggtagataattaattcaggggcccaagtatatattgtcgttgaattttttttcatagtaagaggaaatataactccccagctctgcaccaactgcacacaactaaatttagatatcaaaatttaaatcccaataaatgaagtcatgcaggtaccacaactataacaccaatagtgataatttccttgttttgcctttcataatttatcagagtatttgattgggcttggatggtacaagtagctagattgttgatggcttcatgtagacatgttcacccatagaaattacgaactcatcgtataatttacttcctctatcccaaaacatacaacaaaactagtaaaagatgtcaagggcttttttttcatagttcttcaaagggggatctcaattctggaaaagactgcatgagtgtagagtggtgttggagagattagtaatgaaagaagttcataaagggatggtgtatatttttggacagatgtttggtgtggtcagtcttctctaaaggtgttgtttccaaagctttttgaaatcggctgtcatcaaaatactactgtgaaggatttgtatgatgaggggatatggagtttggagtttagaagaaatctggacagtgttggggaggctgagctggaagtgttaagaaatatgatacaagattatgtcctagagggggacagagatatgttgatctggcctcataacagcaaaaagaccctcacaactagattaatatatagagagattacttttgggggtgtaagggatattgagacggtgaatatttggaagagtgaaatccctttaaaatttaaatgctttctatatatggcagacatagaaaaacttccttgtacagtccaattgattgaataaaagaaaatggcaaggaggggatgagttcttcaagctctgtggcaagattgaaactactaatcacattttgtttaaatgccctttagcaatgtttacttggtgtgtggtgagagatgctttggggttaacaagtaatccggtaaacattagagattgtctgggcttggtgaatgtgtgttggatgctctggttaactaggaatgaccggtttttttcagatattttggtcaagtcccctttacagatcactttataaatctctgtcttttattcagtggtggtgcattctgctaagggaaaaagatcaagcaatcatgaaaagggcggtgtgagctgttgatgggcaaactgaactggaaactgttttaaacactcgggtgaacgttcacccgtttcttacatgtcatctaaatggttatgcaaaattttcaaaaaaattgacatgataggttaatatgtaatatatcatatcacaaacatataagttcaaattcgacttctacaagttgtaataaaaataacaaatttgactgtgaatatacgtatactagttagagtttaatttgttatttttggtacaacttgtagaagtcgaaattaaacttgcaagtttgtgagatgatatattacatattaacctatcttataattttttttggaattttttcataattatttagatggcatgcaagaaacgggtgaacgtctccccgagagattagaatccatctcccaaactgaaccaattgaagccgtgctgccttcctgcagtagtttagctgtgaaatttgcacttggcttctttgttatgtgtttcgagctctatctagggtgtgatatcttcgctaggatggatggtgcttgcttttgatgagttccagcgctgtttgttggcgttatgtttctgttttattttgttgcttcttttttttgtgaggtattttgttgcttctatatctatataagactctggttgtttattgggctttctaccaaagccgggtcaatgaaattttgatatgttttaaaaaaactagtacaagatatgatatctgtgtagatttatagtatgatgtgtgtattaatttcatctattttagaacagagagagtacacacgcgagagtaagcctcacgctaaaagcctccagcatcttattaactgaaatcataaaacatactacatattgatccagtagtcttaatacattgcctgcatcatactactgctactactcatcagatgaaagacataacctctttgcaatttttacacccacgcaaatctggctgacactgttgcaaaggcacatatatatagacaacacatggtgggtgcccggccgagggcgatgacgacacaatattgccaatggaaacgcacacatcagagctcatggctctcgcgacaagatgaaatatagcagaagctaaaaacaagtttgacgtcgaccttgcacgtaggcatgccctgcctactgcttgctacgcttcctacgcacgcgctagcttgatcggcgcaacgcaagcccacatgcccgcggacgcagacgcgcactagcgagtcatccccgggtgcatctgcggcggggcagtcgcgacgcccttccccatcctctccatgttcccctgccatcctgaaaaattcacgaaccgacgaacgaatcaatctcatctgcagatcaaagacgacgaaccatggcatcgccgtggacccgtagtgtggctcgatcgctacaaatcgacgcgattccccctcttctctaacata

SEQ ID NO: 21537 - DNA, 10843 bp, Oryza sativa
aaagattccaggctcccatgaatggactattaaatcaaagaataagcttaaatttaaatttttaaacttaattttgatattgattttaagatatttttaacgtagtttttttttcagtattagcttttaagtcaccgagaatacatatataaaagttttatctacaaattcatttgtattctctaataagccgttttggcttattacgaaaaaagccaaacgatgagacctccagatcaagtgactacacgcacaaaagttacatgatttttgcttttctgtaggcgatcgactagacgtgtatactgatgtatgctgaccaaccgatcgagatgaacggagatacagctaaaaatcatgagggggctctgaacccctaaacgtagtaagaactgtggctggcatggtatgttgtggtagggtcgtcagggcacaggccaggggcgccaggcccttggctgagccgaggggccctaacgggcgatcgatcgccagcgatcgatccaagcgataagatcagccccccctccccctataggcaatacctcctcccactcctcccccttcctcctccccttcttctcttcctactatagtacaccacaaaattttttaaaaaaaacaaaagttaaaaagttagaaaaatttatgtatagaaatactatacataaaaaatttgaattcaaattcaaatttgaatcgggtatgtaaacttttgacttataaactttgggtctataaactttaggtgtataaactttaaatgtatcgaaatactatatatagaaaatatttgaattcaaattcaaatttgaatcggatataattcaaattcaaatttgaatcgggtatataaactttaggtgtataaactttagatctataaactttagatgcatagaaatactatatatgaaaaatatttgaattcaaattcaaatttgaatcggatataattcaaattcaaatttaaatcggatatataaactttaggtgtaatatttctatactttagatgtatagaaatactatatatacaaaaatatttgaattcaaattcaaatttgaatcggatatataaacttttgacttataaacttttcgtctctaaactttagatgtgtaaacttgagatatataaactttaggtgcataaatttactaaaataggaaagtaatgcggtgccaaaaaaggaaaccaggtggagagagggagggggaggggggcgaattgatcgctacccccacccccaggcgagcgatcgccctttagcatttccggtccagttgtccacgatcgctctcatctccacgcaccacagtcgtagctcgccacgctgttgcgcagaagggcttcggctctattagttgggaggcaactccggctcggatgtccgatgcttttgggaaaaatcggacgctgttaacaaccaaatttggtaatatcgacatcgggaaagaagattagatcgaagcaaagtcggaggcggagatcgagttcggaaacagagcatgaatcgactggagtccagatcggctacgattaggatcggctgggtctgagtcgggctaggtaagccgatgcagccgattccgacaatgcaacttgatgtatgacatcgggttgaattgaggtgcttcaaggtgattgccgcacatggatagagtcctgagaaggcaattgtatctattaattaggatgttttatgtaatttccttacagatatgcttgggcaaaagtctgccgcaaagacttatggtatcttagagtttgttagagatagttgtcgtgtccattatggacatatcttgtaattttcgggtataaatagacccgagccctatgtaacttgaaaaaaaaaacacacacgttcaatacaatctcggcgcatcgccactttttttgctttagttttatttcaacgagttcttgctttcgggttgagctgcatcggtttcgatcttcaacaagaggtaaaacttgttatgacggcttgcgttctcgggattagtgcttccatctttatgacactctaatcttgtttatgtaattcgtcaagttatcatatatcctacataatccttggcaatatcgatatccaacctacaatcggctaacatccgtcaatagaaggcagccgattaggttaaataccgatgttgacttagattatataggatatctaccactctatgacacatccaacggcttgattgtctagatattgtcattcttttcatacttatagctgcatcagttaagtttgaccttatgagtcatgattagaatcttaatctctagcccgcttcttggttgctgattagggtagtatcggagtttcagccgatcttacctgatttaactactttttatcctatatgcttaattgacatgttaaatctgccctttatgttaagatcttgctgcatttaagtatattaggcttgtgtttagtatattctacttgctttaatatcttaatatagagtagtatcggagtattagccgatacatgctagatctatctgatcggctatgctatgaacgtatatagtctcattattaatatatatttcgatctaagtgatttatactgtctcggcatggcgaccgatctatcccaatcacttgatttaagtatataccgatataaagattatatattggtaatatctgcagccgatcgagtagattcagtcctttcttatttattaatgactgccgatcgatgcatatacgacatctgctcaaagataaatgatatgtcatcggtacctagccgattggctatcatttatagatttaactgcggtttctttgcttctatttcttgttgattacagtatcaaatcaactggcacgctcatacattcgaaggcgagctttgaacctgcactggagttaagcagatctcccaggcctcgtgttttctgtcaacagacacatgacgccagcatccgatttacgtgcaaaactattttaaactgatttttctcttaaattacttatccaaattatgatctggttgtaccgttaaattcgttgcaattaaatcttctaaacaagaccacacatggatatattccgacgaaattttttttagcttattattgaattatttttaaatgttgtacgatgttacaacaggtatatcggaattgtttcactaaatagatcaaaaatgtttcactcgtttaaatcgggtgttgtttcaccttatataaaaacaatgtttcaacaaatagcgaaagaatgtttcagttcactgcaacattttatccatacatagtgaaacattataagtacactaggtgaaacatttttcggtggaacaaaaaatgaaacgaattcccttaatagagagttttcaaaatatgtgggttttttgttgcaatggaatatttcagttaactgcaacattagatcatagtgaaacattgtgagtacactaggtgaaacatttttggtggaacaaaaaataaaccaaattcccttaatagggggtttactaaatatgtgggtgatttgttgcaacggcgtgttccataaatatcaaaatccactgcaacacttgatccgtacatagtgaaacatcgcgagtacactagctgaaacatcgtaaaactactggttaaaacatcaaaagagatcatatgcaacattcaaaaaaaaatatcaatagaaaagctaaaatattttttatcgaaatataatcatgcgtggtcttgttgtaaagatttaatcgcaacgaatgcaacggtgtgatcggatcgtagattggataattagtttaagagaaaattcattttaaaactatatgaaataggagcggcagaaggcgtgggtgtccgaggcgtccaatttttcctacagccgtcgggcgcccggcgcgcagtatttccctagttgtgacttgagtcgtacgcctgccgtggggagggctttagcactcttttaccacggccgcggagtgcatacgccgcggtcgatatggcagtacagtctagctggccgccgttcatcgaaccgctgttgttctgcgtttttcttcgtgggctgcaaaacgagcgaaaccaaccaaactcgatctgtcctcgccggccggccgggaccagctccgcaactggggtgcgctgatgcgcatgtgtttggtgtggcgagctaagctacactcctttcatccctatccgttccaaaagtatgtttttgacaatcactcatccgaatacgtagttaaaattattatatttttaagacagatgcagtacatctttgtctcttccatttatcgcaaaataacttcatttttattctcttacatcgtctatttcaatggaagtgtatttttttgagcgagggaaaattaatagggaggaaaaattatccagctgcccctgttgaataagggggtttagagagagagtggttgagggtgaaatagagagaaatttaaatatgatgtgattcaccgatggagaaaaggtttttaaccctggtcccggactaaagatacccatctttactctcgggtgaaatacctaagactaaagatcgatctttagtaccggttggtaacaccaacctaaagatgggactaaagtttttttttccttttttgccacttgcatctactgatttcgagcaccacaaatcattcataaaatcatccataaatctttccacaaatccccaaatacatcaagctgcattttctccatatcccattcactctaacccttactaccatcatcatatcacaagcacataaacaaaaaacgtgaacagaagaaactagaaagaaccatgatgaacaaaagacataaacgccgaggccgtgcgctgcctcccatcccgccgtcgcggctgcttccgctgcaccggctgcggccacctgccgcctcccatcccgctgccacggcggcttccgccgcgccggccagcgcctcctaccgtgcgccgcctcccatcccccgccgcacaggtcacctatcgcccgccggaggggagggggccgaaggaggagatggggccgggtgagagaatgaggggaggagaggaggtgaagagataaggttgagacttgagaggacgggtgagaggagataatgagatagaataggtcggggcagtaaatcgaattttttagcgcgcggttgccgaatttttttcccggttgtttaacaaccgagactaaaactagttctttagtcccggttggtaacagatagtagagaggtctgataccgtctggtattttttgaaccgggattaacaatgatctttagtcccgattggtaaaaaagtgttgttaggtttttcaaccgggacgaacgatattctttagtcttggtttctatttaaatcgggactcttgtgatttttggccaacccatcaaagatgattttctccagtagtgattaataggataagtagtaaattgcacttttcttggctgaagataatacttaatatcggttcgcaaattgatctctttattccttcgatacccctactaacatctaacttatcaaaccattgatattggattattttgtcttcatcttattttgtatccataagatccaagatgaaattattttgggacgcatggagtagcctatacagataagggcagcttcagttctcgatcaactactgcacttcacggaaggcgaacaaaactttggttcggtttgacagatgcaacgatagcatttatttgtaagacccatgtaaaatacaattttgcttccctgtaaaataatcttgattaagccatttaggtttatccttcactgctcttcaccaatactcaaatgagaagggcttcaatgtttgcttcacctctttgtatttttcataaaccaactccataagttgctcattaaattgttcactttaatatatgtgtttttatttcctgtccaacatccatgtgactttggaacaagtatgttggttgtatttcaattattcttgtactgcatatgtgttctttttgttcctttaaagatatacgtgctgtattcttctatgactggcttccagtaataaggctcctttaattgccattgattgggtcattggagttgttcaactaagcacttattaaccacatgttgtcttcttcagaccaatgcgtgcactcgcctttcttttcctcatctgaaccaacatcgctctagccttcaatcctatttggtctttgtttgtattttgtgtaggagctattggacaagtaatcaaagaaactaagccctcacatctcgaaccactaccaccatcaactctaaacaaagctgctaaaccaactactaataatggaccgatagctatactaggggtgggcaaaataagactgtaccgaaaagaccgagaccgataaattcggttagtagtttggtctcagctattgaaagaccaaaatttattcgggtaattcggtcattagcctcggttaaccgaattaactgagaaaaccgaattctagcctagtaggctcggaggcccaataggcccagtaaaccaaaccctagaggcactcaaccctcaggcctcagccatagagacaagaggcaccgcaagccacagcgctgcgccgcgccgccatctatcctcatccatcgcgctcgggctcacggtctcgcgcggcgcggacccgcggtcacgccgcctccaccctccgcggctctgcctccatcgtgccgccacaccgcctctgccctccagccagcccgcctccacctcggcgccgcctccaacaacagcgagcccgcttgcgcctcagcgcgacgacaccgcctccagcgacagcgagcccgcctccactttttttttgtctctctgaatatttttaatttgctagtcgcgtgtgcagatgctgagatgctttgtctatctattgatatattgagttgctttttgatttgtcgatcaaatatttgcggtttgttttttgtgattttttttgttctaacttctgaggacttctgctcgggttagttcggtcatgaacgagaccgaacagactaaccgaggaccgaattgttcggtcttcagttttgttcaggaccgatctgtcttgagttattgattaccgaaatttttaagagaccaagaaaccgaaccaaacttttcggttagaccgaatgcccacccctaagctctactaccccatgaaaatttccatgagcagaaatactatgttgataactttgaagttgggaattgccagtaacctggcggaacttcaaatgggtttaaattttatgggtagcgttatggttgaaagttggggccaaaccgatgggatgctatattcctgtgtaaatggggtgggaaacaatgggattgttggttgttttgagatcagaatttgagactgtagagttcagataatttgtaaaactatgtatataatatggagtcattgcccatttttgagggtccaaattatgaagtggtatcgacaaacaaacatgtttacaaatatagaggagaagccaacaaagttggccaaccaatggcttgcacgaaccatgatttatttggctaggtttgacggatgcggcaacagccatgtctaacaaacaatatgtttaaggggctgtctatataggaatcgaatgatttttgaggcttgaatcattcagattttgataccattggatcaacatctaacagctcacaatattacaagcccaaaaataatatatatatatatatatatatatatatatatatatatatatatatatatatatatataacttcagattttttgacttttttttgacaccatcgtatcggctcagcccaatcaaaggcccattgagcccaattataaacccagataaaaaaaagcccaatttaatatcaaacaatagaaaactaaaaaacaaatttgcacaaaaaaatcttcaatagcccaattaaaagggtcagcccaattaaaagcccatttagcccaaaaagccaaaattggaaaactttactgcacgtgattacagctcacgtttttccagctcacgatgtaccacttctttctggaatagagtacatctccaatcccagatcaatctcgcgccatggaagaaagtgaggagaaggaaaagcgaagcttactccactagataaaagatattggatatggagatagtaagaatcaaaatccagattcaaacaagccttcaaatcgaaaacagaagagatccaaaccttaagaaaagttagaatgcaagaatcaacaagaaggtaggaaaagaagaaaagttgcaaatcaaagccagaaaaagtaaaatgcttaattctttgaattaacaggacaaattcaaaaattacagtaaatttctaatagaattacagtactattaaactgtaactgcaatatgtttgtactgtaaattgaaatacagagaacaatctgaaacttagtaaaagtcagcctgtcttagtcatgtaacaatctaaaatcaatttgaaactaatatgaaaaatatctacgagcatcaggaaatcagcctctatgactcattttgaaatcgtcaataacttttgttctttactcatgcaagattgtcactgaaagattaaaaatacctaactaaattgcacatagcatatagcatttgcaaaattatagcctcaaaaacaccctgaatgcttcaatagaattagtaactgtcatcaatcataaaaattcagaacatcaattatatttctacctggtctagcaagaattgcacattcttgtcatcaacacaaattaggtagcaatgcaaattgtcaccataatcaatctttcaattagaaaaccctatttaaccatttgcagattacataaaactgttcaaatgcacacactgtacaccctaacaatttcaaggttttcagctattatacaactgaagcataaaactattcaaatacacacattgtacaaaattacattgtaattataccattggagatgatgtaattaataaaaaagtgagttaaaaaattataccattggagatgatgtaaaattatcattatcttgaacagcttcattaacatcatcattaatttcattctctggttcaacaccttcattccaaattaaaaaaatgcatccattacagttaactatgtattattttacatgtttcaaaacatattacagttatttagttaaggaattacaacaaaagaaagagtgtaatttcagtaataaattactgtaattgatgaattaatgcactatagtaatagtaatagatatagtatttatagtgcaaaatgataaagtacacatgcatactaatttcaaaccatgcatttaacttggtgacataaaaaagaataaaaaatgcacatcatatttctcctagtgaagatattagccaccattttcattttcattttcaagaaacaagtcctctaatttacatacaaacaaacaaactggacaagatcaagaagaacacacaaaagtagccaaggacagcaaagtcaattattcaaagttacaaacaaaaatattaaaagagtaacatacttacaaaacagcaaaaaaacattcattatagcaaactatgaactgttttacatgtttgcaaatatattacagtttttttagttaaagaattacaccaaaaaaattttgtaatttcaatagtacattcctgtaactgacacaaattactaactcagttcatcatttaacacagtactacatctagagttcattgtctcaaataaggcagataaaaacaaaatctaaatatcagaaaaagtcacttcagaaataaacttaaacctaaatacatcaataggccctaatatatacctgaactctagttattgtggacaatttccaaatagacaatgttaaagacatcagtataaagtaaaaggagataaaagatcatgtttacttctgcatttattaatctgactgtgtaaaattctgtatagaaaacaaatcaatcatctgaaatctaccatgtgaagtgatctcaatccatcatacatgtttcacagattgatagaacaaatttaagttacacagtttcaattcaaaaacagaaactgatcaggtaagatattacagttatttagttaaaaaattacacaaaaaaggtgaaatttcaatagtaaattcctgtaactaacacaaactactaactcagttcattatttaacacaatactatatctagagttaaatttcagaagtaacatggaagtaaattgataaagtttcaaacatacagatcaggaagtattctctataaaaaaaagtggcctcacatcaggcagataaatgcaaacctgaatatcaaaaaaagtcattttagaaatagaactagacctaaaaaattcagaattgttgtaatgtcatgataattttaccttacattttttttagataatttcaacgaactagtcagtgtaacgtatcgatatcaacaaaattcaaaactcttaacatatcaaaaagttagtgtgcagtacttatctttttcgcattcatggcttccctcttaggacaccaattcaaatcaacttccctgcaagagaaacaatgcagcactaatcagaacaaaatttccaaccagccatatggaacaaaatcaaagaaaatggaagaaacaacctcaggtaaacaacatctggagacatatggaaaaaaagattctatgaactactcaaattatcttatactgaaatcagaatggtaaccgtgtgttggaatgccaaacaacacattatgcatctctgtatattttgcacattatcaatagagattattcaaacaaactatagtccaattgataatgaattacatataaaaaatat

SEQ ID NO: 21538 - DNA, 1771 bp, Oryza sativa
  unsure (1)..(1771): unsure at all n locations
ttgggagagaaaggtgacaaggtggtggaacaagagtcccaagagctgataaatcccattgagatgctgacccaggaagatttagagggaactcagaatgattggctgacaatgggtgaaaaaaacttgttggatgatgagatggagaggtgtcaaattcccactgattctgacatagaaaggttgagggaggaagaaaatagagatgatgaatagagctttcaagaggtgtctcataagaagaaaagtagggggagaaaaactgaacctacaattacatccaggatgagcttaaggaatagggagttggctgatgttcctgtcaccaggagggctagaattctcactcagaagaagaacatggaaggtaatgcttcaaacccttttgctatttttcagctgctagattcagttgagttaaataaaattgctattgctgctaagatagatttgggtagtacttctactgagattgatactaatttagaatccttgaaatcaaaagagatagcccatgctaaactagctgaactaaactggaaaaaagagatggaaaattgaaaagtaaggaaggtaatgtagaaaaatctgaggaggtgaatcaaaagttaggaaaagaggttgtggctaaaaaagtaagatgccattagaggaggtggctgctgaaaagagccctgagctgataaagagaggtggtgtgttcaaacaaaggaaaaaaaaatgattatcttgttctaaaatattaaagggttaggtagtgtagctagaggtggacaactgaaagagctgatcaaagaaaagagggtgtacattatctgtttacaagaaactaagaaagaggtgttcttagatagagagttgaattccttccaaggagggaggtcttttgtgtggtgctgaaagcatccaggggacttctggtggcattcttgtaggtgtgaattctgagatgtttgaggttatctctactcatgccggagcttatttcctatgttgtgttttgaaaaataagaaagatgactatctctacgaaatcattagtgtgtgtggtcctgtggacaatcacttgaagggtgggtttttagatgagttgaaatggcatattcagggtaatgattacccctttatattaggtggagacttaagttgtatagatttgcttgggaaaaatccaatgctaatgttgactctaggaatatgttgttgttactcttttattgctgatttagatttgagagagacttttaggaatggacctaagtatacttggacnataagcaagagtgccctgctcaggaagtcctagatagagttctaatgaatgatagttgggatattaagttcccctctgctctgctctcttccctccctaagtaggttctgaccatactcctcttcttcttgacactgatgaggaaagggaaagaagctgtagttactttaagttcgagtcagcctggcttgctgaaaatgggtttaaggagatggtttgtcataagatgttagaaagagatagttcctatattttagagttctggactagaaagcaatcagagatgagaaaatttttgacaggttgggtgtcgcgaccgagaaaattgcattttcccgaacgctagtgtattaatccccgtcccaggaaaagccggggtacaccataccaacatgatataaaagacacatctttattatatcgataatatttacattaataccaaggcacttaaaggcctgacaatcaaaaataaacagcagcggactagcgggccta

SEQ ID NO: 21539 - DNA, 21851 bp, Oryza sativa
  unsure (1)..(21851): unsure at all n locations
tactttccactattctcttcatgttgtcatcatttagcattcagcgtattcctttacaccttcgaccttgatgagttccttcccattggatcatctcccaagacatggcattgcctggtaaccggtgcctgcacttttcactccgtgtagcatctgataccgagttgaagatttcactccttgccttcatagaaacacttttacctaggtcatcttgcttactcacagatttatttttttttctctcaatgacaaggtgactgttgcagggcgattactgtcaggagtcttccttgtgtgatgcagagcatgtttctgattatcctttatcaatcacctttcggcctacgtctttcctgctagagaacatcttggccaacctcttttatcaatcatctttcggcctatctctaacaggtggtactctttaatgtgggttgcggacacttctggtggcgatggggtcctttggtctgctgcctttcagtgaaaccttgaagtgttttcgccaaaagctatactgactgtcattgcctttgatccgaaaaagacacgtgtgaaactcttagtccaaacaaatgtctctttggttaatcgcttgattttcttttccatcatcaggttggttattaactcgaggttagaacatagttcctctgaaatgagaccctaagtctcctttgacagtaaacaattatacacataatcccatatcagcatcttctgaaagagtcctcatagaacttgtttttattacacatttctcccatattacatgaatacgaggcactaccttaaacaaaaagggaaggtgcttaacatcggtacattgtatcctcaacatgaatcatccataaacatagtaaactcactgtttatagacatgaatatatttatttattacatgattgctgcaaactttcgattacacaatgataagtagcgaattgaaaaccacaaacgtggctgctcattttgattctggagagatatagctggcattgttctagtaactgcatcatccttgattggttctgtgatgatgtgataggactgcatattgctatcattcacgggagaaacttccttctgattgctgtttgaagcagataacggtcttctgcttggtatcgccctcctgaggttgattgcccttcgctcagcctagagtaggtcggggagagaaacaacttcttccatcgacgacaattctttgctgaggccgtaggtgcagagaatggttggtgctgaaggtattattgttatgatttattgcagagtcaggtgcagcaggaggagcattggtgctgtggatgatatcgtcgatgttgctgttggagctgactagctgatgagacaatcgtagggttgttcgttggatttctgcggtcttggtcaacaacacactgagttggcaatccgtgggcacatggtttgtaccttcgcacagaaaacatgtgaccttgtgggtgggacattcacctggcggatggtcttcttcaccatgagggcaaagtgtgagacacctgctagcaatgtgtccaattttctccacaacgggtgcatgcctttgattccatctcttcctcgccgagatgtcggggagactcttcttcatcatccgaggagacttgatctgacccttcactatcagatactctgccaccatggcttaggaggtgctgggtcaactatcgtgcacctcggaaggtatttcctctttgacgtctaggaataggtatccctgctggaggccattcggtgttggtaatagtcatcttacgtacttcttcttcagttcgcatcggcgcttttctcttctgattcttactcttcttgcctttggcttgcttagtacgtgaccccacgtggtacgaaaggctaggaggaaagcatttcccgggattccatggattctctccattgggctctctactttgcacactaggctgcaagcttgacttggtgtgaggaggctggtttagcgatgtctgccctgctaaaccaaaggaaggggcttctttggcatatacccatggacaattcagggcatagtgtccttgttctctacaatcgtgacaaaaggggacatcctcttctggcattggaagctcattgacctgggtggcaaatgctcgatcaaacacatagtgattttggtcttgacttccatccaatggtagctgcgaactaagcagcatgcttggaatggaccaagggtgtgccctggttaactctcttgaggccagtggtggattgagttgaaaacttgagttacttgaggcatacccgctgacattctttcctttttctctgttaaacatctgttacagggattgaggtgagagaggaaacaagccaggaaagaatagaccagaactagagacaggaccttaaaggaactaactcttcttgctgatgtgttgtttgtttcacttattctgcaagttgattaaacaaacaacctaccaacatggttacatcacaccccactgatgcaaaccaagcgctacacacacaagcaaggaaacacacaactaacgactctaccctagagggtggcttaggttctgcgacgggttctccaagatcttcactccttcacagctggcttcactgcttcctccacttcgctagcggatcctacagtcttctggagcttcggcaaacaactgacgatgtcttcttcttcactgacctgaccatccagtactagttgaaatccgaagaaggaagaagggagtaaacattttgaaaatagcattagggaaaggaggaaaaggaactttcgcaaatagtttcatttataaaatatgtccttaggttttatccacttggcttatcctacagtcgagacggctctgataccatcttgtcgcgaccgagaaaattgcattttcccgaacgctagtgtattaatccccgtcccaggaaaagccggggtacaccatacaaacatgatataaaatacacatctttattatatcgataatatttacattattacaaaggcacttaaggcctgacaatcaaaaataaacagcagcggattagcgggcctatggctccatcttcacaggcgctcaactggggtgtaagccaagactccacctaagacatcttctccaaagcttctcttactgaaggggggagaaagatagagcaagaatgagtacaaccacagtactcagcaagccacaccggcggatgcacgattaatgcaagggggtacaaggggtaatgatataggggttaagttttgcagaaaacggcatttaaaaatcacttagttgcccaaagccattttaaaaagacgatcctagagctacacagtattattaatcaaggtcgtgaacccgcacgaacctgccttaacccaaggcctacgatgattcagaccgaactggcaacccgaccctgggtcccagctcgtcccaagccaacccaggccaaccattccacattttagctgttaagcaaattttaagaattaaaacactaacttgggtgcattgctcggcttgcccataaccgagggcgcggctattcgaatagattatactctgatcagaggtgtacatctttacccacaagacacatcttcctcacgtgtaaccacgtgccacataccaccacggtatacggacggaagacgtgacatagttcccaacccatcctagccataaacaagagtaccgacccaaccccacctacggccggaacctccgggacaggtaggcaggattgagcccctagcagcaggacaccagccctgtaccatgacatctcgactaccgggccgcagctcgtgtagccttcatttgtcctagagatgtccatcgacccccgacttcgtccatctccatccgtgtagttttgtttataaccagactgagccacaaactaagccttacccactagacatgtggaagtacggtagtgctttgcaacagaggcccgagcttaatccttatagtacccgaggtacgactagcaaaacccaaccacgcacctcgagcccagcctaaaaccattttgggggttttgaatagagggggaggtgtgtgtccaattccaacaaaagccaaccattccaaagtatccaagtgatatgaatattcccaaagtctaaagttataaaaccacctaatgttgcctaattaatcagcgaagcatctacctaaattcatactagtggaaccatgaataaagtacccactagttggggttttgtttaatctagggtgaacaaggtaataatatcaataacaataatattaagttcataacaaaggtaaataggcatggccaaataaaacagtgataacgcgggattttaaataaagcgataatgcaataatttaaatcaaaataattttataaactgggattcaatatgttcaaggatgatgtgacttgccttgctccgggagaacggccttccgaaccttcggcgacgaccacgaaccacgcttcgggaacctccggaacgacgaaagctacgcgaagcacacaagcaaagctacaagcctataaagaagcaataacaatacataaaaagaaagcacacggttctttaggttataacaaacattaggagacttgaacgggtcgattcagagttcgtatgaccaagatatgatcatccgaagtttaatgctgttacatggagatttgcggattattgtaattaggttttgcaactataaaacatgtggaagcgctagcctggaaaagacaggaaggctgcgttgttgacatgcggaccccacatgtcaacctaaaggaccacggtagaccgagtacacagagacggtccacgggtcgacggaagcggaccccatgtgtcaaccgaggcgagtggccaacaaacggactccactagacaccacacgggctgcacacgtggaaaccatgctgctactgagcggacacactaacacggacaccacacggtcaccacccgcacacgtgaacgactaccgacaccggtacacgggtaccggggtcgacaaccgcacaacgggtacggggcgacaccgaaaggacgagggcggggcagcgagaggagagaccttaccaccacgcgacgaggcgtgagaacgacaacgacgaacgggcgcggcggagacggacggcgagggaacgacttcggcggcgatccttgaacgaaggcgagacacggccggcacgaggcttgacgacgcggaggcgaggacgaagacgacgacggctacagcgaccttgacgaaacaccgaggacggacgagaacggcttgacagagggacgaacgccacgacggccgggaacgacgggaggacgacgacgacgacgaccgggaccggcgaggagacgacgagggcagccggcagcggctgcacggaggcgaggacggcgtggaacatgccgcagcgatgcccacgatggaggcggcgccgcgagacgacgaaccgggcgaggatgaacggtgaagacgacgacggataccggcggtgttcggccgaaggggaagcgatgccgaggacgacgtcgcggctgcgatgccgaagatggtggaggtgtggccgaccggtgcacgggcgaggagggacgggcggccgaacaactccggcgaggcggatggagaggttcgcggcgatgtgcggcggcttccgggcgaaaccgaggggtggacgaggtggagggctacgtcaccgtgccgagggagggacggcagcgccggctgatgcacgggcgcggcggaagggggctgccggaggagacgtcgacgaggaggaaggagaggccggcgcgggcgacggcgttccggagaaattcgggcgacgccgtggcctggccgggaaagaggacggcactccggtgccgggagaggtggtggcgacgtcggccggcgcacagggacgcggcagaggcgggcggaggcggaatcgtggcggcaacaccacggttgccagcggggaggcacttccggaggtctccgcggaaaacagagggtaggccggcgaagaggaggcggctgcgatgctggaggaggcgacggcgcgaccggacggcgctccggcgaggagggagaggcggctggaggcggccggaggcacgggagagagaggaggactgcggggagaggtgatacgaccacggggagactcgggatgaggttaaaacgatagaacggaggatggggattccattttatgggatgggggagggagccggccacgggaggagcgggaacggcggcgggaaacacggccggcggcaatggaaggcggccgggaatggcgcggccgttcccggcgattgggggcgccattcaaggggaaattaagggggaaagagagatgagggaaaggggattaattccccccaattaattttggaatccaacgcttaaatcgcgcggattcgagggaggaacgaagctagggttcacgggagagagagagaggagaccgggcgggaggaaggagacgaccggcctggcgcgtgggccccacgcggtcgggcgctcggtcagcgcacgcgcggcgtgcgtgcgcgggaggggagcggctcaggcaggggcacggcgtgggccgggcggccggcccaggaggagaggaggggaggggtggcccggggagagagggaggaggagggagtgggccggggaaggagggagggaaggagagggagagaaaaagagggaggagagagggacttcgggctgggcttggcccaaaggaggaagaggatttatttttaggtttttctttttaataaactttgataattgtttttgttgcttaataattatttccggtgttctgaaaattcaagtaaaatttgagggctcattttagaccaaggagaatttaacaaaaattctccgggccacatttgaatttttcttgtacgtattttagtgtttgccaatttcttttcgaattttaattaattctattattccttttggaaaatgatttttatttcgggatgaatttatcaggacgtgacattggggaatcaatatcctgaatgagaaaagaagggaaaagaaaactcttcagggaaaattggaggagctagataggaaagctttagaagatgacttatcccctgaagaatggaattagagatatgaggtggaaagggatctagaacacacttataagatggaagagttgtactagcataaaagatgtggagaacaatggatcttggagggggataggaacactgagttttttcatagggttgctaatggcaggaaaagaaagtgctcaataatctctttgatggatggagatacagagctgactagtaaagaagatataaaaaaaatcatattgtctcttattacaaaacccttttttagagctgatgttttaactatacccacttggctcgagatatctggagtggcggtctgaacctttctgctgacaacaaagagagtttgattagacccttcaagattgaggagttagataaggcgcttcaggaggcaaaattgaacactgctcctagtccagatggttttagcatccttttttgcagagcttttggcctcaagtgagaaatgatttgtttgagatgttgcttatgtttcataatgaggagttagatctcaagagactgaactttggggtgatttctttgattcccaaaaacaattagcccacagacattagacaatacaggcccatctgtgtgctgaatgattgcttcaaatttctcagtaaagtggtgaataacagactctcagaggtagctaatgatgtgatttctcctacccaaacaaccttcattcctaggagattcattcttgagggctgtgtgacaatccatgaggtgttacatgaaatgaggactaaaaatagagaagggattattttaaaaattgattttgaaaaagcatatgatagggtcaaatgggagttcttgatagaggtaatggaaagaaaaggtttccctcccaaatggattaattggattaagtcttgtgtgataggggccgggggagggtctgcattaacattaatggggataggactgagttttttagaacctttagaggccttaggcaaggggatcccctttctcctctccttttcaatctggtcaatgatgctttagctgcaatgttggataatgctaagagaaatggagttattagtggcttggttcttgagattgttcaaggggattacccatttacaatatggtgatgatactgctcttttcattgctaatgatgtctctcagattactgccacaaagtttatcctttattgctttgaagagatggctggtctaaaaattaattaccacaagagtgaggttttcactatagggttagaggaatctgatactattggagcttctcaaatgcttaattgtcctataggtcactttcctatgaaatacttgggcttgccaattagccctgagaaggttttaaatcctgattttgatttcttaggtcagaaactagagaagagattgggaaattggggacctggtagtctttctcatgctgggagagctgtgcagattaatgcttgtatgtcctctattccttcttatgctatggggttctatcttcttcctgaaggggtgcatcagaggtttgacaagataagagggaggtattactgggctggtaacaaattgaaaggtaaatatcacatggtcaaatgggaagacatggcttttcctaaggactttggggggcttggttttactgaaacaaggaggatgaatgcagctctgctggccaagtggattattaagttggaatccaatgatcagagtttatgccttcaggtgctgaggggaaagtatatgtaggaaggtggtatgtttcagtgtaaatctgggaatggttctcaattttgaaagggtttgttgaatattagaaagtgagtgcagcttggtgctgaatgggttctgggatgtgggaatcatatctatttctaggaggatttctggttacacaattgtcccttgtgagttatgtatccaaatattttcaaaatttgtaatcaacagaaggtgctggttgcacangtcattcagagaggtgtggagtgtctcactttangaggtcctttggccctatagaaagtgtagaatgggacaacctgaaaaatgacatagagaatgtgaatttgagtaatgagcctgacaagccgatttggggtttagcctctaacagaagattctctaccagatcactatatagagctttaacttttagaggtattagagaggtgaactcagagttgtgggctgccccctgcccaatgaaaatcaagcacttcctctggcttgctctaaaagatagaattcaatctgcagagaacctgaaaaagaggggttaggagggttttgaattctgtcaactttgtgggcaaattgagactactagtcatattctttttaactgtggcatggctaggatggtttggtgcatttgtagagatgctttgggatggggttccatccctcgaaattttgatgagttctttctattatgccaatgtgactgtaacccatcttctatgcatctgtttatgagtttgcttgcggctgtttcctggaatctttggctaactagaaacaatatggttttcagagataagatcttgtactccccactaactgtcacagcctgatttttcgttttaggatttataaattatttaataaattattaatagaatttatattaaatgttctttaatttacaagtgaagttaaatgtgggaaataaaattttctaaatataaagcatggatggatttaatttttaaattctccatgattaattatactctctgaaattttctcagatttttcggagctcaattcctaaatgatacaaaggacagttcagtaattagttaatcaataatcattaatgatttaattataattatgttaagtgcttttcttgtttaaaaatccttaaattacaaattgttgtttaattggaattagtagaaatgatcttaaaagcttaaaagaaaagatctaattttaatttgttaaattctaagataaaagtgggctagataaaatttcattaaatactttacttgattctatagttcctaaatttttctgggatttatttgagccaaggaagtatttttaataaatggaattgcatttcatgaataatttaaattgaaaaaggttttaaaatctccctttttgttttgggccgaaagtcggcccaaaagccctctctctctccccggcccaagttagcccaccagccgagccgccgctcgcgcgcgcgctctcgctcgctgacaggtggggcccacctgtcaggaccttcttcctcctcgcgccgtcgcccggccgagctctagccgagccgcgccgccgtctccttccaaatttggtcgcacctttcctgctccggccaaatcatttgaggggaaataatccccttgatctcctctatcttttcctctatagaaacttcggataaaatcgtttggaaaccgatggatttgagctcgattcggattcgtctctctcctctaaccctaacctttccatcgccgtcgccggtcgctatgggcctccgtcgccgcctcctagcccctataaaagcatccccgggacctcctccgtccgccgccaccctcgccttagcccgccgccgtctgtagcgccgcctccgcgtgagatcttgcgccgccgtcgccgccgtttgtccagccgtgcgtcgccgtcgctccggtcgtcgtcgtcgctcgggaaggccgccgtcgtgatcgccaagtcgtcgccgtcctcgtccacccctccgtttccaccgaggatcgccggagcatcgccgtcgtcgtcaagccgatcgtcgccgccgcttcatcctcgtcgccgtcgtcgtccggttgtcgtccgccgccgttcgtttctcggtaaggttcgccgcgtcgcccactacccgttggtgtcctccgtttgcgccgctgcgccgtcgttcgccggcgagcatgcaaggctgagccgccgccgggtgatgacgtcaccgctgacgtcatcgacgccgtccgccgtagaccacggtagaccgagttgatctcggccgtccgttttggataggatagatttcggccggccgttccgtagaccatcgccgtgcactcggtccaccgtgagccgagcccactgacgcaataattcccttttccgtttcaaaaataattctttattgcgtcataattcaattaaaatccatataaatgttttaatccggtttaatctttaaaaattcataactaattcatattagctcggttttagttggttcaagtctctaaagttgtataaaataaagatctacatattaaaattatccataaattgaattaaatttatttaatcctttttaaataggctttaattagattaaatcttgtaaaattcgtaattatttcatatgaagtcagaatgagcccgttcaagtctcataattcatctaaaatcatgatctacacatttgtttactttatatgtattgtttatttggagtttcttagtctttttccttgttttgcgttttagcttgtcgtttccgtcgtttcgaaggttcgcgagtgcgccggaagtattcaagaagattaattgaagacccgttattgcaaggcaagtcacacagatcccaaacacagttcctttgagcatgctgatcctatatttaaattctctatttatttcaactgtgcatttattttttaatgtcatcgggctctgtagacccccgtttttataacaggaatcaatcgtgtaaacagtaccatttccctggatcaagtagtctggtacacacgagttcatagccgagataccaaatgcacatacacgagagtctagtgcgaattattacaacataagtctgcaggcgtagtcttaaatcatcagaccgatgtcacatcctgattttttcgtttcaggatttataaattatttaataaattattaatagaatttatattaaatgttctttaatttacaagaaaagttaaatgtgggaaataaaatttcctaaatataaagcatggatggatttaatttttattaaattctccatgattaagtcaactctctgaaattttctcggatttttcagagctcaattcctaaatgatacaaagaacagttcagtaattatttgatcattaatgatctaattatttttgttaagagcttttcttgtttaaaaatccttaaattataaattgttgtttaaaaggaattgttagaaatgattttaaaagcctaaaagagaagatctaattttaatttgttaaatctcaatataaaattgggctagataaaattttgttaaatactttgcttaattctataattcctagatttttctgggatttatttgagctaaggaagtatttttaataaatggaattgcatttcatgaataatttaaattgaaaaaggtttttaaaagtctcttttggctttgggccgaaagtcagcccaagtcggcccagtccgccgagccgccgctctcctctctctctcagccgctgacaggtgggtcccacttgtcagggtcgtcgtcctcctcgcgccgccgccgccgcctgaaaccctagcgcgagccgccgccgtctccttccaaattcggccgatcctttacttctccggccgaatctttagaggggaaatgatccttgagatctcctcttccttttctcttttggaatcatcggctaaaatcgtttggaaattcgtggattcgagttcgattcggatcagcctctttcctccgaatccccgatctttccatcccgccgccggtcgccgtgggccttcgccgtcgccttccaacccctttaaaaggacccccggtgtctcctctacccgccgcctctctcgccttcgcctaccgtcgtgtgtagcaccctagcctcgtgagcttttgcgccgccgtcgtcgccgctgctccagccgtgtgccgccgccgtttcagctatcgccgtcgctcgggaaggtcgtcatcgtggtcgccgtcgggatcgccaagtcgtcgccgtcctcgtccgcccctttgccgccgccggagaccgctggagcaccgtcgccgccgtcgacccgatcttctccgccgctttgacctcgtcgccgtcgccgtccgttggtcttccgccgctcctttggtcaccggtgagttcgtcgtgccgtccgcttcgtcccggtgccttccgttcacgccgtcgcgccgtcgttcgccggcgagcgtgcgccgtccgagctgccgagccgcccgagccgccgccgccggtggtgacgtcatcgctgacgtcatcgtcgccgtctcccgtgagccgccgtggacccgatcgatctcggccgtccgttttggatagggttgatcttggccgtccgttcccgtgaactgtcgtcgtgcacccggtccaccgcaaaccctagccgctgacgcaataatcctccttttccttttcaaaaataattcattattgcgtcataattcaattaaaatccatataagtgttttaatccgatttaatctttaaaaattcataactaattcatttgaactcagtttaatgtggttcaagttgcaaaaattatataaaataaagatctacatattaaaattatccataaattgaattaaatttatttaattctttttaaatgggctttaattagatttaattttgtaaaattcataataaattcatttgaagtcagaatgaggccgttcaagtctcataattcatctaaaattatgatctacatgtttgtttactttttatgtattatttctttggtttttattagtctttttcttcgttttgcgtgatagttagtcgtttccgtcgttgtgaaggttcgcgagtgcgccggaagtattcaagaagattaattgaaggccgattattgcaaggcaagtcacacagatcctaaacacaatcctttgagcatgttgatcctatgtttaaattctctatttatttcaactgtgcatttattttcgaatgtcactgggtggtgtgaacctattcctttgttatggcctgttttcattgattactttattccttgataccttgggtgattataattggactagttgagctttatatatattggttcaactagatattagatataattgcttagccatgcttagaaacattagcacactattgggataacttatgactcattatttaatgatggcttaatgatagttcacgatggtcaatcgtgattggttaattaattacttgccaactaaaacttgataatggtgggttgtgagcacatggttttgagagtcgtgctcatgacaattaaggaccggttcgcgagctactattgtgaaacattaatcgtgccaaccacaagccagcgtgggcaacggctttaccttttgtatagcatgattcattgcggagcaccagactgagaagtggcggagataagcccacgggggtcactggggagtccatgccttgttttataagggggtgattatgatccaggaatggtgcactgtggtgagttgtgttgtacaaagggtattgtcacagcctctattcgggtactttccagtatcgcgacgcatggtagacatgatgttgaggctgtgtcttgtgggtacagtggtacacctctggccagagtaaaaactattcgaatagccgtgcccgcggttatgggcgagttgagcaatgtttttcgtgattagtctcacacctctcacaataattatggatgttataactggtaataatttgcttagctcctggtttggagttagatctgtacagccgggtatggttgttcaggatggttgggcctgtgcagcatgggtgtgctgttcagtgttgattaaaatttctgattaattactccactgttttacttctcttaaatgttttgttaaatgctgcttttgcaaatgagcctatattatgccatcctttggtatccttgtgcacttgcatatttgctgtgtggcttgttgagtatgtcatatgctcattcttgtaacaatcaatcaacctcagttgaagacaagttgcgaaggagaagacgtttggcttataccccagttgagctgcctgtgggagtggagccggagcttcgctagattttattttccgctgcagttttcttcttggtgaggactaagtgcctcttaagtaagtacttatcgttttagttaatttgatgaatctgtatattaaattgtcagtttgtgtacctcggctgattcctggacgaggattttatgcacaaataagtttggaaattacttgtgaatttccgggcgtgacaaccgagcagtccggaatacatcccacagcagaaatagataaagcagcggcatgccattgccacaggcaacgaccgtaactaagacctattgagcgccatcgtctgcatcaccctcctggtaataggcatagggatcctccgaagcttcatctccggcctctgattaagtttatatttgcaagggtgagtaccaaccgtactcagcaagccaccacatcaacaatgcacatgataggggtatttcaaaggatggctatggttcttttgcgcaaagcaagttttctaattcttttcacaagcctaagacctagcattgactgatcaaattttagtactagtgtttatatttaaacaacgatggttctgtccaccatccattgtgatcccaaggatagcttcccgccattgagtcgtcatggttttctgaggacgtccaccttcccccttctcaggaagtggctccaacagcataaaattcatcatgcaataacccttcctacacaagttaagaatttagagtctagcccaggtttaatacatgtcccggtgctaatacccgcaagcacggttaatcgaataaatttgttttactcacactgcagtggatgtacactttacccacactccgggactgcccaacacatgagcctcgtcccaacacatgaaacgtatcacggcaaagcttttcgataacctcgcattggcagtacccgctccatgaacttttcatcctcatgcactctaggtgtacacagtttctagcagtgagaggagttctggcgcaccgggaagggaagactcacacacatgcattaagttataattatgtttaaattatcacatggcagtcctaccaatggtgacaccactgtagagcccctgccttacacatcaagaaaccactatgcatggatactgcctccgctcagctatttactctgctaggtctatccccatacgagaagtgtggttgtacggggtcgtttcatgcttaactttatggctcggtcctcaattgaccggggacggtactagcctttcccagataccacccaatcttaccgtcggtcccagtctaaaacaagtgtttaatttcatttctattttcacaattcatgtcatcatatcatggcaatgtggcgctcatgtttccacatgccgcatctcaattaccttcccaaaggtaattgcccaagcatatagtatttgataaaatatgagcatgcatgaatctaaaatagcatttctaagcaattgtcatagttgactaggggctcgtacgtatctatggttacaaagatttaaaggtgaacaataatcaaggcatggcatatttcacaagtgggatgttcatcattgcatgcaatcttatttgtaaacaaaataaattttgcaatcgggatcaacatgctcaaagaatagtgatgacttgccttgctcaatgtcttgcgggtcttgaccttcgctcggatccgcaactccctcgggctctacaagtacgtgcgaagaattgatttgaattccattagaattcaaataaaatccaataaagaccaaattgaaaaacgagcgcgagtggcgaattctatatcaactatattattcgtgaaataggactattcctcaacctatgatattttgtgtctcctaagtaaattcctaagaattcaacatatttatttagcgcttaaataaatctaatttcttaccgcaaattaattactcatagagattaccaaaatataatttaattttgcaattttacgactataattaatctatacttaaataattaattattttaaattttctatttttattaacctccctatcctatttctcttttttttctttctttttctctcctctcattctttttctttctttttctctcctctctttttccttccctttttattttctttcttcctcctctcccttccggcttctccctttctctctctctcggctttttgcccaccagggcggcggcggcaatggacgcgagggggggggggggggaaaacggctcaccggcggcggcggcccaaggcggcaacgctcggtaccacacctggcgcggcgcggtggcttcgaggcgacggcgcggcgcatgaaggcggcggcgcggcgcacaacggcggcggcccatggagaaggaggagaagggggaaaatggaaaggatgggtgtggggtggaaaaggggaggggccgggttttataagggcgtgggggaggggcggacggcctcatggcgacgcgacaggcggtgcgcggtgtggctggcggcgatggcgacgggcgggcggcgcggcgcggggctcggcgcgacggcgacggcgatgcaacgatgacgggcgagcggcgcggcagggtgcggggcgcgaggcggcgacgcgacgggcgagcggcgcgcggggcgcgtggcgcgaggcggcgacgcgacgggcgagcggcgataggacggccgacggcgacggcgcggcagcggcggcacggggcgcgagataacgcgacggcgacggcgacggcgatgacacgcggcgacgggcggcgacgtgacggcggcgcggggctcgaggcgatggaacggcagcgcggggctcggggcggccacgcgcggggcagagtgggaggggggttagggctagtgacctcaatcgaacacctttggggcaatgaacagtgacttttcctatttttccaacttggttgtttttcctattcaaatcttgtcccaatatttctaatttttgctcaaatcaagtttacacaatatttgtgttgctctaacctagattatcactacccatattttatttttatttttatttttaatttattcgaatttaattagggttaattcttattccatcgcacctaaatttaattgttaccaatatggccgcgataatattttatttatttccaacctcacctaatctatattttaattagttattttgccaatttaattttagtgtttattcctaattaattattccttattcgcgatcggtaaactttgaaaccaaattccaataaaataggcaaataaaatcagcatgatgcaatttattaaaaagtttttgaagggcccatatttttagagttttgattttcgttggttgaattttcaggatgttacaaacctaccccccttaaataaatctcgttccgagatttcttaccggtcttcgaacagatgcgggtattctgtcttcaagaattcttcactttcccaagtggctttatcctcagtgtgattactcaattgtaccttgtacatatgccacactttggccctagtcctcttttctacttcatccagtatccgaactggatgctctgggtacgtgagatcattgctaatatgaatttcctccaacggagcttgctcctccggcactcgcaagcacttctttaattgggacacatggaagactggatgcacatcggcgatgttttctggtagctgtagctgatatgcaacttctcctcgtctagccgtgatttgaaagggtcccacatatcttggcgctagttttcctttgaccttaaaccttttcgttcccctcatcggagaaacctttagataaacataatctccttctttaaattccaggtttcttcttcaggtgtcggcgtaactcttctgtcgtgattgagccacttttagacggtctcgaatcaggcgaaccttctcttcggcctctttgataatgtcgggtccaaataccgcacgttcacctgtctcgaccacattagtggagttcgacatcgttgaccaaacaatgcctcattgggtgacatctttaggcttgcttgaaagctgttgttgtaggagaattcggcgtagggcaaacatctctcccattctttgctaaaatccaatgcacaagctctcagcatgtcttccaggacctggtttgtcctttccgtttggccatccatctgcggatgataagctgtgctaaaagcaagataacttcctagggcttcatgtactttttcccagaaatgcgaggtaaactgtgtgcctcgatcagatataatccttttaggcacaccatgaagacacactatcctggtcatgtacaactcggcgagtttagcactattatagtttgtcttgacgggaatgaatcttgccgtcttggtgagtcgatccacaatcacccagatggaatcataccctgttgtggtcttgggcaacccaactatgaaatccatacctatctcatcccatttccattcgggaatcctaaggggttgcaacaaacctgccggcctctggtgctcagccttcaccatctggcatacgtcgcagagcgctacgtattcggtcacatctctcttcatgtggggccaccagtaaccctccttcagatccggtacattttggtacttccggggtgtaatgaatatgccgattcgtgagcctcctttaggattaatcctctcagtccaccctgttcgggtacatagatcctctttttgtaccatagaacacctttttcatcggttgaaaattcctttgcacatcctgcagctaggcgtcccttcacctctcggatttcctcgttgtccttctgggcttcttctatttgggttctcaaaagaggttgaacgtccagggtgtttatctatccatgaggtactatatgtaggtttagttgagccatctcctccttaagctcaggaaccatcccttccgtcctcagatgatggcaatggctcttccgactcaaagcatcggccacaacgtttgccttgccggggtgatagtgaacctctagatcgtagtccttgattaattccagccatcgccttagcctcaagttgagatctgactgggtgaaaatatacttcagactcttgtggtcagtgtagatatcgcaatggtttccaatcagatagtgtctccaaatctttagcgcatgaaccacagctgcgagttctaggtcatgggtggggtagttttcctcgtgtggtcgcaattgtcgtgacgcataggccacaacctttctgtcctgcatcagtactcctcctagtccttgccttgatgcatcacaatatataacaaagtctttcctgatgtcgggaagaactagaataggcgccgaggtcagcttttctttgagctgctcaaagctttcctgacactgttctgaccacacaaacttcttttccttcttgagtagttgtgtcatcggtcgggctatcttagagaacccctcaatgaaccttcggtagtatccggccaagcctagaaaactccgaatttcagtcacagacttgggtgctttccatttcgtaacagcctccactttagcaggatccactgctactccaccggctgagatcacgtggcctagaaaagcaacttccttcaaccagaactcacatttgctaaattttgcatataacttatgctttcgagtttctcgagtaccaatcgcaagtgctccacatgctcttcctcatccttggagtagattaaaatatcatcgatgaatactaccacaaatttgtccaagtaatccatgaacactttgttcataagattcataaagtatgccggggcgttggttaatccaaatgacattactgtgaactcatacaatccatagcgcgttgagaacgtggtcttgggtatatccccggtcctaattttcagttggtgatatcctgatcggaggtcgatcttagagaacaccttagctcctttaagttgatcgaagagatcatcaatccgtggtagtggatacttattcttgatagttacttcgttcagtgaacggtagtctacacacatcctaatgcaaccatctttcttcttaacgaatagcactggggctccccaaggtgacgaactggggcgtacaaatcctttttcttgcaactctctgatttgcttcttaagttcctccaactcattgactggcatccgatatggtctcttggatatgggagcagttccgggtatcaggtcaataataaactctatgtcacgatctggtggcatcccaggtaaatcctctggaaacacatcaggaaatcgttgcactacaggcattcctttcatgggtagcatggtgaatatgcctccggcatgttcggccagtctaggatcttgatccatagttgttctcatatccgatccccaggggtggtcaaggtaacttttctacgcctacagtcgattacccctctgttctttgttaaccaatccatacccaatatgacatccagggtctgaggtatcaaaaccataaggttggagggaaacacaacatccctaaggcgaatatgtacgtctatgcaagcatgactcacagttatctcgccctcaggtgagtgtaatatcataggctttctaagtcccactagggttaagttgtgcttttgactagccttcagagatatgaatgaatgcgatgcaccagaatcgaagagaactttaaccggggtagaattgatagaaaacatacccattagtatgccctg

SEQ ID NO: 21540 - DNA, 1711 bp, Oryza sativa
acccggttaaaattttcttgccccgtggggtcccctggccccacccttctgaactcgtccttcttcttacgcataaccgcagcaggcacgaagttctcgcgaaatgctgcagtgaactcttcccaagtgggttctccagcatcctcttcccgagcttccttgtaagtatcccaccaatcaccagcgggtccctccagttggtttactgcgaagatcactttgtcggcttcgcgcacccggataagggtcagtttcttctctatgatacgtagccaatcttctgcctccataggctcgtctgtcgtagtgaacgtgggtggcttggtgctcataaactctccaaagcttgatccttcgtggttgccttgattgtttgcaatggcttgcagaagttgggtttgagtggccataactccggccagggtggttaggtcaggtgtctgggtttcatcattgctggttgacgcccgacgtcggcttgccatctgtgtaggtcgattgagtaagtatcctaatctcctaactggctcttatggttttatctctttaagggaattgtcttgatgtgaactttgttttgcaagcatggtggaataaactcatttacaacacaacagcaataatatcataaataacatcacagagttccacaaatagtacataaatcgtgatgcaatcgactgcacacatacgcagtccaaataaggttcatccaaaagatacattgaactaatcatcaaactactcgtcgatctaggtaagggggggtgtctcgcatgctatccaaaaaccatatgaagcgagatcgaagctgcaaatagtcctccagtctagtcatccaaccatccgcaggatcctggggcaggtagagggtggttgctggcacgggcaaacctgagtccccacggcttggaggtagtggcctctggatctggcttgggcttcttgcccggggatcgggtgctcttgcgggcaatgctgagggtgtgagggcctccgatgaaggtgatgcggggaacaggggtctcatcctctgaaggatcagtgatgtctggctcgatctctggctcggtgtcggtcccctctgtctcggagtcgacctggatcggagtctccatactggaacccagctgtggtgacggggtagggaccagtggggtgtgcacaatctctggtgcaggtggctgtgtcactgtcgtgtccactaggtagggtgctgacttagtagctagcatgccaatctctcccagaagagtgtggaatgcgggtggatatggcgggtgaggaagaagtagcggtcacgccctactgctgtggaagtagaagctcctggggtgctgaccgtggctgctggaagctgctcctccagctggctgacgggctcctgactctctctcagctgctcctcaagtgtattcatcatcccggggcgattgttgtactgataagataccggctggaactggtcgccgtggacctgaagctgggccttcagtgagtctatctcactgccccaagcctggtgcacctcccctagctgaagctgttgcactgtgaggtcagtcacctcggtctccaactctcccacaggcctctgtagtcgtcgatctctaacagagcctcctcgtagaagtcgtctactgcctcagcccatcgtgacagtcgagtcactatcgggttgtagcagcaaggtgtgtcctgaactgtgcag

SEQ ID NO: 21541 - DNA, 1049 bp, Oryza sativa
cagccatccattgcctcaccaagttggccttcctaattatgtagtcctctttgtagatgctaaggtataacagacatgctttcaaacaatgaggaagattattgtaaataaggttgagtacttgcctcatcccctgcaaagtaggatttttcttcaaattggaagtagtcaatgatttttgtatgtgattccattgctgcattccatctaacagctggcttttaaaatgtctggctgttatagttattgctagtggcaagccaccacatttttttatcatgtcatgagaaacttcagtaagatgtccaggaaattcatttccttggccaacaactccactgaaaaacaattgacttgagacatcatcacccagtggatcaatcttaataatgtgctctgagttatatccacagcatgccaaagctacaggttcaatttctgttgttattagtattctactgcaactattattatcaggcaaaccacggctaacaatatcccacattgatgaagcccataaatcttcaattatgatgaagtacctgcagaacatttagtacttcgtaaacattaaacttctaatgtacgaaaaaataaatcatatttaaaaagctatacgtgggatagcatgctgaatttaaaaagttgagtgcaatttcattttatcaactttgcaaacatggtgaagacatgttctatatcttgtaaatttcagaaattaaatttaaccacatatctaagagcaagtttaatagtatagccgactactagctccaaatcatctagagccaaatagccaattcatacaatagttgcttactatactattaatacttggtcctacctgtcatacacacattacgtcttagagtccgtgctgcagctggctacagatctgtaggctgctgctcttctctctcttcctatatctctttaaaatatgtttatagctagcttataacctgctattgtacctgttcttagacatggaaaaagacacgtactcctaagcaaatactctctcatgtttttaatgtttgatgtcaaac

SEQ ID NO: 21542 - DNA, 835 bp, Oryza sativa
atccgaatcgaactcgttttcgagtttatctccaaaaccgagtttttgatttcccggatcgatttcttgcgggaggagtccgatctcttcaatccaaggctataaataggaccccctagtcctcctctttcgtttgccccctctcccgtggtctcccgtgcctcgtagcgccgccgccacgtgctccaccccgccgtagtcgccggccgagctccatccgcgtcgcgccgccgcctccgccgtcgccgccggtctccgtcaccaccgttaggtgcgcgggagggtggagaagcccggccgctatctccccgaagccgccgaccaccgcagccccgtcgccgccgtcgaccgaagccgcgccgccgctagacctcgtcgccggccgtcgtcgttcgtcgtttggttcgagggtgggtaccgttgggttcgtctcgtcgtcctctacgtgttcttgtcctccaaagtcgcagccgaccatccaatctccggcgaggtcgccatcttggttcggccattgatgaggtgacgtcatcatcgtttttttctttttcctgtttttctaatagattaaatcttcggaaattcataactaaatcatcgtaactcggttttgagtggttcaagttgctaaattcatctaaaatcaggatctacatgtttgtttactttatatgtactgtttatttggtttttattagtcttattcttcgttttgcgtgttagtttgtcgtttccgtcgttgcgaaggtttgtgagtgcgccggaagtattcaagaagattaattgaagaccgattattgcaaggcaagtcacacagatcctaaacacaatcctt

SEQ ID NO: 21543 - DNA, 8214 bp, Oryza sativa
taggtgacactatagaatactcaagcttggggcccaataggagcattctgggtaccattgtcagaccagactccgtgctcctagaccggaaaggctggaacaaggacgctacaatacctgacatgttaacagaaccctgggaaccattaccccgtcagtttgatagcgataatgatgcagtctataattggcatgtgatagatgatgaaccactgcccaggaatactcgatcctcatcggaggacacaaggccatcacctacacaaaaaaggaagtcttccaaaccaaaacagagatcgcggaaaaaggccaaggctgattcttcgagtggtaacaatgctgaaaatggtttcaagcgggggaaaggattagcacaatgtgatagatcgcatcaaagtgcaggaagcagcagacggagcaaagggccgagagagtatgacagatttacaaataccctcccacaatatactcagcacattagtaggtggtgactttaggctgttactgatagcatttacagtacagttcgggattgggagatcccacgaggttttgacaggcagaatggcgccttggcagacgtcgaagttcaagcagctttctgtagccatatgtatgatttattatttatttgtttgtctaaggttattcggtcctttgtaacgccgatgaaaccgatatattcagttatattatcatcgtatgaactgcaatttcgccaacttgtctatggcaaagtttcagactattaaaaattatctttggctggaacgtgaattcataattcataacaagacgtcacttcggtgacatccgataaaaataattcataacaagacgccttgaaaggtttaagttttattaaacgaaagaggaacataatttagattgtcgcagctaccaatcacactaaatacatgattggaagttaaataaaatcaagcttatagtcgaatgaaataaaaaggttccaccttcttttcccagtttagaactgaacaagtaaacagctttgtttaccgttaccacaacgacactgcaagcttaatacagctagctaccgtcttttactcgtctttcttctgtgcgaatcctgggggaaaggactccagccttttctattccgctcaaaagaataaggaaatataacgagaattgtatatgaggaatacaggataatcagctatcaagcactttgtgttcaaatatcaagcctcttatacctctgctctattttcctttcgagagctgctcctatgttttttccatagtataacggaaaaaaaaggtcaatcaacaatatgacaggttaaataaacattgaaagtaaaaatgcaaaacaaaagaagctaataaaccgatattgtaaggccacccaacaaacagctgacaggatcaagatggtgtaaactcgtcaaatatattcataccgcaaagacataagtttaccaggttacaagcaggtatgtccattaaaagtgaggacatatgctagcatcatcacttaactaatctaccattcttattcagattgacccttcagctgaaaaaaagtagaaggatttgcaccaatctgctggctaattaaaaaaaaaggaagccagattgaagtggccttatggagagctgataagcttccagtccatattagaagtggagatcctttgtgagaccagtgaaacatctcaatatgactggttcattctgcactaacctgaccattctcgtggggatgtaacattgctacctgcattgagcttatcagccatggcaacagagtctgcaggttgggctgcagttaccactgggagagctacgctctcaactcgatcccgtggataccctaccacactagctgtttcaaacatatttccaaatggctgattatgcacgacttgtggtcccaaatgatgaaatgccatcggaccactcgctggatgctgaggcagaacagcaacaacagtagcagcacagttagaaggattcttgaatgtggcgctgtaggattggccactaccttgaacggcataggatgccacactacagtggttgggcttgcttggttgaggtgggcatgagctcaggccgtgttgctgcaatggttgtggctgctgatgctggatgttaaggtctgtcgatggaagcaaaactgtattgccttggccataaaaagaaggcatggcttcatgatgcttctgctgaggtgaagagtatggcgagtgcacaaccatgtttctcagaagtggctccgttgtagcactggcaggcttctgagaagagtatggaggatacaagacagcgacttgaggagcactttgagcctgaggagatgatgtttgctgttgaactagctgtggtggaacttgctgaatattgtattgctgcggttgcaccacaaggggctgtgttcgccatgcttgtgactcaacctgctgagcaggcagatgtagcctttggtcctggggttgagggtacaattctgtcacctggctagatttctgagataggtcaactgcaaccctggcttcaggattctggatttgtgactgaataacatgtaccgcggattctgatggttcactctctgtgcacttaataggattttggctttgcatataatacacggcagcttgactcggctgctgctgatctggttgtgtgctcaaagagacaggcactagttgctgcaaaatataaccattgctgctttggactggcacagcaggagattgcattgcattaacttgctgaagtggcatgaaagcaacctcatgttttgcaacttgtgtgctgtgatcattttcccttccgaatgttgagaaagcagaggcttcatttgctctagcagggaactcatgcgctatttgaagtttggagaactcgttcggtgtctctgaaatctcatgcttatcctgcagaatctgcacagatttttgaacctgttcgccagaagaaaagatttcagtgtgttacaaaatgatctgaatctcacgagaacagcaagtcgttgaatccattgaattcaatcgtaacaacttgtgaaaaaaattgcactgactccttaagcacgagtgaaaaaagaaacaaattttgaaacgtaaatggcactgttaacaactacaaccacaagctcaagcttcaaatctgaacattgcatcaaaaagttgcaagccatggattaattaattaatttttaaacagctttattactttaccgtgcgagatggatcaatgcgagtaattcgaaaacatcgaacagtttgggtgcaagtaattccgttgaccgtgcaagaacgtgcatggatctagagccagagcacccacctgcctcagattcttctccaggcaccggaagttgaccgtcccctcgctgtggtaatccatgacgtcgctgcgcagctccccgatggacctctcgagcttgtagcagtagagctccagctgcgacaggcggccgccgattccctcgagcgaatgcagcaagccctcggcctgcttcttcatgcactcctccacggccgccatgaccgcctccttggtgtagttctcctgcccaccgtacacgttcacgaacgtcctcaccatcctcttctcctgctgcaaatcctgcccccattcccccccaaacacacacgcacagcatcatcagaaaccccggacaacacagtcgggaaaccggaaaagctttcggggctcctgctacctccgggcggcggcgcgactggtcgaaggagcagcgggcggcggcggggtcggcggggaggccgaacgcgccggagacggaggcggcggcggggcgcgcgggggacgccatggtcggcgcgggcgggaggtagctagggtttttggcctggcgggaggagacgagacggtggaggtggaggaggagggagtcaggaatccgaggcggaggaaggggcgaggaaagtgagaaccgagctgggcgcggggcgcagtgtggctcactggctgtctctgtggagtggaagccaagcaccaaaaagcagagcaggagtagtagttgtagtaaaacagagagagagagagagagagagagagagaggggtaatcagatccggtgaaaaataaaaagtgtaaagtaaagagaagcggaagcagaggagggaagcaaagcggaaggggttggttcgccgggttcgaggcgtttgggaggaataaaaatgggggcggaacggaacgcgtgggttggtggggttgtgtggactcccggggctcccgttgcacgagacgagagagagacccacttggggcgtcgaaatccgcggttgtctccccgtgagatccatgggattcagtggcagacgccactctcctacggtcgcttgttcgcagcctcgctccgcggcctccgcccgtcgacaggtcgagccgggagttcccgcgcggtttggggttgggtttggattgggtcggctgcggtgcggcgtcactatcctcctgaaccatgtgcgcgattagaaaacagcgggtagcgtgcgtgcagcgtccgcgctccgtgtcatgcatcgcgcgggtgtgtaactgtgtatgggcaacgacgtgatgtctacgtaccgagcggtcgtctcccatcggtgtcgagatggttggggaggtgtgttgtggcttgtgggtggcaggtgggacacatccacgactccaccgccgttcactcggtgcacgtttggcacaagcacaacccaaggcgcaggtcgatctcgcaatctgccgagccgatgatggttgcctgccgatcgaggaccgtggccagattctccccgtaggcccatccatccaccgagataagggtaatgacgagagggacgcaatcgtctgtacgagtacaagggaggggaggatagcggcggtgcggcaagtgttgtggggaggcgacaaggaggcaaggacggaaccggataaggccgacccaagtcaagttgcgattatgttgatagtagttgggttttttttacgctctcgccaaacccagtatgctccttccgtttcgtatgattttcttttctaatcaaattttattaagtttgactaaatttatagaaataactaacgatattaaacaccaaattaattttattaaatctagcattgaatatattttaataatatgtttattttgtgtaaaaaatactacaatatttttttataaacttagttcaacataaagaaattcgattaagaaaaaaaatcaaaataacatatataatataaaatgtagggaatacttgataagccgtaggcatcgtgaggtacgttgagtggagtttgtgcgtctacattgtacggagtatacttgcctagtatacaaacaatgcttttttttaagtaaatgtaagttaattggttagaatttttatggtgtaattagactacccgaatttaaatcctagatttatcacgagcgactgcatttgtggctaattattatttcagacactcgttaccagttaggcgaccgtaatgattttgtcaatttcaagatatattggtctagttttctggagatactcgtaggggtcaggtgcgcgtgtgtacgcacgttataagctcctgtgttactaagggaccaaaacattcaaattttttcatcctttagatccaacaccgacatcattgctagcaaacccacggagagtagaaatataataaggattatcccaaaaattaggcaaacaataggggtctaatggtgtagctacacactatacttactttgtaaggggggtttagatctaagggtgtaaagttttggcgtgtcacatcgggtattatatatggtgtcgtatggggtgttctagcactaataaaaaaactaattacagaatacgtccgtaaaccgtgagatgaatttattaaacctaattaatctattattagtaaatgtttagtgtaacaccacattgtcaaatcatagagcaattaggcttaaaaaattcgtctcgcaaattagtcgtaatctatgcaattagtttttttagcctatatttaatactttatgtaggtgttcaaacgttcgatgtgatagggtgaaaatttttggggtgggatataaatagggcctaaataccatgtatgtgttatacatcaatacaagcgctgaattagtggttaggacgggatcgccacatgtcttccacacaattttctgttattttcttccatctagcgcacacttatcatgaatccaatgacttaaaaatcgttagtctcaaattttataacaattccgttaggatgatttccctcacaccatggtcaataacattcgtccgtttcattttggatgtggatttggatcctacgatttaaatgagactggcggagccgaggcctggctaggatgggcaggtgcccgagctcaagccatgcagcaaggcgtagcacctgctgctgattctattgcctattttatgcaccagaccaccagtaattaaacaatagataattgagatgaatattccctccgtcctagaatataaaaagttttagagttagacacgattattaagaaagtagatagaagtgggtggtggagggttgtgattgtatgagtagtgtagatatgtgagaaaagtgaatggtggaggattgtgattggttgggaagagaatgttggtggagacgttgttatattttgagacaaatactaagagttaaaagttatttattttggaacggatggagcactaagtaattaattatcattcttagacatcagcagagccatatgcatgtagacaggtgacactagcagcagccgtgtacagtaatattaatgaacatgcttaaccaaaactagcaaattaccaaagtgccatcatttttttctttgcatgataatacaattaagccctataatcttgtgtactattttttctcaacctaaattagaacatgtcgtttgtcaattttacttgagtctatggtaagtgacatacagatttatacaaatatgtgggtacttttattcgttgttaggcttgctcaggattaagaaaattcatggcactacgccatatcctcacacttttgatggcatatctgtgacgggcttcagcactagtcagtgatgagggttacctttgatgggtcctacgggacgccgtcatcggtgaggcatccttctgcaaccctctgatggcttccacttccagcccgtcacaggtgactagttacctatgacgggttgcatccttatggaccgtcaaaggtgaggttaactcacctcaaacggccctgtcactagagcccgtcataggtgggggaggggggagttgactagggttggactaatgttatatcctctctctcccttatccacactctttctcactcactctccctctcggcttatggcggcggtagaggacccgacggccctcgggcgagccggcggcggtggttcggtggcgtgtggcggcaacggtggtgccccatcctcctcccccttctttctccctctcccccttctcttatttctcgatccggtttttcttgaagtagcaatggcaaggaggtgttgacgatgtgcggcggctcgatgcagcggtgaggagggctcgacggcgtgcgctggcgaggaggaggtgagcggcggtgccgcggcctccatccccgaccgccagtggccaccgcctctgtcccccgaccgtcgggcgccggatccacgtcccccagcctaatggaggacgaatccgtccaccgggcgccatctcctccaaccgccaagcactgccacctccatcccgccgggtgccagatccgtcctccacaaggtcatgggacgcagatccggccaccgagcgtcgtctcgttcatccccgtgctctggccgccgcctccagtcaccgggcgacacatctgccaaccgctaggtgctgccaaccgctaggtgttgtctcctccatccccagtaaccggctgccgcttccaaccaccgcctcctccgagctcctcggcatcaccgtgccattcttcttagtctcaggtcgtcgaggccatcaaggatttttcaagtgttttatatgatttgattttagatattgcaagtgtaaattggaggggtggatgactgattataaaagaaactcttttgtgattgtttttcttggagaggtagatgactgattgcttttcttcttaaaatttcatggatctaaccgatttcagctgggcactatttttgttttttctagg

SEQ ID NO: 21544 - DNA, 8042 bp, Oryza sativa
aaaccctatccttttaaagggtagaaaatcatatctcaaacacatttttcaaacgtgcccataagctttaaacccttatgctcgcaattaattatacatatattgatatatttttatttgaaattgacactatctgatttgaagttggttcgccgtttcttatgtgttaaaagaggcccactctgtaccatgttcatatgtgtcttcctatgatcatacgcaaaaaaaaaaattatgggcccctttgatttagaggaaaaacataaaaattttggaggagttcaattctataggaaaatttcctatgaagccttttgaaacaaaaggttgaatcctattcaattctttgaaattcctatggaatggacaattctatagagattttggaggaaatttaacaagagcttcaacctctttcctttgagtatatctctcttatataattccggtgtttttcatgcggttcaatcaaacagtcattcatgtgttttttctgcattttacaatcctctgttttacacttacatttctatcaaaatcctatgtttttcctattcctacgttttctcaatcttgcaattcaaaggggccctatatttgatagagaaacacacctagtgtggtatgctacatagattcaaatcttagcgaccataattatactcataacgacgacgcgtttacaatatgagagtttgatgatcataattacctgctcgcaacgtcaaataatttggtgatctctccctagccacaccttccatatgaaccactaactgaacccgttctaatataagtcattttattctttgtttactactccctccgtttcacaatgtaagtcattctagcatttcccacattatgttaatgaatctagacatatatatctatctggattcattaatatcaatatgaatgtgggaaatgctagaatgatttacattgtgaaacggagaaagtataatattcgagggtgtatagatcgtaagagaatcgagtgcatatttcaacaacacgggcacaatatcaaacataaactttcattcattccaaaaggttgtgtcattcagctacatgtatatatagaaacactggccccccacacacacacacacatataaataaataaatatatatatatatatatatatatatatatatgtgtgtgtgtgtgtgtgtgtgtgtgtgtgtgtgtgtgtgcactggccccccacacacacacacacatatatatatatatatatatatatatatatatatatatatatatatatatatatatatatatatatatatatatatatatatatatatatatatatgtgtgtgtgtgtgtgtgtgtgtgtgtgtgtgtgtatgtatgtacatacatatacatatatacatacatatatatatatatatatacatatatatatatacatatatatatacatatatatatatatatatacatatatatatatatatacctaataagaaaatacgtaaggtttccggaaattttttttcgtccgtctcttttttttctcttttttcgctattttcaccgtattttccttttttttccgtcttccgcttttttctttccgccgccttttttttctccttttccgttattttttttcgtctcttttttatccccttttttccgttccttttttttttgccctttttctttttctccgttcttttttttactccctacttttttatttttttgccaggccgaaccctagcgccgctgccacatcgatctgccttccatgcgttcccttcttcaattgattacaaaaattgattatccactactttctcatttattttccctatgattttgcaaagtagagggagataacaggttgggctagtactgaaaagacatgaataaatgagattttggcacaaaactaaagagtataatgtatagcgatccaaaaatatttttacccgttgttgaaaagtgcagcgagctatgcgagctgggcctacaactttacttgtgagctaggtcaaaaagaagtaggcaagcagagaggtagcgagctaggctgcgactgaaaagaaatgaagaaatgagctttcagcccaaaacaaagcgtataatgtatgcgatctaaaaatatttttacccgttgcaacgcacgggtatttttctagtatatatatgtgtgtgactcggttgtttacattatctctgcaaaaggaattaacgtacgtatgccaagccagtacactatttggcactttaatttattgacaccaaggagtgaaagagaacgcgaagtcctctctctccctctctctcaagacagtacattcacacatgcacagcgtcatacactcgctgactcacacgcacacaccgacgcacacactgcgccacacacaaagctggagatcgaaacgagcaaaaatacaacgcaaaatgatctatagcgagatggtggagtatatgatgatcgatctctagctcagtgatgctgaggatccggtcctccggggctgagcctcttggaccccgcgggcacgacgccgccgtcgtcgccgtctgccaccacaggtgccaccatctgggccggctgctgcattattggctccgcggccgcagccacgttcacgaccggcgccgccacggcgtcgtcgtccctcccgctccccagcagccgccgtgcaggcgcagccgccgccgcgtcgacgacggacgacgtcgtcatacagaccagcaggacgcacgcggcgatcacggccgcaacaataatgctggcacgcctagccatatgtagttaactttgatcgcgtttacgtgcggtttcgcttgtgcttgacgacgacggctagctactactgcgtacgtcgatcggtcgatcgagacagttgtattatctgtgtatatcttccagtgatgatgatcaagagctagccccctacgagcttatatatagagggaagcttggctcgagtgcgagaattaatagaccctcttgcgttgagttaattagtttcttatggtcgatcttccacgtcgatttgcgctaacacgaaacttgattcgtcttcagaagattctcacaatctcattgatccacaaccgtgtatttctggtttttggaccagaagaccgcttgctttccgttcgagtggttaatgtcgttgtgacgttatttgcataaaccggtctggttcgttggttgcatgtgaggatttcgataatgccctagctagtggctttcccagactgtattactaatttttgtgggtaggtgtacactacagtcctaaaataattgtacacgattctctctcagaagaattcactactattaagccgccatttgaatagttccatggccacttgctccaatgagtggtttgtttggagtttggaccgccacagtttaagaatccttgtgctaaagcctcaggcaattggtgcatacaaaaatgatctgcacaggactaccggttttcctttttttttcttcacaaacataatgccgtttcgacaaagccaagtggaatgttacacaaagaaactcggaccataacttgcattttagaggtttaatcgaggtctactaaccaataacaaaagaaatgagatatactaaggaaatgaacaatggttaaacggctcctgcctatataacctttctacatcatatcaagatggtataacaataagttgtctataatacaattaatgatttagttcttatatacacaaagattgtatacatgatacgagtagtaagccatctattagaccatgttggatattaaccattgttcacgtcaataggtggttccaataggtagccgtaaaagtttgatttaccacctaaactctaatacgagatatttacaaccttaaactttgcaaaccagacacacaaccactgactcaataagaggcagttttgctccgattcgacaaatgatctgtccacatgcatggcaccgatatggcgatccaatcaagatattttcaataaaaaaaataaggagaaccatcttccacctctcgcttgtactctctctttcttatctcactctctctttgcgaggagcctgttgtgttctgtaggtagctcacaggggagaccgtggatggtgatcttgcaatgcttgccacatggacgaatgcagctagccatcgtgctccacgagctcacctcgtccggcagccatctcgacctcattctggatgccatctcgagaacgcacggcatgtgcggcccgcttgtcagcgttattgggagcactgtctcctcgcagaagaccaccaaggccacgctgctcacggcatgtaatctcatatccgccagcgaccgtgcgcttcattttccgagctcggcgtagtggtgttgcggagcttcttctaaaggcatcctcagcaacaagcacatggccgcctagacatcacaccggcgaggcttaacgctagtaacttaaggattactactaattaccccatgcttaattagcacagttgccattccataaaccaagccttgtattccaggagggatttgggatgagccgaggaggaacaggatgacatgtgagggggcgacaagtggaccatagtgccatgtagggttaaaaccaccaattcagtttgaggggctaattcgctcagtttgcatagtgttgtggctgttatgcaacactttcttttacttcaactctaaattcctattgcaatgttatgttttgtcaacataacaccatgtgttgtaaatactaaatttgatcttgagtggaactttcaacttccatagcgttccatttatggttgggatattattgttagaaagagcatcatgcatgggatgaatggaaaaattcaccattttgatgtcactaatatgctataatggtatggaagtaaatgaaaatggtcaataacattttctaagtcagtgcatatagagcatgcaagtacggtcacctgcatgtctacaaagacacagaaaattccttaggtaactcttgagttttcacttcgttccttctacacatctaaaatttgcttcatgtagcatatccttggttttcattttaatcacttctatgcccattttattagttgatcatgagatttttccaaaatgacttataataatgcctcctcttttatacttatgtgctagctattaaaaaaacataagatccacggtggaaaaataaattataaaaaaatcaaatgggtaaaacaatcttaccccaaattctgaaaccaaaatttgaactttcaaaataattcttaaaacaatgatgaaattcataagtttcagcgatgattgaaaaccaagattatttttagttcagtttgaactttgaccaaattgttgtataaaattcatcaaatttgattatagtttcattccaaaaaacaaattttgagaaggggtcaaataatttaccccctttaatttttttaaatgaaaattttcaccttcagaattatatttcttaagtagctagcacataattatgatagaggaccaatatagtattttggaaaatctaggcttaattggattcatgcaattacaaaattgtccggttgaaaaccaaccattcttattcgcattatcggtgtgtgccactgaaatttgtaaagtttgaactgtgacattgaagctgatggtggtggcaagctcgacagggggacactcatcagatgaagcttcagatgaatcggatctagaccaagagcaagacaaagacaacgacacaacgtagatgtggcggcactagaggaggaggagagtgggcatgacccacgttgttacaatggacaatggtagtgagattgacgaggggaggcttgccggtgaaacctcaaatctatacgtgtaatgagtgttacactcctactttggaaagtggatggtggaagttaatggagtttctaatatttttatttggtcatacgttcggccgcaagcaatttcataaagaattttgtcaagataaaatcatctccaattagtattttagtataacatgggaagtcattagaaattatccaccctcaaacgaagagattccaaatgacacgaatttgcgtattatgaacatatgtacaactaatccgaaagtactactagccagtcatccaagcgtataagatgcatcggacgccgcccccacttcgaagtttccgtccacatctgtcacagatcatgctcctcctttttttctctctccacatgtcccgcgcaccacccccatttctctatttccttccttcctgacagcttcctatacacttccgttcttccctcggagagcacggtagtagacaagcagtggcgaggtagcaccgacaccagctctggcagtgtcgatgctcggagcacccgatcaaacgacagtcgggcttgagaaagcctgatctggtgctagcgaggcctaaaggcgtcagatctagcgattccagcactcggggacgctcgatccgatgctggcaacggagctctatatgtttctccttgtttgtactacttaatactactagggataaggaagaagatgaatccagccagcagagtagaggaacaaggcagagaataggtttgttgcagatcattgttctctctttgttgcactttttcgtattggagtgttttattctttcttttgtcggatgttgcaaatagcaagaatttgatgtttcaatcatttttctcaatgttgcatttgcttgaaacacttttcattaagcgatgaaatatttttcattgatcaatgaagcatctaaaatatttttttgttgagacattttttattgaatggtgaagcatctaaaacatatttttacataagttgaaacattttccgggtttcttttccttttgctcggagggttaattcgaagttattctttaggactttgttgcctgaagaaaattatcattatcttatctctatcatttatccattttgagacgtagaggataaggtgattttaaatgtttacttcacacgtagtactgttcatcttatcctcaatgtcttaaaatagatagagatagaggtgagataatgctaatattatccagccaaaaaagtctaaattaactctctatccaaaaggggaaaaaatcaaaataaccctatcccagcattcagctataacaggcttaatcaccttttcttcccaatacacaaatggctaaacccagaattggcaaacaattaatcctcataaaactattctaaattatttcctactagtaccttctagagaaaccccagcatctgcctggcagccacatcgatctgaagtaaaacccacaacgaaaatttccccccaatttcccgatccctaaatccctaatccctaatccctaatcgctccccggtgccccgatccccaatcggttgatcgccgccagagacgcgcagcgtcagagctcgccgctcaccggcgacgggcggcgccggatttcgccgtcagccggcggcgcgcggcgacggtggccaggctccaatcagctcccttaatccgtaaatttgaaaggtaaggtctctcatggctcgttcgccacggccgccgtggtccgatggcctcccgcccgagcttctcggcgtcatcttcgagcagctgagctgcctcgccgaccgcgcctgcttcgcggccgtctgccgcccgtggcgcaccgccgcggccttcgtcgacgccccgcagcgggggctcccgtggctgctcctcccgtcccgcgacgcgccgtccttcttcagcctccactccggcgccacccgccacctcaccctcccggagggcgtccgcggcgcgcgcctgtgcggcgcccacgacggcggctgggtcgccgtcgccgtggacccgtggcgagggttcgcggccgtcaacctcttcaccggcgtgagggttaccctcccggagaagctgaggctcgaggtcccctacgcccacgggtacgggcccgtgaccgtcaccagccaccaccccatgctcgtccgcaccatcgtcttctccgcgccgcccgcctcgccggactgcatcg

SEQ ID NO: 21545 - DNA, 3705 bp, Oryza sativa
ttctggcagcctgggatgtccaggcactggatcgcgagccggcctgagccggacgtgatccaggacatcatctactacagcggcgaggagaagcagggcttccacgtcctcaccaacagggaggaagtcctggtgttcgcgccccgcgccggccgcgaccccaacgcgctgctggagatgacctgcgcatcctaccagatgcgccgccgcgccaaccacctgccggcgtcgttcatcgcgacgcgctacctggtggagtcccgcgggaagctgctcatggtggtgcgccactgcacgggcaacccccgcgtgcggcggcgcacgcgcatgttccgggtcttcgagatgagcctcctccccacgggggcgtactggctggagatccacgagctgtccgggcgggcgctcttcctccggcgaggctgctccagggcggtcgaggtgtcgcagttcaagatgctcaaggaggacaccatctacttcctcgacgacgccaacgtcgacatgtgcgactccatggtgatgaacaacgggagcaggtacaacatgggcatttacagggatggtaagaagatcagagccggctcccggcaattccctcgtggatttaccgcggattgctcgcctccaatctggcttgtcccctgatccatatcgtgcaaaggatcagtgaaatgttgtggtagtccctggctagtggctagtagtaccttctgctctggcttagatttctccgattctgcatgtttgtgctatagaggcagactagtatctatcaaaagaaaatgtaccttgagttcttgatatggtgcaaacaaaacaatactccatcaatgactttcttttttgtgttgtggatgctccatgcgccttcaccaagtttaatttagtttttttacctagtctgattaggtcacccttgaagtatacttgtcaagtttttgcgcaggtttttagatcttttgagccatctccattctaaggtctcctttggaacataggaattttacaagaattttgaagggaatgaactgtttttagatcttttgagccatctccattctaagatcaactttggaacatagtaggaattttacaagaattttgaagggaatgaactgttatcagttattacatcatgtttgccctttctttctttctttccagcagtaatgggagacagtgttcccagtacaacatgctgaacaaattctgtaaagtacatcagttggcactgcagatttataacgggacacatgtatagtcaatcacacttgacaggattattagaggattattgcctgcctgctctgtgctctccttattagaagctacactctggccatatctcacctctccttggacctgtcataacgcatcctgacgattttgaatttgccagaggttatctgaggaattttattgaacatgtgttgtgtatgtctcattttctaagtgatacatagtagcacacggcgaattagtcatatgctcttaatataaaggagtacaaatgtatcgtacaaaatacactcactacatctcttccaaaaaaactttgggcataacctctcttccaaactgcggcactatccggctctttattggcaggttagagctctcgcgccgctctctctctctctttctctctcacacacacactggcacacaaaactggagaaacgagcacacaacgctctctcgctcacacacacgcgctggcacacaaaactggagaaacgagcacacaatgcaatgcaagaatcaagaatgagcgcgtatatatggtgagatatactacatctcagtgatgctgcgggtctggtcctccggggctgagcctctttgacccggagacgtcgacgtcgccgccgtccgccaccaccggtgccaccgtcgtctgcgccggcatcattgcctccaaggccggatcagtcacggcggcgtccctcccgttgcccagccgccgtgccgccgccgccgccgccgcgtcgacgggcggcgccgtcatcccgaccaccagcagcacgcacgccgcgatcacggccacaacgacgccgacacgcctcgccataagtaaatcaagtgctaggcgctacagttagcttaatttcaactgcttaactacgtcgtcaggtgcgtgtgtgcgacgtcgacggcttagctagcgagcgagctactgtgtctgtgtgtaggtacgtaggcgtgtacgtcgatggatgtatgctagcctcgacgacgagctttatataggagatgatatcaggctagtgattgctcagggcgtacgtgcggtcgctcatcatatcgatcggtcgatgtggcgcgcagacggagccgtagattaacaagccctcttgtgtttaagttaatcagttcttgggatcatcgattccacgtcggttcgccacgggaactatgcctcatacgtcttggaagatctcacagattacaagttaaactggctggtaccattataccaaaagaactctggtgctattcttgtatagttttaaacagcttggtcggaaaggcaggttggatgtggggattcgatgacgcactagacgcttaatttgcgcgatcgtataactgtacctatatcggcatcacaattctctgtataaagtatgactaatgtatggactttgttagttatagtggatcttacgtggtagcaaacgaggggttggctagctggtacagtaccacacgcgggatatattagggaggcagttggttgttgaagaggactgtttgattccaaatacatgtttctttcgctattgttgccatctaatttggactaagcagcaggtagtggcctagagagaatcatggctacccgatgcaaatagcaaaagccgatgcattatctgacggagctggaggaagttttttagtccattagcataattaattgccacaaatagaagaaacagggacaagaggacaggggttggtggtacccagtacaaatgtacaatgtttctctcatattccgaaagggcaaggattacccaaatagcttattattcgtcaaacaaatgataatatacatggtacaggaacaaatattgtgtaaagagaatgctcattagttgtaaatacatcagcggtaattcagcattctatcaaccatactaggtgcaaatgaaaagtcttatcggcaagattccgtcaggaggatttccacaatactagggaacagttcaagcttcaaggaggaaattcagcaatctatgttgtgcaaataacctttgcttttgcaactcacctttagctgaggacatgactgccatagtcttgattgaatttttcgtatctatgtacatgaagatgagcagatggccgtgtattccttagtgcaagctcaatgtcttctgtcgttactggaccaacttcaggcaactctgcaacatttccccccaaaataagtcctactgtatcactgacttcgataatgtgagcagcaggatcattttttgtgcagtgaaattatagcatacttttatgtggcattggaggcgccatggaggaatataaattcttcttttgttgctactgtttctttatacgggttcggttttttcagctactgaatgcaaacatacaagtctacagaacttaaactcactgaagttgtaatgagtactaattactaaacaaagaaaattaagtctataagttccctggtaggcacat

SEQ ID NO: 21546 - DNA, 10334 bp, Oryza sativa
ccttccttcaagaaccgacattaaccttctaaggggttgcattgccgcctccttgcacacaaggcgtatatcagagcctgaatatccttcagttttctccacaagaacatcatatgggatattcattgtgccaggaacagatggcaagagctcttcaaacatggcatgtctagcttcttgctctggtaagggaacaagaatctaattgcaagttaaggatggatttccctttttatgtggaaaaatcaagtgtggtcctatatacaaactccagtatcgcaataagaaaagatacaagaatcgagattgaattctttaacagtttttagtacaaacaataacttcagtaagaagcctatgatgtgtcagttacaactacaaatagatttaaggcaagcattggaaataggcaacatttacaactacaaatagatttaaggcaagcattggaaataggctacataaatgttcatcatcaaacattctctttactacataataagagaatcacttattctcaatctgaaattcaaatcagtagttcctcacataagaaaatgatctttggtattgttacttctggttaaacatatttgagatttgaattttttttcatggtcttcaaggtgcgattgttaccatgattttattagaataggtttataaaatctaataagtttatgagatgttggaagtactttaaaacaaatcaaagcatatcatatttatgtttttgaactaagtttttaaagttcatcgatagtcaaggtttcaaaagtttaaccagattttgtccaaaacatcaagcatttgcggacaaaacaagggagtttacctaatagcaaaactggcaattacggagtagtatttaggagcactcgtgaacaaagaaattacaagatggtttgagaaaaaaggatacacgtttctccaaacggcgcaacattgctgcatccagttcccatggcaaatttgtggcggctagaacaaaaacgagatcatctgtcttagttaacccatccatctgcagcaacaaattatcagaattcatgactgcttttatcaccatgtgaatgaaatcacacaagttcaggattattatacatatcaatttatgaaaggtttcatatactaacagaatcctgtatgttgagaaccaccaagggtcttccggctagctccacaagatggtgggctagacgacctgggttcgaagcctcaccccttctagttatttgatattagatccttccctaatattcgcgtcctttttaacagaatcccatatgctgagatatatgatatctaaagagtttgttctttgttaattttcctccatagggttatgttcacaatttagggctgagaaactcatactacttatgaagcagtgaaagtttcagcataatcactttacaaagcctcaagaatgctacctgtattaatagctcagtcttcaatcgccgactggcttcatgttcactacgagcttcaccacgttggctaataatagcatcaatctcatcgagaaaaatggtggatggtgcatgatgccttgcaagctcaaataagactttcactagtttctccgaatcacctgcaccgttgtaactattaggtagggaaaacttactaaaatatcgatagaaatggagcaaggacagaatatcatgtatggtaaggatgtgagttagaagttataagttcgatctagtcaggtacaggttcatccatccgttattaatagcaagaaggaattatatagttccacatatctgttcttccaaattgatgaatgaaaaggatgaggtgattgttccacaaaggttagtgctgttggatatacaatgttccacaaaatgtacaggcggagtgagggtggcagaggagtattaggctagtaggctctggtgcaaatagggagccagtggtcagtgggcagtggccaacaatggctatggaagccctacaccattgggtgccataacatggtatgcaagggtgaaggagaagatttgatggtttcattaagtccaaaagaaatgtggcatatgctaggatccatagaatactgtcatgcacaacagtgattattgatatttttcaagctgctagtacatgaggccaaaagataactgcctgttaggggaatatagaaagaaggaaatgaaaaaaaaaaaaagaattatgaatgtttcagtcctattggtggcgcttaagtgagtttaaggatacagttgagtagtatcaatgaatagttaactgtggacctctttagtgctggagaaacatgtattaactttataaaacttggaagagtaaatactatccaatgtaaatctatagaaatttgctaatacggattgctttaaaaaatatataaagagcagatagaaacacaaaaaaatagtgcatgcatgtatcacatatctacatgattagttggtcatacaagcaatacaacatgacaagaagtagaaactacaacaacaatagcattaaaagggaaacaatgcaaatgcatctcagaacgcaagcaaaagtaatgccataccacgccatttactgacaattgatgaggctgaaatattgaagaaggttgttttgcactcagtagccacagcttttgctagcattgtctgaaacaaaatatatcaaaacagttacatcaagcatacatgatcagcaatttgagttcgtatagcacgacaagcaacatatggaatggaaacggagttggtatgaagggaaacgtatgcaaacaagtacataaacaaatgcaatagactagtggaacgttctgtagcacaaaagacaaaagaagcaagggaaaacataacagaccagccacagcttattgtaggtgctaactatatagttatatgtgtaaaataatttaattatctatgatctttgacagataaatgctgaggtaaatctactatctttaacagacaaatgctgaggtgaatcccagtagagtatttcaaatggcgattgatgttttttttaatacaaggcagcaataatataaaacaaagatacttcaccaaataattcaaccactatagtccatgatgaaatgtaacatattttaggacagggagaacatagattcattgttatgccaaaaaaataatcttacaatatacaagaaaagttccttgctaagcatctaaatagtacaaagataacaatatagtcttagcatatacactatacaactaaaatgcaatgatctttgtaaggtgcaaacctttcctgttcctggtggaccaaaaagcaatatacctttccaaggtgatagcagacctttgaagtacctacagttcaaaaagaaaataattgagaaccaatggtaggtccaaaatactgatttctaacacaagttatagaagccatcagataagctaatttgggagttttttcctgaatctaattagcaaaaaacgatatagaaagcatgcggtgtaacaactagcaaaacgaatatacaggttagataaataattgcctgactggtaaagattctacatctaacaaaaaactttcttcagaagataccaaaaacacacacatggggcattgtaccatcaaactgaaagagttaaagtaaatggtatgcgacatattatcatgaataacagtggttgcttaaatgcaatcttagggagatctgatctgaccttttaaatatgcaaacatgaccatgcagatatgtgaagcatcaccaatcacaaaattcgatgcaagaatgcaacattcttttgagccacgaatgtcaggtatgaaaatattttccagacatgttaaacgacaaagttacttgttcaaaagtgtttagatagttcgtctgcctatgctatacgttgatgaaaggaagttaggaagagacacatcttcttggtattgcaggtcatatcaagaattttgagattctataagcagaaaagagttaggcttaatagattcgtctcgcagtttacaggcggaatctgtaatttgttttgttattagtctacgtttaatacttcaaatgtgtgtccgtatacttcaaaaaaaaatttgaaaaggaactaaacacggcctatgttgtgagcatatatcatatatattatttctgtgagaagacagaaacctacttggggtattttataggcatcacaactgcttctttcagaagacgctttgcattctccaaacctttaatgctttcccatttgacatctggactcccacgaatgatatccctattggcattacaccaagaaggtatggttataagtctgtatacattacagtaccaaatagataagtctggccacatttaccaaaaggcagtgttacctcaacaatgtctcagctaaattgcgcatttctgcagattcaaaagaaggaagtagggatttctgcctgcaaagatcttaagtcagttatcacaaagatacatgtgtaatatacatgataggtgaaagaaaggaatgggctggggagttttattgtgtgactggacaatacaatattacttcagaattatggttgaacaggggaaaatatagctggaaacttcctttgaatatagtaggtactgttaggaataaccagatatctaattgacattaaagcgataagttccagcaattttgttgtactataaactaatagcatcactaaaaatgaaaaaactaatgtttacatttgagatacttatagcaaatactattttccatagtatatgccagacataaaactgcttaaaatgcatgcatgcagacaactatagcaacaaaatcatcataaggttgctatttctaaggtttggacaactgaaatacaatgcatggttttgatcccatattagctaatgcccaaatcaggatcggatcaaccactttggtcacaattaaatttcatcccgccaacgaaggagctaacaattttacaccagacaaaaaccaaataacttcagaggaagttttcacaattcagatagaaaaaatgcagtcaaactggatgtactatactccatagaaagcaacgagtcttacggaggcccagcttcaattgctccattccgcagctccaccttcctctcctggcaccaaaacagagaaggcaaaaaaaatcacaaaatcatccctgaagcagtaacaacttatcatccagagcagaggggggatatagagagagaagggcggacgcaccagccgctcgaactgctcgaagacggccaggtcggcgccgccgttggcgtgcgccgcggaggggcgggtgctgcccgcggagccggatccaagcggcgcgtagccgcgacctccgccgccgtcgccgtcgccgtcttcatctcccccgggctcgcggcggatgccgaggcgcacctcgtagtagacctcgaagtcctgcgcacgcgaaacggacacgatctcagcacgcgcgacagcgacgaagggtgaaaaagggaacaggacagcggggaggagaggagaggaatcgaatcaaacagaaagccaaagggagagagtggtgcggagtcaggtcacctcgaaggtccagcgggtgatggacggctcgtcggcgccggtcatggcgatcggattcgatcgcccgcgcacgcccgcacgcgcgcgcgcacgcgcggcgcgagagctctcctcctccgcgccgcggttgcggtgcggggcaagcggacgagctggcgatgtgaggaggagcggaggcgctgagttggagttggacttgctacaactgctaggaggagaggggggtagtcgctaccggggacaggcgggcgaatctgcgctgattttgcaccgggcggggacctccccacttgaggctgacaccgtgggcagggcgacccgctaccgaccacgtgggcagggcccgcgtgtcagtgatgctacctgcagtggtgcggctatagctgtagctacagtgctactactgttgaagcaagtacagtactactatgataaactcttaatcgcttgctatgtataaacagaacaactaaagatgagattagacttattattatattactaccaatctaaactactaaaataggtaaaatcaacccatccatactagtactatatttttatattttaaaatgaagatagtaaacgactatatgaagaaaagtgagatgccgctcttcatacaagagggaagagggaagatgagagaataagagagtattgcagatttgcattttgcagtaatggattagaagctagtttactagtactagagatttgtaaactttaaaattgatgagtggatggtgtggataaaattagaggttagctataacctccgtagttaaacttgtttaaaatgctcattgtactgtttgaaccaagtgctactagtagtagcactcctgtttaaactttaaagagtacaagtgaatgaatgcacgagtcgttagttccaaggttgacatagcagcttcagaatattccagcgagagagatgttccaggccttcgctgagttgcagggaagaatggtcgttttctgtttaatttaatactccttccgttttttaatagatgacgtcgttgactttttctcacatgtttaactattcatcttattcaaaaattttatgcaaatgtataagatataaatcacactttaggtactatgagtgataaaacactcgtagcaaaataaattataattacgtaaattttttgaatgagacgaatggtcaaacatgtgagaaaaagtcaacggcgtcatctattaaaaaacggaggtagtatttatgggaaaactggaaccatgctattataattttgcaaaatttaagatatgtcatcctgaatcatatgtcattgactcacatgggtcctacgtgttattgagataccgatagcatatctcaaactttacaaaattataatggcatggttccaatttacccgataaagccacgtttgcagcatgcgcagacaggcgttcgcttcgtgaaggctccgctgcgtgctcacaggctcacagccatccacggttccaatcatttgcgagtgcgtgagcccgtgggcgaccccgtagcttattcccgtcaacatcatcaaattcgcaagccaaagaaactgaaatggtccagctaatggctgctttggatgaccggggcatgaagtacgctgtttggaattttgacgagcagcaattaaggtcaaaatcccctcaaataaaaatcaaaccacaaaggccagaaaaaatataagagaacaataccatgttgcacttatgttcgccgaactgatactgaaaaagaaaaaacaaaacaaaggggcacctgcgacagcacatacagtacatctgccaaatcgaaacgcacgtttggaaggcgtatacgcttatatatgcagttgacaagctacaggcatacaagtacggtagtactttgccaacaaagtggcaagacgatgccacaagtcgacgacaaccgcaaccgattttgccaaatcgtcccgtcaggcttcgtcggaacgatctcccatttcccaggtaacagaaactagagggtacaaagtgcagccacacgaacaaagatccaatttcaacaatttaagttttccaacataaagtaataaatatattggaggagcaccaagttctaccacagatactgattagtcaagggtgccctagggtaaagggaaccaaccacatgtatacagacaaataattcaagcggtagtcatttaaactcccttccactgccaatatctccagtttgttcttatcaagcaaatggcatttgattaaggctaaagcatgacgggttattacatcacgagaggcattgggttttatgcaccgctggcatacaggcgagtccactcctttgctgcaaatgccagaccatcgcttatcaggcaaccaataaaatcagagtgtgaggggagacactgttaactggattgctagcttcaatttacctgtttcaacagcttctgcttcattggctttccagtgctttgcaatgttatcagagagaggatcatcagggtttggtgcacttaggagtgcctggatactgaaaaaaaagagtgttgtcacaaggtaagtatagcaaagtgatacccctaacttccaatagttgacaatgctcaagagtttttgttggaaaaacacatcaagggcagtgataaaattactaaatgcaggtaagctaacaaataattcaaattcaacagaaatcatgtcaatcgtaataagacaacagcttagcagacaaggaatttgtgcaggatataaaaagctaatacacatgtgcaggcaacgggggagagacctcaaaagaactgtccgaatctgaagggctgggctccatttgtccttgagaatgtcaaggcatatcctaccaagctacaaaagtaaacctattaatgaataaacaatgtattacgaagtaaactaaataacaaagaggaatgtgactgcaaaccttgtcaatgttggggtggtatattttggtcaggaacctaacctgcatacgcaacaaagaaaaaatggagactgaggtagacaataatgaattatatagctttacacttagggagactgaagtagacaataatccggtatggttgtataacatatgagtaatatttcttcacccttccaatctatgacattgtcaagccaaacagactaaaaaaataactaatcaaggtataatttggctgaacaccaaacgaacaatgtgatgttaagaacacctttaagaacttgaagcaaaaagacggtcaagagaagcaatggcgtgctgatgctcaggacacagctaaaagttcccacaggaccaaaagtatatcttacaaccttggtccttggcacaggatctcattgcaaattacatctcaaataggcagggtttgcattatccctaaaaggaaatcaagcaaatgtaacaaaactattaccaacaagacatcacatataacatataaaaccaacgatggttccagagcgacacgattaaatatgggtaactaaaaattaggctataaagaataaaaatttttttttgccaaagaatggttcaaacaaattaaatgtttcagctactttcctgtatttggttatatgcatgagtccaatgtcaccaaattaatgctccgcttcacaacacaagtcaatgaatgcagaaatgtcctgacttttaatatgagtatataaccacacgcaattctaaatacgacataattagcttgaaggtatacagtccccataatatcatataaaacataaccaaagtttatctatgtcttgttacctttggagcagccataggatattcctcaggtaaaaagagttcaagcttaaaaactccacctgatagaaagaacaatatcaggaagccaaatgataatagaataaaccatctaaagctactaactgttaacacccattatatatccaacccgaattaacgcaaaaagggtttaagaaaggaaatatttaaattatacaccacaacatgaaaagccaacaatatcaatactcataattagtctaatcaaataaatcgaagagatcaatttggttatggaaaatcaagggcaacctttgccgcacaaagcatcaaacaagttaacacataaaagaaaagcacttataagtcacgtatataatccgagtttagaacattattgctaaaagtcactagtgttttagcattactaacttcatactagaaagggaatatgagacacatagaacatgcaagtgcccgccgcccgagaaactaaaactggtaagtgcaaaagaaccagcctaatcaagcaaaagcaggcttacgaaatgcgtgcccgtccatgactgacacataattaacacttctagtaattgggtttatacagaatcacccaattctgcggtatacctagaaacgccctaatcgaccaccctctacaacaaataacatatccatcgggagccgtaacaccctctacaacaaataacgtatccatcgggtgccgtaccttcatagggggactgtgccgggccaaggatcatgacgttgaagtagcgcatgttctcctccgacggagacgcgctgattcccggcgctgcacaaacaaaccaacccaaaaccatcagaacaacacgaacccaaaccacggaaaaacacaacaccatcgccaaaatccgcgatacataaaaaaaaaaaaaaccgcccgcacctggctcgctgaggagtcgctgcgtctcctgcgcagatccaaaccagacgcgaacacacagacagcaaaaacaaaaaatcagcacagaaaggggaaaataaaaaaaaaagaaaagaaaaggggggaa

SEQ ID NO: 21547 - DNA, 5034 bp, Oryza sativa
cttctgctactagtgcggtgcctgagcgttatcccagccgtgcgatgggatcatgaacggccgagattaatccctggggattatttgtgggactttagggcaaagataagcacgccctcagcctcaaaaatatctaaagtataatttgctagtgacaaggatgaaaggtgcagttattactactagagatacagtagggtttttttttttaatacacgacaaacacacatgcgcacacacccaataccaacacttacactttatgaatgtgcccaacggaaccagaaatacatctttgatctcataaaaattatgttgaaagatcacctacttgtacataataatatatgttaatcataaataaaatattgaattataggtagcacattttttagaactaaattttttttctcggggatgagattcgtcggttcattgaataaagtcacttaagaaatatctttagcatctcgccgaagtgggcaaggaagaggcagatggagagaacttactagctagggattgtggatgcatcttctacaccactttaactgtgacgaacattaagtgcaaaccaaaccatctttattgaatcagcaatggttgggtttagaaggagactagcataactatgtctcaagttaggcgagagagaatgagggcgatcataagggtataaaataggaactcaagttgattaggaagatgggtgattagtggggtacagaggtgaggaacatggtatcgtaacagagagaggagtggtgaatcaaagagggagcgataaaggatatataagggttaaggggcataagtagcagaaaaaggcttatccactggatctcttcccggatacccaaaaggaacctccctctcacaaataaagaagacaccattgctcaagaaggagaacaaattacatgaagcacttgtaaactagatgttattacaatattgagagagggagggagaatatctcccaccaaacactaatactctctaaaatcttttacataggtgtgcttctccgtcaatataaattaaaccttttatctctttgtaataaaaaaaaccccaaaatcagcttaaccatatctacttttctcaagctacttcatgtgcttttagcaacaatgtgctatggttagagagcgcgcaacatgctaatcacaaaaattaaaggtatcaagatttctttttaaatatagaagtttatctcatttcttgtggattgaactaattcatgtgaaaaaaaaactataacttcattcgtccccttacaaaatctaattgaactattccatgtgaaatcatgggttcctatggagaccttaatatatgttatatttaaattaaggtgaaaaacttaagaattccttaggacatgtgcaaagtgaggtgataagggaggtgtaattaagaagttttcggtatctctagatctagagccaaacattgtgcagggtgaagctaacatgaaaaatcttggaactaaagcatgtccaaatgttgatcttaattaacaaatacgtaagggcacctcatgtcaactcggaaacaagcacagtgacggtgggtgttgtactttctggttctatttaacataacaccatacttttgaaaaggaggttaaacacaataagaacatttgataacctatgtgactatatgagtgagattaaaaaggttatagcccctcacctcctcttatgttggtaaaaaaatttccatgtcttatattgtatgcggcattgtaaatcaatgtatgagattaatccccgcaaaaaaatgtatgagattaataatattaccagacttttttttatgagggaatagaataagggtgtatttgagaggaggggaaaaggggaaaattgagattatacgtaaaacaaggtgagctattagcatataattagttaagtattaatcattttaaatttaaagaatggattagtaggatatttaaaggaaattttctatagttttttttaaaaaaacacacaccacttaacttaacagttcaaaaggcgtgcgtatgaaaagggataatttttcttcctcttgtgcatgcttctctgaaacacagcttaaaattatatatactccaacccataagaaattacaaataaatccatttcttgccggaagttacattgaaagattataaggaagaatctaataaatgggtccttgccattgctgaagaagctgccggttgaaagcaactatggttgggcctccttgctggctgtggccagaggtggagaatggccgtgcctagaacaaattcaccatcgaagatggaaaaaaaacgtgcgagatgttgctctaccacttttgcagtacgagatcgaggaatacaacttgagtcaaatcaaatcaagtggtagtagctcaaaaggtagctaaacatgaacgctcagcaaagttcgtgaaatttgctaagttaattaattagttcgctacttgtttgggagtacttttcagaaacaatttgcccacttccagctgcattggtcaactactccagaaaagttcatgccttttttcatcaaacttgtggtagatggacaagaatctggcaaagaaaaaaaaagaactactatcatttagtaggagtagtatgattctttgccagaggaaagacctggccttaatcctacgctatctctctcctcctctctctcatctgacgtcaaccattgcgtcatttcggttcaacggcgcacgatctttaatttctccccaatttcctttccttggggaggtagagaatcacacccagaagctcacgcaatccaacctccgcgacagcaacaaatcaggcttaacttggaacaataatccaaggaattagaaagataaggttcttttcgtggctactgatagtctgatactactacatcgagtgcagtatagtagtatactaacccggctatcagcaacacaatctatccaaccactgtttccacgtatgcttttgtttattgggacggcaacatacgtaagtgagtaggatttgataaatcctttgcagtctgtcagatttgattaagcgagagtttgactagtcgattcctggttcaccaaccggctaggtaattttactactggagataaaatgataatgttttgtgtcattggcatcgaaatgaatcgggagcgaatgttcctcctgttccgggtaggaaaaggtcaaggtcagtgcctaattgttcgcctaatcttgcagaacgcatatcaaatattacaaaccttagattaaatttgggaggaatttctgttcgagttcatcttcgaccggtgtattgtcctgtaatgtaattattatagggttgcaatcaaagcatctgggtgcattctagaagttgagatcagtgtcagtccttaatactttgtccgacaaacgacaagtgccagcttttcctcatagagaggcctgatgatgtaggaaagccaactgatagacttgagttgactttacacacacaaaaaggaggaggaatattaatctgatggcgctttatactactattacattaggcgcaaattactgctgctactaaataccacggctttaacgagacagcaacccgtctgcatgattggagtacatgccttgctgcagcctgcatgggtggcgacctaacctggaccgacgcgtcacttcggggcttcaccctgtcggctctcgcggtctcacccgtactactggctacacgaacccaacccacagtgctccgcctgacggtacggtgcgtgcccccattcgctgcacttgcccatgcatatgcttgtctcgcagcgcagctagcagctagctttgctcacgttgtgcacggcgttttttttttctttccatgacctaatcaacgaaacgacgcctcggcttgaagattgatttctggcatgttgtgcacgtttcgccgctgaccttgagccgcttggttgccgagaaaccacagctcgatcgatcgatcgatcgattttgggggaaatggggatggaaatctgtcgatctgataggttccatcactcttggccatagaattatcttttctcgtcgtcgcgctcacggagattgctctcccgtatcttcacgtagcagcggacgcgcgcgcacacggcagaaaatctccatcttgagatttaagaataagatcgataggctcacagtgacactcaattccgatcccttcgttcggaggtttgacccgatatataataattagacagtgtatcattcctgagtatccttccaactttattaccaagtgtttcgagtctgttccacacaagaatcattaaccaatcgccacagaggccgatcgatctatccagctttccagctgctatccgttcgaaaaagcttcagaaaagtcaaacgacaagaagggcaataaaaaaaaaagggtttcagggtcaacacgactgagagtggagttcattggctgtgaatgaaacaaacaatcgggtcactttgtgctgcaaaatcttgaggccacatgaggccacgtttcccagcatttccacatgattttccggtggatatatattgcgccacccccatgctccatctctccccctcctatccatctccacaggattttaagcgactaatttaatttgattatagttaagtttagttaattattgctgatctgaaaaaaaaaagtacacacagagtcgtagagggagaagtaaaagcgagtgggatggccgtctcttccgctatataaagggtcgcttcgcccaaccaaccccctcctcccccgcgcatccatggcgaacctcccctccaccgccgccgccgccgccgcagacgcctccgggttcaagctcttcgggaaggtgatccagcccgacggacagcggggcgtggaagagagcgcggcggcgcaggcgccacctcatccgcatccgcctgcgccgccggtgatggaggcggcggcggcggcggcggggacgtcgcagactctgcaggcggcgggcggtggcggtggcggaggagggggaggagggggagagccg

SEQ ID NO: 21548 - DNA, 2899 bp, Oryza sativa
agttctgctacttcaacaactacaacgtgcggcagccgcgccacctctgccgctcctgccgccgctactggacggccggcggcgcgctccgccgcgtcgcctcggcgtccccgggaaggcgcaggccccgccccagcgccgcccgatcggccgccgccgccgccgcctccgcctccgcggcgtctccccccgccgccgtccccgccgcctccgagggggcggagagcgttgactcgcggtcgtaggcgtgggcgcggcgtggctccggctcgcctcgaggcttcctcctcacatggcgcgggtgacgtcactcctcccccccccggggggcccacgcgtcggagagtctcctctttccactttttggcatttttctggagggtacgggtaggtttctgtttttcttttttggagataccattttaggattcttttggtggccaaatggatgaggccagcaacgaaagagataagaaaaggaaatttggaaatttgggtgctttcaaaattggtaggcagttcaaatgaatgtactactactactagcagcagcagcaggcctcgaggcaatgagatgatgaatcagagtggcagattgagccgtgatttattgaaatcttcgtcttcttgagttcttttggttgcccatgttttggctctgcaccattcacagttaattactccataagtcattcaatagatcatgtgttcatgtggtacctgtgacaatgctgagagttgctgtagtccgcggcgtgcaataaatggaatgtacggggtaggtgtgtgtacttgacctcttgccaatcatctttttgaacaaatgagagtgtaacagatgtcatggagaattcctgacaaattcatgtgttgcgaaaaaagctgttttatggacatatcttaattctatatgcactacagtagtaatagcatgagggggagaggcaggagtattccaggaggaccaggacaaagggaaaacaacaattcatcttccaaataaatccaaataaagggtaaaacatcatagtaaaaactttatagtgataacagttcagctgttcatgatagtgatgatatggtgctagtttttttaatttgttctccatgtcaaacaataaacatacttcaaagtaattgtctcagattccatgtgcagtggttgtgattgtctttaacatgccacttttaaacaagtaggcactggtgcaggtgcgtttttcacacagtacacggagcaatgtgataaaggtcatatatgtactcccctcattccagttaagtacttcaaaagagtctccagttcatgaaaaagaaaagtttccataggattccccaagcttactgaattgtgacttttaaaacagctgtattgacagcctgtgttattcgcattcagaattggtcccgagtcctgaccatatatactgttaaatttaagatcaaccataaaattcggtggtcactgtgctaaaagtttagaggtgtacatgatttttgatgatttacgtgtaatgttggatgaagttgactacatacctatgtacaaactttctattgtgcagctataataaaatttggatcaagattcagatggtatactcgctcctcaatgactgagtgtgcatcttatcttggtaacatccccagatcagattcttataaaaccttggcctgtaaaaaatagtaacaacttgatcaggattagacagacagaaggtacttcacttcaaaaggtgtacaatcatatgcgcacttaaagaaattctgcttcaaaggtacgatatgcgtaaatcttttaaatttattcaacagtcagaatcacatgcatcagttgtaagtacattcatagcaatttaaaaccactgttgacagcaaaagatatgtcatcattctgaattggtgtctactccttcaagtctatggttatgcggcttcaaaggcaccgtgaggacttattactttctcaatggtcacttggacgtaagtacatgcatcggctgcaagcatactcatagctacttaaaaactattgttgacctgacacaggcaactattactactgtgttgaagaaaggataaaagcttgcacctcagtatctccgtgacctatcttcctcagggcaactacctttaattctattcaccagaactatgttcaagattcacgattcccaactgcaggtatagattcttgaattgcctgagcaaatgttgcaatcttgtaggtgaaaaacccaacaagcatgggtatcaattccaggtgcatgaagccataatctggaactaaaatcctgcatcagaccagcaagcacaggtatacatgtaagaaaaccatacgttctactatttgaatattcaaacatcaaaagtttaataaaatttcatctacttactcattccatcggttatacatcatcacaagtgccactggaataagcagtcttggttgggcagcagcactcctgtaagcatgcaagaataaaataagatgcatgtgagcatattttaaaagttgcctagcatttgctgaacatcggtcacattccgttgtaaaatttttaaagaaaagatagaggtgaccaacataattgaagggcattgtataatacatgggaggggaatgttcagatgatgaagttttatcattttagatttctttcaagataaacccctaagcgagatataccaaactaaacgagttctacaagaccttgaattaataaactgcagtgctataaaatattaaaatgagatcacaaagccttagtagctgagccaaactaaaccaattatgagaagaagtctactcaagtgttttatctttttcttttctcaaataccactcaagtgtttatccacaagaccacaaataccaattgaaaaacaacataatgaa

SEQ ID NO: 21549 - DNA, 2137 bp, Oryza sativa
ctttgtttcaactgcaaaacatcccactctgcttagtaaagaccaatagataagctacatatatttgattctcaaggtacatgtcactgattttggacaatggagttcctcaagtgtctgaaagaacgatacccaaacaaacaactagaaagaagagtgatatacctctagatattgctcccttgatttagctgccaatacctcagggtctccttgctgccctcttgactttgattcccttagtatgacatcctaaagggggacaaaagaacatagaccaaaactatgaagtaccattatatgcatgctaaaaaaagagagaaacagttaaaagactatcacatgtagtatatctcaaaaaatacctacatttaccaataaatcagtgacaagattacagtgacttacactgccaccagttgctgccttagctgctcggtcccactttgcttgttcccggcgagtcggaactagcctccatctaggagacgcaacaccgttgacagcctacgtacgaaatccacaaaccatagcttagcaccatctctggtacaccataacaaagggaagatatttgaacaatgagatcacaggctgtcacctcagctccaatggcccgccccctccaggcagcctcaacctgggttttcaagattggcctggttggcgcctgaagctccttgctcagatcaacatccacactgcaatagaaaccacaggtcactaaacagtcgcaacaccaaatgtgagcagagaattcgataggagggtgaggtgaaagagtaacctgtcgaggctcattgcgcggttgatgcttaggaaccctgattccgagtcctcatccacctgctcaaacgatttgctactttagaaacaatagaccagcatccagtgcaggcaaaattctacgctcgatttggaatttcgaaacaaacgatgccacggatgcaactagttcagtcactagatcggagcagataggcacaatcatacgcgcgcgattagagatgagtgaggtctggggcttcgtcgtaccggggtgaggcgggtgatggtggggggcgtgtctgcgccgccgttggcgatgacgcgctccatgtgtgggaggaagtccttgttccagatgaagtcgtcggtgttgcccacggggtcgcggtcctccttccccatccagtacttgcgcggcttgggcgtcgccggcccgccgccgtactccccgggcgccatccccgtcgaccacttctgcggcttcttcttcggcagtatcaccttcaccggcctccgccccgccggctgatccgccgccgcagcagcagccgcctcccccgaggccgccgaggcgcgcggcggccgcacggaggcggcgcggccggcggcgagggcgggcagcgacatggcgcgcgaaaatatctctcgcgcggtggggagcggagagtggagagagtgatccgggaaggatacggacgggtgaacgggagagagacacacctcgtggcgtcgcgagctgcgtctcagtttattatatacgcgaacggttgcgttctgagctccgaatcgcgccgaattggagtttaaattggagcagttttgtatagttgagtttaaatttgaggcggttttgtaaaattgagtcagtggaactctggaactaaaaataataaaaagcgataattgccacttgtcttccctgtagaggggtataccaacgtatacaacaaggaacacaagatattatgaaatgcctttcttttcttctcgcagcgtaaaatactccacagctttcaaatatctcatgttcatagagatccatgaaagagcagaaagcagcacacactaccgtgctatttacacactgcggcaccggcagtaacagctaacaggttacaagtaacaacgctttctattggtaaaaaaaagagacggcttaaacagatattcatgctattccaaaaaatatttccgatggtggtccgtatggacacggtttgtcatgctattccaaaaaaaaaaattacttgccaatggtatggactcctgtcagatcacctcagatttgcatactgggcatgaaatcctcatccgaagccatttgtcaatgcactgtggaagagaaggcagatattcagagaagatgcca

SEQ ID NO: 21550 - DNA, 6071 bp, Oryza sativa
tagtcagaatacatatacatcagcatagtaacagcttcagtaaaagaagcaaaattttaggagagcaccatccagccatccctattgcaagacatatgggtcaagccacgttagtgttaacctaattgtactttcacattatgaagcactaagaatgtaataccaagtgcatagcatatgatgatatgaatattttataccaaaaggcaggagtaagctcgcaactatgacaaatttattgcctggtggcgaaaatgtcatcagaaaagcattgttataaaaaagctaagtacttactcatcagattctgacataaattcctctccgaagtttccaaatgcttcttcgagtgaatccagtattgccatgcgctgcatatttttcaaaaagaaaaaatgtttgctgtaacacaagtgttccaatgtattgacccatcagaagaaaaaaggagttgcttcaatatcgtataaggggcattaaataaagtgttttgcttctataataaacctatctggattgataagatgaatgccaaaaacacataggagcacttttggtgttaatgcctgtgcataatggaaaaacacaagggaatgataacatggcggaatgctaatcaactaggtaaaaaaagccccttgatactccaacatagccatatcatagattagagagtaatgaccaaccgtttctagatccatgttttcatctctgaagcatcctctagtcaattgggagataagcatctgagaataagcaaatgtgagtgcacaagtgaaggttgaagaaataaatttataaggattcacacattctgttgctctctgtcagggcggttgaagcttctttgcgaaccccttctgcttggaattggagtcagaacattgatactgtgaactggtgagtgccggccaaatgaatacaagtgtgccattgaacggtccctttggctctgagaagaacaatattacacctcttaataaagaaatgattggatgaagcttcagataaataatggaagtaattaagacatgggatgccatagcccaataggccaccataagcacaagatagaaatacaagtaaagaatataagattacgaacaacagttgataatcaagtgtttttggtcttatgttttatcaagaacaacagtggataattaagtgcttttggtcttaagttttgctatctgaatttgttttacacaccattgctacgttttttatgcttgcagacagatatgattgtcatgcctttttatctcaatgtttaattagcaagaagtaattggcacttgcagctaatttacttgcaaggcgccaagtttctcaatgaaaataagcgtggtagctgtagttttcaataatgtcagacatggttatcacttattaggatcaacataatagtcataactgaaaccatggcattattcataaagatgaaaacaaaattgttgcaggccataggtgattttcacaacggatgcatcaagccacaatgacaacttacagagctagattggccctctctgacagcatttctagcgtgttccacatcttcctcttgcaatgtccaggctagtgttgtatcaacctgccagattccaggaataagcgagtttttaaaaatgagaagaaaaattcaacattcacaagatggccaactgaagattgggtggggaggttaaaccactcgtgaccaggcaattggcatattctcaaagtaataagtccgtcatttcttaagttagtactgaataatcagaagaaaccacaatcatcacgtagagacaacaaaaccaactactcctataacaaacaaatgatttaaattggcaccaggatagcaagattgagaagtaaccatgagtaacaacctcttctaagttttgcgagcctggctgctccttgtttaactgctcctgaagcctgcgtgcaaactcctcatcggattcaatttgtctggttcttaactgattctcatcaagaagtgggtagttgagccccttgatcctcgatagccatgtggagctaccatcttccatggaaacatcaccagctccagtaacttcattagtggctacagagcttggttcatgcattggaacctcatcttctctcttgccattgtcccgcgaatgcgacagtttgtcgacagcaggatcagcgggcctcgcaccaagaatccccttccacttgtcatccggcgtgccggaaccactgtgaagcagcccgtgctgtccatgtccctcctgcaaccccttgctgtctgattcatcctgaggcgcggagattgatccgccatttcccccatctccaggcttgctttcgcctcccgctcccaatgtacagccacgggagccgatcaaaggatcaacaggcgccgacaccgctctctccagcatctccccctcgccgaccttctccttgcccttcttcacttcctggctcggcggcggatgcggatgcggatgccgatgcagcagcctcgccatcctctcccgctcgaggaagctctccgactcggttcttggatccgcctcgcaggcagcgcgcttccgatcgggcgagtgcacgcgcgcctcgtcctcttcctcggactcggagtcggacgagaccagatcaaccacctccattccctgcaaacaaacaaacaaaaaagagaaaacattcaagcacagccatgacgaggggaacatgccagtgagatcagcagcatcatccaatccaataatcattttatttattattcgaggtacttaaaaccgaagtaaaatgagggatttgaattgacacgtacacccgcgacctcctctttcctcccctcctccccgcttttccctcgctcgcccgtgcacaccccacccctcgcgctgccgcgtcgccggccgccgacccgcccctgctcgccgcggcccaggtcgccgaccgcctctgctttattgcgccgtcggggtacgtgtcgctccttcgcgtctcgctcgcggaggaatctggggatgggggcggcgtgagagaggggttcctctccggtggaagccggggggagacgtggcagagagggaggaggaaaaatagaagggagcaacagaagcgttagaggcagggccaagggaggcccagaaaaccggggacaaagaggaagaagggtattacggactattcacttcgagatttcgtacttagaaataaaagagaaaatggaaatacgtgaataatggtagggcctacaattttcatacaacatagtactccctgtgtaaacaaaaggccaactgataaggatgaaacatattgcatttttttaacaaaggagcgtggagacatgtgaatggaaaaaaaacgcaaatagtttgtcggaaagaaaattttgattttaattcctcatttctctagcaagaaaaggagagaaggtaatattattttgccaatctaggcaaaatttagtaggctaccataactgatggagaaataatcatcggaagagggtgtcgtgttttaaagggactagagatcataaagagagaaaatgttcttgaacttgagatgaatgagtttggctcgaaaaaataatgaagaaggattatatataggtgagggaggaaggacagacatgcaaaaattgtactaatattatttccttctaataattagattatctcacctttgccttttggaggttttgttttctcgaaatagctattgtgcgcctcatttgtggcaacagtggcgattagcctccttgatggatgaggatggtgattcttcttctccttctctagtgatagcaataggcggtgatgaatctaacaagctaaaatttttatgttggagttaaaagaaacatagattaggcgtttggaggaacgactaaggtagcatgccaccggtaatgttgttgaatccgtcgggaaaaatggtgggacaaggcaaggcaacaaattcaaaggtataccatggtggtgagacaagaacaatgatattatagagataaacggtgcaaaagaaaacaggaagaaagaaaaggcacaagaaaagatgtggtcaagtgttgacgaattgtgttgcactagagcaacaacaaaacaatggtaagaagaatcgccacaatggtgggggtaggtggagtggtggctagggtttgagaagaagggaaggggatcgattttatatggattgtggggttagaagagtcaccgcaatagctaggagagggagtggcggctagggtttgttgggaaaaggaaggcatgattaaaggggatcaattttatatggattatggtgaagatgttttcacataattaaaatttaaaatatttaaacttattcaatttaaacttacggatgtccgtaaatttaaaaaattaaatgcatatatgattatagtattttcataatcttataaacttattttaatataaaacaaagtaatacctcaaggatcataaatcacaaattcgagtcttatccccaataggaattaggattttgtgaatggataaggggatagttatccatccaaatgtaatataacttagtcctatgaatctagacatatatctcatgcagtcttagttactactccctccgtactcgtaaaaaaagtcgttttggacaatgtttaaatcaaaccttgggaatataaatcgtgaataactctcaagttgttaagtttgaaaatgaaaaattatatgaatagatttgtcttgaaaaatacttttataaaagtatacatatatcacgtttcaataaatattgttatagaaacaacaagtcaaaattgtgttttggagacagtgtcgctgtccaaaacgatttcctttacgagtacagagggagtatattttagaatagagtgaataatgcactaaattaataatgttagtttcttggacttggttattgtttaatactcagtttcaactttcaacacaccgttcaaaattggcttcctaccaacatggatttttaacactttggccctttatgaaaaattatttcacaaatagaaccacggataaacttgttcaaggaattatcctttttctaggcactagtgaccttggtgtcgaggtccaatgtctcagcaccaatgatagcgtcgataggcctggccctaagaagggtcgagctgtgccatcgcactgagccctcgaagtcaaggggcacaaccccatatatatatgctatggatataggagcccataggccataagaacttagatttagaaagcccaggaaagaaagatatataacttgtttgataggaatgtttttttatgcattacatttgttagaaacatcattatattatcagagttatattaaagggcccatctatcgagcttcgctccgggctactaaattgataggaccgggcctgagagccgacatcttcgctccgtagcaacaaagatatagagggatcgtcgccaaagagattggtgtcgaggacccatttaatttttcaaaaagggttcaaaggtaaatatttattcttacaactatgtccttggtgcaaagtacctatgtttgaccatttctagacttcctacgattttgtttacaaataggttctcagtgctaatcattctagtgccaaactccttcatattagcaacttagctatcatggtagacgaggggtgttggcgccagtataattagtgttgagatattaaacattgacaccgagaaaaatagtttatttccaaactgattttttaaagatctgtttatacaagataagttttcaaaaagagttagtaacatgtaaaaaattatatcgtgccgatgcttcgtgactcaacttttgcttgtaaatacggtttcagaaattcagacgggtcatgaacagatatcggacccattttttttcttacttttccatccatccttagaaaaaccaatctgtcccgaaaaaaaaaaaacctacttctaaattgttatattttctaagatggagagagtatgcaaaacacatgggatattaatgctgaacgcagtttattggttacccgcaaattgttaatttcagttatgggttagaacttagaatcaacctga

SEQ ID NO: 21551 - DNA, 2841 bp, Oryza sativa
tgtccatatctaacattttcgttacagacctcaaacagccttcaaagcagtacgtatgtcctttaactattttacatcctctagaattaaacagaagctcatgagagcttgactgtccaaaaaaaagtgtaggtaaaatagcggtcaacactaaacaacaaagtgcaagaaaaagtgctcttgccgggaacacgcaacactagttacacagcatcttttgtgatgcgaactactctagctgattctctccaccaaagagcagctcgcaccgtcagctccatgagcttgactcctactctcctataatcctaatctggtgagtggtgactcctctcctataatcctaggaataatctggaagaacagaaactaatgataatcctaggagtaatctgctctcctataatcctaggagtaatctggaagaacagaagaacagaaacaacgataatcctaggaataatctggaagaacagaaaccaatgattaaacggcagtaggagtacataacactacaagcaactctgacaatcagcagatataatgcataactgcagagttaatcaaaatgacatgcatcctttctcttggatggaactatgaggaaactcaaaatgacaagtttcaatttgatagaacaaaacagattcatgcaacaatcagattttacgatgctcataccagagtttaatatttttttagttattgaactaagtaatgatgaaacttggcttctctttttgcaaaactggaacaatcatactgaaaccagatctcttagtaccatgggtaaaagaacaatggtggtcacctattcaaatacaactaattgatgtgtcgttactacaatatttgccaaaggtagtgaacggtgactggtgactggtgagatatgctatatgataattaatctgagcttgtaagtaatgcacatactgctctagttcaggtcttcaggaatcaggataaacctaacctctaatgccctaactcactcaacaaaggcacaaaacctgttattatgtttatagttcagttataagataaactaacaaaaataattctagaggatgtaaaaaagagcaaataacaaacatcaatgcatattaaatatagctaaaaaagttgaaaatatgaatagccatagaagctaacaagacagataacaatgcagtaccaaactacaaacgcctaaagcaaagccacaatacaccgcaagacacaccaacatatattatacacatataatcaaagttgagaagcacaagtattgttcaagatgatctttaaccagtgaactatctcacagtgcaagtcgagagcataccattagtaattttaattccttacctcagacaattaagcacaaatcctattatgaactgatatgaccgaaatgaaagcaaaacccagaaacaaaaacctagcacaaaagtatagagatgtatggccatctgatcagggctagcccaaaagaaaattcctagcacaaaatacttgaacattaacgagtcacaagtcaaaaatccagaaccataaacatacatagtaagagatcattagagcagatgaatatctaataagaaaacccacttgccggttgccacaaattccaaattggcaaagctaaagcatgaattcaattcgactgtataatagaaaatttatcagatcataagtgcagatgagagatcatattagaatgagtagaagatccctcttgccaatatcaaaatacagccaactagaaaggcgtacagacatcaacatacacataacccagtctgatttagaatggtgaggttgaggcctgcattttatgatgaggtatactccctaatattatagtgtgtatatacggccaagtaattgaagcatgatatgaagaaagctaattgacagttgaatttcaaacttagtaaacctcccaatctgaggagatatcaaccaggcattgccaaatttaagcacgctggaatatctgagacagcttaatataaaggaacagtacccatataggaatcgcatgaaaaatccactacaggcctaatatgaccaccagtccaccacaatataaatctgagaccaaacaaatctttacctaaactcttgttcttaaattatcataggtaagcaggggtgctgaggaacgggagcgcggcgagagacatgagcatctccgtggcaccatcaggatgcttcccgtgctttgcctttgcaagctgaagctgcacgtccacgaaagcctgcatccgcttcagctccagatccttgaggaacttgatcctctgcctctccatctcctccgcgtgcctctgcttagcgaattccatgcgctcgtacatctcggcaaatgtttcgactgccctcgctagctccccgaaccctccgccgccgccgcctcccctcttcctcttgctgctgctgacgccaccaccacctgcacctgcagctgcaacgccaccggaacgagacgacacggaccgcgacgccgactgctgcgagccgtcgtcttcatcgtcctcatagttgttgttcgggttgttgtagccgtcctctgaatcagattccgccgcggccgctgcagccatcttattgaagaggaggcccgcggacgggaggttcgacgcctggcggtagtttggcaaggggagggccacggccggcgtcggtgacggcggcgagggggagcgggagggcgattccaggcgcctccgcatcatggggagcccgcggggcggggacggcttcttggcgctaccgccaccgccggcggcggcggcggcggagagggtagggccgacgagcatgtcgaggtccctgtagaagtaccaggacgag

SEQ ID NO: 21552 - DNA, 5320 bp, Oryza sativa
ggcggacggacgggggcaggtggggttagccggatagatcggtgtgagcggtgagccggtgcggcggtggggaataaaaggaggggggagaggcaggcgggcgagcggcgaggcggcccgtgggccgtgaccgaggcggaggggggcacgtggagacgctggggcggaggcattgggcggccgccgttggatcgaccccccggctcgctcgtgttgaccgtggggggcaacgagccggcggtgggaaaggggtagggggggagttggttgtcgacttgtcgtggacgtcgcgtcggggacggagtccgaattaaaatctcgctcggttgggccggcgcggcgcggcgcgggatgcgtgcgtgcgtgcggcgcggacggacggatcggtggacgacgacgcaccaccgccgggggggggggggggaccgggtgccgtgcgggaggaggactcgtgtcgtggtggcgtggcagaggcggacacggctagccgccgggcggggcggcgcgtgcgtcgcgcctcgtttgggtcgccgtggcggaaagagagaagcgtatgcacagtggagacgcgatgacgtcggccaagtgggtgacaacgagtgctttgtgtttgggtggattttttttttttttgggcgaggtgttttgggtggattttgttggttctcccggttgagacgaagtcatcaagatcctaaaacccagttcagtcgggaacaggaggatttcatgtgaattttgtaaaatttcgtagaaaaaaagtttcaaggggaaaatttcatagaaaatgatttgattcgcatagaggaacataaaaaattttcgcttttcagatatggcctcaaatatattgcgatcctcgtaacatatctctacattcctggcaactttggtatggagcacaggcgataagcagataagcttggatcatcaaaccgtgggtactgtactgagcagtacattcagatcaataataaagtcagaaaacacaggtactctgctcaatttggttgcatctcaaggaagatctcaaatgtcaacttttaccgagtaccccggccaaaactttcagagaaacaaatgatagatccgaggacacgcaacggtcctgatgaagtatgacagcaaaactagtcctgcgattcaaggcatgttcttctataagcggagacacattctttttgtacattcatgaaggttcgcggttatacagccgcaatataagaagtcaatatgtgtaccctcgccggtttgcaaaatccacaggctaatttttacaggttttacaggagaaacttatcggcctctgcaggcaaggagtgagctggttcgtcagcttgacttcagctgacggcatattcgcagtcgagcaagcgggtaaggatctcctgacagctcggccgatcttggggctctgcccaacaatctgcatcaaacaaaagcaaacactttgctaagctataactgaagccgatgcatgttggtgcgacatgactctgaacactggaataccccaattgaaacatctgtcatataaaagcaccattacctgcaattaacttgccaagaggtccttcaggaatctcgagccgtgaaccttcgtttgcaacagtatataccacctacagtggaccaaattcatgaagttcaggcaacaatgccatgtcaaaggaactgtgttggccatatataagtacatcaacaaactggaaacatgatgcatgcaattttttaactgatcatgtcgctagagagaaagattcatcataaacttcagggaatataacttttatcagctatcattcatgatgcaactgttttgatacaaagtggatgggtgcttacttgaactggggagatcccatcccaaggacgactcaatgtgcatagctcccacatgatcacaccaaggctgaaaatatcacatttctctgtaaagggttcgttccttataagctcaggggccatccattctggggtgccagcagaggagttgtcagtcataggactatcagtcatcactcgggaaaggccgaaatcacatatcttgacggtccaatgcttattcaccaggcaatttgcacttttcaggtccctgtgaactatcttcatgcggtgtatgcacatcaaaccccttttaagtaaacaaaacaatttgtcagatgagaatgaatgctaaaggagggctatgagatgatgtccgcacgacaagagaattatatcagaatcttctgaaagtttatatgtaataccagctaataggaatatatagtagtaatagttattgtacaatgagaaagatttaacctgcagatatcacggacaattttcaacctcctacgccaactgagcttctttttctgaccactcatatggatgagatagtacagcgatcccatttccatatattctgttaccattgacaagtgtggtggtaccatgcatgccccaagaaacaatataactacagatatggaatttgctttagaaactcgtgatttatggcatttgcatgatatctagtgcagagctgctgagtattgtagtttgacttaatcaaagtgagtccttaccatttggatgccgcagccggctgaaaggaaattgtgaagttctcaaagttagtgtgcatattatgattaaaaagaaggctgccaataatacagaagcaagcatagtacaggtacctcaggatatatatctcattgcaaaaatcctccatgttttcagttgtcagatcctgctctagaaatactttgatagcaacatcagtgccattccatataccacggaaaacctctccaaagaatcctgatgaagtaatttgacaaggtgacaaaaatgttaaaacatgacaggcaaacaagaaaggaaaattttcataagaaagctttcccaaaataaaagcacacattgaagtatgaaacaacatatcaaatggttcaggcataacatgtttagcatcatccccattaatattcctacattcgtattcataatgcttatcaataccatggatgagtaagctccattaaatggtctaaagaatgatagaatcaaaagttggtgacatcatgatcctcagaaagtaaatcgctgttcaactttgcagttgcggtatccaatatataatttttttgtgttagtaaattttgactgaaccaaacatattcaataaagtgtggatatggaaacaaataacaatagcaagtcatatcttatgggagattgaatttattggatcatttttcaacaccaagtttgatggatctaattcttacaggaagttggtaatagctaaggagaaaataactacccatgttgtgtttagtttttgttcattttgaaaacatgctagaaagagaaagcagcatagcaaaagtagcaacaagatgaagagtcaagaacacaagcatagcaggtaggctgacagtttacaatagacttcggtaactttggctgaggaagttcaagtaacttgcctattccaacccttgtgccaattgttagctcagagaaatctatgttccactcttcaaagggcaataaaggtttattgagaaatggggaactctgcaaaaccttgttccacgccaataccatcttttctttacttacaaaatcacaaggattgattgtttcagaaatttgcgccctatattcatgaggagaagaaggcaatgacatagctttctgagtggaaccatttcggttccttgggccattgttggtagcaacaactcctccagatgtatcatcctaaattgaaatgaaattatgagcaaaataagtcatatttccaactcccaaggaataaagaaccaatatagataagattaaacaatggaatttgcaggaacatacattatttgggcaatcacttgcattgttttggtcctccccaacatacgagggtgaaccttcattaacatggtccctttggaggcgattttgctttagtgtttcattcatagcccgaaccgccctgtcaaagatttaagattgaaacaatgaattcctgatactcattgaggatatctagcaaaatacagacaaatgcttaaggatatctagaatcaaaatacaactaaaagaaaattatcaatatattttggttgaaagcaccaagcgcagctatacaatacaactttgaaaacaatatgccatctcaaatatcgtcaggatagttcaaaataagaattacctcacaatgtcatctccaatctcaggcgtgatgctaatgcttcttccccgtattcttcgagttttagatgttgatgcaccacctagaccatctgatctgcaagtgtgttcttggcttgtcaaatgaataagaaggttcacaaaaagggtaaaagaaactgagttgaaacatgttcaagacaaatgtttgacccatgaaaagggtaagtaagtgttaagtatcaatagcaactcacacgctaagtcattgaaaaatgttattccctgtggtcacaaacatgttgttttggacatgtatgaagtcaatttcaaaactgaatataaatatatttttaaatgttaagattggatgtatgtacatatgcatagatttgtcatgaaaaacattttcataatgttatagttttatcaagtttacaattatattataacaattagtggccaaggttgtactttatacactcttatcaatgtccaaaatatcagttacacatccaagaatttattcctgttacatgtttatcccagaatgctgggcagaaagctaacgtatgacgtgaatggacatcagatatgtaacaaaatctgctctcaatggtttgccactatgaagaataacccaaaaattaagtagatttcgatcaaaattatgtggaagacttacatttgtaacattgaaatatataaaattgcacctagctaaaagaaaaacaaaagggatatgacagtaaactgaagacagcagtggagaatttatgcacttttaacaatattgtttcacagaaaagaattgaggaaaacatgcaaacttcagaaaaataaaaagatcagttgtcaaaccttgatgtaactccactttctgcatattcctgaaatgaatgttgctcgccacctagtatagatcttgcccttgtcttcattaatggatgctcagggctacaccagaaaacaaaaggagaaacatagagcgtgagaatagcagcaacacatgaaacaggtaggaaggcaatgaaacaaaagaaagacatgttacgttactgctcactactagccgaaacacaggaaagaaacaaactacaatcgtgaaagtaaccacaactacaatgtaataattctg

SEQ ID NO: 21553 - DNA, 8571 bp, Oryza sativa
tatcagaccattgcggtgcaatctattatatcagttatgtgctacctcaatttcccctcggaaaatgttcttgacctcaacataacattgcgcaatgaacgcccagatagatttgatgaagcttcaattctgcactgagattgagatgggaaattttcatcttgctcaaattaaaaactctagattgttctatcaaactaatgttaaaattggaagtcagcaagaaaagaaataaataaaatacaggacctgtctgattttttaattctactactttccacagttgtactacttgaaatatccataagtgattttgttctgttcaatttctgtatatgtttgatgttgacacttaaatcatggcaacaaaaaattctcagagtcaaatgttctatacatttccctttatttcactgatgtaaagattgacctatgtagccagtaaactatcaataaggttccaatcaaccacctaaaacaagtgagggccatatatcaacatatcttacaaacatttttttcctaaatgaaacaaatgcacatatgctagaagaatacttgatgttatagcactagaggaatatttgatgttatagttttattacacgactttgtatttagaagcacttctaccagcccaataatgcacgcaaatgacaatgatcactattcagtatagtggaaaattgccttgaaaaaaatatggatctgttgtttttccaataattaagatagcagttcagccatggttgacttgttttctttctaaagtattctgctagacattcaacatggaaactaaaatgttactatggaccctcgcaaaaaaaaatgttactatggaccatcaccaattacattcattattttctccaatgatcgaatcattaactatcaacatagtcaacaatggataaattacaatattggaaaaggtcgagaagaaccgaatcagagaactaagaggagaaatttgacatatactcatacccttcagcttcaactttatctgataatccatacagaggactgttgggctcaagaggggaatcacatgagtcattttcggctgaatcactctcgccagcagcagagatatgcgatataaagatagccttggctgagaacgggattaattgccctggaaatcgcataagatcaactagcagttccatagagttcagtgaaacaaccacggacatgtgtttgtaggaatccacaaatccaactccaccatcatcaggtagaccctatgaaagacatgaatgcttgatttacgataaagaacatggaatatgcagaagaatgtaaaggaagtcaacataccactacaagtttactctcaagaccaacagcatctgcaagaaccttaaacaggatagctcggggtcggcatgatccatgctttatctgccctagaagttgtgaccctttgtttccaaagaaatgattatcttcagttggagatcttgcaggacttacatcaggatctaggctcttgaagcagtcaaaaacctgttccagaataacttgcaagttttaagacaaataaattcagcacatctgtaggcaccaaaagtgcccaaagatgttaaaataatattgaccattgatgattcataaggtgagctcatagtgggaaattgcacatgtgggaaatagaaaactatatccactttataatttctgaaaaacttaccaagccagctattttctttatcaccaaagctggactagagtttaatcctttcacaagtgcgccactaagctgtttcaacatgaaaagcttcttatctctctcaacgtccacaataattatgtcagccttaagtccatctgcttcaagagtttgaaggtcatccaatgatggtattgttgggaaattttccttcagctttttatcctgtatgaatgcatcacaggacagagaacttcataacaacaaaaatgagaatatcaaagctcacaaagaaatgaaacaaagcaacacttcactaaaactctgaatttaatgattaagagaagaagataaccattctaaaacataacatgcatattcttttttctttccttgatccctagtctatatgaacttgcttcctcattgaagttaaggcatttgaaagatttttccttgaaacataaatttgttctgtttcctgatttggcaatgataaatcggtgtacaatgctaagctaccaaaaaatgttaaccaagatctacccaacatagcaagaaaggaaactatgtagaatagaccatctttgaaactgttaacttaaacaaaaccacaaaaacacctggaggcccagaacaataaaatatgcaaatcaagcccaatgttaacaatttagctggagaactaaacatcttttacagaaaatgcatggcttacatgaagtaacaaacatctaactaaaatgccctatgacatgccacaggtaatctagggtggttattttcctaaaatatgtccccaaggaacaaaagagaattgttcagagaaagttccttaccggaattattgagtagaaaccattagggatgaaccctgaataagtccctgttgaccacagtaattgagaagccttccatgatgaggatcgcaaattgcttcgaggttctttatcagaaaatacactttgttttctagataaggaaacagattctatctttgccaaaaagtctggtggccaccaactcggttcacatgaattcacttcggatttccccgaactagttggtgtatcgtccatttttcagataatggaattactcatttccaagacgtgagagtccccttatgcatgtttccaaatgttatatgataaaaacttcgtatttaacaccaccactgatcaaactagtctgtatctgtcaaacaaaacagatgttaatataaaatatcagaaaattatgaaccactagaataaacttctcctagtgagtccatctaaagagttctcttgtctatttcatcctcgttaaagtaccaccaaactaatcagcggctccaaaacaaaaaaaaacagtttcaatgtatttataactctgcttccttaatcaagttccagcagtaaattttgtcgcctattaaattaatgaagcaacagagaacattgttttcttaataataaaaatgaattaactcctggtaggccgtttaccaatacagtaaaacaagcaaagttcagaaagaaaaaaacaactttttaattttctcaaaatcaactgagcatttgatagtaacatctaactgaaaaaagtgggagcatgtgaactgcatgaggtctttgtttctcccaggagaaagggcaacttttgtcattggctcagttgtcaacttgatggtctacaatgatgcattagaaactaaacagaagtggatcacatacgcgctttatcagctgatgtgcatccttaaggcaataagagtcccaaacgtatcaacatgaaaaattgtgattccgcttcaaccttatcgcaatgttccaggataacatgcaaatatgttgcaaaaacatcaagttgttagcaagcatggccaacaattccacccacccactgttatcccagtaaatgtggccattgtgcctgctgtcggccaaaacttgcagtcaattattccaagggatcattaacagggccttatccatgaattgagcaccttagtaaaaccaccagtcaaaaataaaagtagaacgcataaaacaactacagtagctcagctccttggcacacagtaacgaagtacggtcaataattccgtaaattacgacgcaattgtgtaactaactatagcccggcaccctcgctgcagcggctgtttctgcccccaaaaacgagcagaatcaggatggacgcgtcacgcgcctcgcatcctatcccacggtgccacgagacaaggacgccgagagatcttttgcgcggtgtgaagcacaagggccgaagtcaccgaaccagcaaacaaatcagcgacagaatggacgcatttgcgctaattcaaaacggagcaccccccacggaattggattcagattgctcacagcagagctcactacgcacaagctagatcagaggcgcacgcaacgaatccaagcaggtcgcggaggtgtggcttaccgacacggaagagcggtcgggacggatctccactccactcacgctccgctccacgacaatccagcagatgggatgaccgaccggagcacgggctggcgaagattccgaggcgtcctgctccgcttccggcggggaggaggcgtgcgctctgcgctgcggcttcggattcggagaggagcgcgggccggtcacgtcgcccaggcagccccccgcaggctaggccgcctcgatcgctcgcagtcgcagcgcgcgatttggcggtaggtgggttggtaggtgcggtggcggaggcggaggcagaggattcaagggaccggggagggtgaggccacgtgcgacaccccacgacgaacccgtcgctcgcggcgtcgccacttgaccagggttaggccggcgcgcggcgtgctcagccgtcagcggcggtggcgcgcggtcagtcgccgagtcagccgagacgcggacaggggagtgggaggaggaggacgacgacgaggagggaagtggttgagagttcgagactccggagagaaacttaacgagagcgcggcgagagaaggaggcggggcgggtcagtgagaggagagaggagaagaatgctggctgcgacggaaggaaggaaggaaggaaggaaggacggacggctcctccagctgttgggggaggcgtcggtacgcactggggcaggctactgtggcttgcgacccgcgggccagtgactcggtgagcactgcagactacagggaggacgaaccggccggccggaggttgggtgttgtatgaaatgaacctgcgtaggcagcttgtttgtgtaggtttaattgcaagtacggaatttttaagtgggtttgtatttgtgagattacttttaaagagcacacatgcatacttatatttgagaaaggggagtagttaatattaagttacattagtttttattgcattattttttatcttttgtgacagcgagaacgtgaaatttcacgagattagtatagggagaaagatgtatttggggaataggattactggctatgttttgctaataatagctatagtatttgaccgttgtgtgttttaatagtgcaagagagtttacgacaagaactttttaatgataaaatcacaaaagtcgtaatacatttgtctttgattatcaacttgagttggcatccaataccacgtcatgaatatcaacaagatttgcgtgtctcgtcgaaacgacagatatggaatcatcgtaacactcagtttactttgtttaatattttttcatctaatattgcgtcatgaatattgaagagatatgtaaggcatatctttgttgtatctcacatcaggataatagataatagatgtgcagagctgtgcacactttcaaaatacttcattataattgttgacgccttacaatggattcacctagctaacaacaatcatgaaccacacatggttatctgaatcaccgtatgtttgtaacctgtcaatccactatgacactttatgtttctagtttatataatcacatgtttatctttagattgtttttaaaatagtggggacagttgaggaaacgttgtagtaacttgtttgtgatactattgttgcagatgccttttaagggacaagttcttatagacgatcgatttggagcatagtttattttcattatagtgttttcttttatatgagatatgagatagctttctattttggtttgtttatagactatgttatgcattagcaaagaaggaaaaacatgtttacgggggtctagatgcctgattatgagataggataagaagattgtacgtttgagaatccctacggtaatcgggtaaataactctataggttttgtattctctatgaaatcattggtttatttgttgttaataaaaccaagaaggcaaccaatataaagttcgtatcataaacaccaaaatggtgtaaggtgatctgatacacatatctcttggtatccaaatgtaatgttagatatatgtatgatatttcgtatacttaaatttacttttcattttaaggcaaaatttgctatatgacactcaaagttggtggcatttgctatgagacacccaaagaacgtgtattagctgctgtacactgcaaaaatgtggtaattagttgctagacacccacctcattatatattgtttccggtagaaatagagagagaaacattggttaaagacaagtttgcccatgggcacacttgtcaatctcacatatcatctctttctattttcctcttcttcctcatgccgctctcttgccgttactcatgcccctcggtgaagacgacgaccgccgtcagcgccgatgagccacgatcgccctctactttctgcattcctcaatcttcgcttgatgccatctccgttccatctaattttgtcccatcccatgcagcggttgaacgggaacgcggatcatgccctcgctgccctggagcgcgctctgagcatcgccgccgcgacagcatcgccgttcccgtcgatcgggtgaagctaaggccgagccaccgtaccatcttcatcacgacgacctcctcttcggaagccccaaagaaacctagccaatggtgcagcgagcttggagatcggcatcatcttctccaactccggccggcgagctccatattcaattccacccgctccagtgagccaccattcaatccatcgcacatagaagctccctaggacgtccataacaccatccgtgtgcatacatggcagctcttcgagtagatcgagccgttgtcgtcaacacggagtttttcctcgccgtcgagccattccaaccgaagccgctgctgtccaagcctcgacgatcccttccaataactttggtgagcctcctggacaagcgcggcaacggggcggcagagggggtagatgctaggcgggacggcggtcggtagagcggcagcagtgtcccatcggtgacgtccttcatcgccgattccgagggccgccgcgagagactgcgagggagcgcgacgaggaggcctgggagcacgggccggagcgagcacagcagggcggagcagcgctcgcggtaggtggcccgagagcgacgccgctgaagaagagaagagaagaaaagagaggagaagaaagaaaagagaagagaagcaggaagaagaatagtgtccaggggcatttcggtactttcaacgctctttctctctccgtttccaccggaaataatataataacgaggcgggtgtccagcagctaattaccacatttttgcattgtttaggagctaatacatgttttttgggtgtctcacagtaaatgccacaaactttgagtgtcatgtagcaaattttgccttattttaaacactctttccagtttaataatttcacgttgttttcaagggtggatgtagagtatattaggggggtgcctaggaacccgatcaagaaaactttttagctatacctatgcacttcctcgatacaaacttagacacccgcatcaacttaaattcgatataaagtagagtaaattaagcaagtggcaccaccctccattccgttctagctccgccctggttgttttggacaataacgtagtcttccaatatgattttctattataatatatagtaaatatatttttaattttattaaagcagattttaggactaatctatatattccttctgtaaaaaaaaacaagagggcaaacctgactatgaatctggatatttggacagatggagtatgttctagcgcactataattgaataggcaggtcagatcaaatccatctttagaaaagcaggagtgcaaaggaataaaaaagagcagagatgaaaagagttttgccatgcttcatccattggatcctcatcatccaagatatttgtcggtgcggtgatgagcatttgcctacgtgttcaccagcttgaccaatggcaaggggtttgaccgaatgcacggtgcctatcatgtcaactggtcgatcgacatagcagccgtacgacctgcttgtctttagccctcgtccaaccatcattttttttccccacatttgcacagtgggagtacgaatcaaactgtgcgcatcattgacaagcgagtcaatttgttaggtcagccaggtgcacggtgtcaatcgtcagtacgtctgtacgtgtgccagtgtacgtgctcgcgctttgtgttgtgcagtgcttgtgcctcgacccacttttgccatcgagtacacgctctcgcggcgcccggcgccattcacggccggagcgcgtgagcagagcgaggggccggaagcgtatagcaagcgccatgtttccaaagccgtcgtcgtgccgagccccgtaccgctatggcgcgggcgcatgtgcgttgctgtcaactttgcggtgccgcgggcgcgcgcgcgtgacggcctgtgcggcccgggggggggggggggggga

SEQ ID NO: 21554 - DNA, 14336 bp, Oryza sativa
acacctctcgtgccttttcctctctctctcactctccctgtcgtgccggcggatcggcgagcggtggtgggctccgtgagctatcgacctatcgtcgcgcgcgcggcgcggtggggtggcgtgcggtgcggggccggaggagcgggagaggtcgcgatcgcgatcgcgccggggtggagctgtcggtgctagttgtaaagtccgtggcttggcttgctgcgcgcgcctgcggctgcagctgcgggcgagggtcacgtgcctcgtgcggttacgtacctttgctttcctttgggcgaaggtggggaacgtgggagggatggggacgccgctgccggccgcggatcgtgccgtgtgattcatgagaaaattgcaatattagtacggtaaacattggggttttgctgttttgacactttaagtggatgacaaataagtctatttatgtctatgaaatatgggtctaatatctttatagtaaaaattaatgtttgcagtgtcataattgcaaatccctggtgattcaacaggctgccccggccctcaaggctagaacaatattctgcttttcgccggttcggcccggccaggaccaaaatatgttttttagggtacgtagctggtaatcaagtggtgttctagctctccgtgctgtttgattgtctttttgaatggataactttttttaatacaaacgagaggagtcggtttgtatccggtgaaataaactgccccgttataaagcgagctaaaatacgttacaaacacaattgatggttttatttcacggcgcatgggcaacataagaaagaacttaagcagatcacattgtcagtcatcacgcatgtgcttccgtaggaaatcaaggtaggttcgtgaacgaccggtcgtacatacgtttgctccactaataattgatgacacttcttaattactagctactagctaggatttgggcaatattatgtttgatttgcatgaacaaggaatcgtcctgtgcatgatgaggattgccaactgcgcgtggaaaagaacctcgtctgatcttaattaaggaatcatgcgaaaggccttgccatgtttgtagttcaggcaggcaagcagccggcagctaatgcatctatatgatctcatggcgctgaggccgcgaatggctgagcaatggcaccaatcatcaatatatcatgcaatggaatatatgcgcaagtcccctcgtgactccgcgtgacgagacaccatgttttacctggcattcagcctgttggtcgtcggccgggatgttaaggcaccgtacagctacttggtttagttgcactgccactgccttgtcacttgcgttttaaaagaaaagatcaatgcattgtcattgttgctgatcatctccctggatttaacttaagtactcctagttgcaccgtgcaagtgttccgaaacaaagaagagtagtttgcaccttgtttgcagagacaattcggattgaatgttagtatggatcgaagcttcgccggcaccacgcgcacttggatgaatttgcatgttcactgctcaccggccgcagcttgctgttggcctgttgctgatgcagtgatgtacatgtcccattggcacatacggagtactccagtccaactagctttggccagcgtaggtgaaaagttaccgaatcttatctgtttagttcacgctaaaattgaaagtttgattgaaattgaaacgatgtgacggaaaagttggaagtttgtgtgtgtaggaaaattttgatgtgatgaaaaagttaaaagtttgaagaaaaaattaggaactaaactagatatgcttctagttttaccgttccagccactcctggataaacctggctgccacagcaacgaaataacatgtgcttggagatcaaccggttgacggagcaaactagctattcccagatcaaacatgattactggatcttaaatataggcatgtttaggctgcatccatgggtcgacacgtgtgctgtactggtgtgtaatgccccggttgatccatgatccctggctcccttcatgggctcatggccttgtccgatccccacccatgtacaaacacacacaagctgctgccaaccgggacctcccggaaagctggcaccaacaaagcgttcccgttgtgttgcgcccgcgcgcggcccacacacgcgcacacgcgctacgcgtgaccggcgctagcgtccaccacccagcctgccgcctgccggccataggcggagatgcctgggcacacggccggcccgccatggcctacgtgacgtgacaaactggacaacccgtctcgtacgccctcgtctgcagggtacaggctacagcccgccgccgtcgaattgcggaacggcgtgtgccccgtgcggccgggtttcggcacagctctgcaagcccgcacgtacgcggcacgcgcgatcgatggtttgtctacccctacctaccacgagtagagctactatgcggccttggaagtttgccttgtgccgttgtgctggtgtcccggactcccggttggccggttgataggcatgttggggagttcacggttcagtgtctcggagactcggataatgttctatgcgtgggcatgatcattaaacgggctctgtccgtgactgggggacatccggcccagtacggtccagtagcggagctctcggtgaaacgctgaaagagagagcccacggtcagatagtttatgtaagtgcaagagcgaagaatagttactggagtatctccgttacaaaataaatttatttttcgtctatctcacacataccaatacaaaagaaaaaaactaaaatactattgttttatcaaagcttaatataactttcttactttaactactcccaatacaattattacctacttttacaaacttcaatgcaatgattactctaaaaatgaacttattttggtacaaatagaatgagctaaaaatacttaatatgaggcaaaggaaataacatccttgtacgtgtacaacctacatacacatccatggcccatgtacattggttgtacattggattagggccgttgtagtatgttttttttttttaaaacaagtttatttaattatcatttattttattgtgactaggttctttaagcatggtttatatttttagatgtttgcagcaagaattaaatatgacaaatggttaactgtatgccaaaaatcagtgatgttttatattaaaaaacgaaggcagcatatgaattaattgtggtggtgttggagcgtgtacctacaaagtaagtggggtgtttgcaaactgagggcctgtttagatcctccaaaatagcaaaagttttgccgttttggaccactttttggcaaaatgatctaaacactagtagcaaaaagtaggcaagttgacatttgtaatttgggagtccatagcagcaaatttagcaaaaaaaaaaaaagcatcgggcccgtgcatgagagagacagcagcaattaatggcaaaactttaccatgtatctaaacaccaacttataaaattcaatgctaaatcttttgctaccaaaacttttaccaaaaaaaatttgccgcagcaaattgatctaaacatgccctaatttgataaactgaacaatgaacctgataaaatatgcagtaatagactgtcttgtgatgtgtgatgtttgctgtctgcctctttgggctggcactgaagattggcttttgttgatgcctgaagatggaagctggattttgggtatgttttcaaactgtattactgcaatgtattggcaagctggaatccccagccgatcctactagtctagttagatttctgtttagttcccgtttgttgtttctgtataaaaacctttttgttttcttcagtttcatgcaaagccgggtaatgaaaattgcatgttctctaaaaaaaagtagaagtaataatagaagtaaatgtgcgcttgattgaacaaacatgcatgggatgttggtttttaggaatcaaatgtttgattctgacattaaggttcatcatgaatattagtagaagtttagaatatagggtatctgggcatgtactccctgttgccttaactttagcttgagagttgagactggctcggttatacttaagtaccagctaacgtatcactaaattaaggccgagtttagttccaaaatttttcttcaaacttctaactttttcatcacatcaaaacttttctacatacacaaacttacaactttttcatcacatcgtttcaattttaaacaaacttctaattttggcgttaaaaacacaccctaagtggcatctctgccctggctctttttttagtttttccattttagcttagggccatctttctttctgtagctctctatagatgcaggaacccacgctagatccaatctgagcaacactgaagaaattaaaggtgctcccatataaacacctgagtcaactcaagatgccgtgaccatgcgcatgcagtgacgcaacaggacttgatctactcaggccaagtacagtgcacatccctcctcgtatgaccttatcattattatacagtaatgaaacaagtctactttacatttgtctaaatcttcagatcaggtggaatataatctccgccgtgtttagttccaaaatatttcttcaaacttccaacttttctatcacatcaaaactttcctacaaacataaacttctaacttttctatcacatcgttccaatttcaaccaaactttcaattttagcgtgaactaacactagtacggaaaggctttttgcatacgggcaaaaagcatctttgcatgcggttggggcaaccgcatgtgggagaaggtctgtaaaaatcacccttttcgcatgcggccggcccatccgcatgcaaaaatcccattttcgcatgcggttgcttatacgggccgcatgcgaaaataaattcagcaaacaaaaaaaaataaaaattcaaaaaatcctgaaccctagaccgccgccgcacggtgccggattcgtcgcccccgccgcccgccggcgtcattggcaccggatccgtcgcccacgccgcctgccgtcgttgccggcaccggatccatcgctcacaccgcccgctatcgtcgccggcaccggatccgtctcccccgccgcccgccgtcgtcgctggctccggatccgtcgcccccgccgcctgccgtcatcaccggcaccggatcggccacccccgccgcccttggcgccggatccgcgcggggcggcgccgcccgaggtcgccgtcgctgcagcagtgaggaggggatggcggtggcgccgctgcccgaggtcgtcgtcgccgcgggggtgggcgccgccgtcggatccgcgttggaggagggcgggggagtcgccagcgacgacggagggaggtagaggcggcagatccacgcgggcggccgctcccgcccgccgtcgccgcgtgccgccctcggccgccgcctcgcgccgtgccgccctaggccgccgccccccgcgtgcctccttgccgccgccgcgtgccgccgcctcgcgacatgtcgccctcggccgccgcccccgcgtgcctcctcggtgttgctgaccccgccgcgaccttgctgtgtgtgagggggagagagagagagggagttgaggagaaataatggtggagtgaagataaggttggagataaggctgctgaaattttgaagtggtggagagggcgaggaggcaaatcagacttttagataaaaataaacattaaatctaattttgtggtattaaatgaattcatgtgaaaaagttgtcaaaaacaaagttgtagagatcattgagatctaccaattttcttttggtcatttctccatctaagtttgattgagctatataaaatttgaaatttaaaatataagaaattcaaataatattttgaagcaataaatgatttcaaatggaaaagttgtgaataacaaagttgtataaattatcaagatctataacttgttttggtcatttttctatatgactttgtttgaacagtttgaatttgaatttcaaattataacaacttcaaacagcattttcaaatactaatcgatttcaactgaaaaaatcatcaataacaaagttgtataaatcatcaagatctataacttttatattggtcattttttcatccgacaaagtgatttgttcacaaaatgtacatatctcttatatagtttataaaactataagagagatatatattttgtaaacaatcttacaaatatctttatcggatgaagaaatgactaaaatagaagttatatatcttgatgagttatacaactttgttgttgatgactttttcagttgaaatcaattactgcttcaaaatattatttgaagttttgaaattcaaaattttaattgataaaataaagtcaaaagaaaaaaatggccaaaataatagcagtaagaacacaataacatggtagagcatgatcttagaaacatttagaaaaaaaatcatctaatttggagttcatataagtgagatacactagttttaaatttttcaaattttttatttttgcatacgcctccttaagtggatttttctatacgggcgcttaagtgagctcatttttgcatgcggccgtcttaagaggcccgtatgggaaaatcgatttttccatacgggccacttaagaggccgcatgcaaaaataacctacgattttttgtagacgccactagttatggtccgtttgtaaaaatcaaagggtctcgtacggaaaaatcacttttgtagtagtgtaaacacagccctcgattgatactagtattatttgaactttgcggagtactgtcacatgatttcaaatgacgacgtatggatgtttattatttacatgtacatgagttatcttcaaattgtatatacgtcaagcaagtactactactagtaaggttacaaggcaaaaatcaccctgaataatacgttccaccattattgaggttagagttaatcaggggaaatgcagagaataactatctttatacagttttggtagtataagctttacctttaatcaccaaaactggttgttaatttccagcttcaaaataaatgaagtctaggtgcactagcttgcatggcaaggcgatgagccgatgaccagcgtgaggcagtgaccacacggagaagcgcatttccgggtcacgggtgtggcaggggaatccactaataagagtttaaaaaaccatgcggttattatgtattgcaacattctcagtttttaaaaccactatataactcacggtaaccacaagtcacatatttatcgcggtaaccatcaaacatgatgtgacgagaaccccatctagaagatttggtaaacctgacactgacacaccgtgccactagcccactactatccatctcaaggacgtattctacgagctttgtttgttcttcgctccgtttatactccagtgtaaactcgatcttaatttcatttcgcttaatgacttcactttgtcctcggatgatttgcgtccgtccgtttgttcacgctctactacacgtacagacgtgcaagtcagcaaacctgaaggctaagcaatcgcgcaactgcgtggttactatacgcacctgtgaggctgtgaccgttcacgtgaggcgatccctttcgaccggccggttacgtaaaaagaccggagaatctcgcgtaaacggttatccatttctcacgggaatctttcggccctggccttcctgtccagtgcgacccgttgtgcgatcttttatctgtgttatattaagtcgtttgatttttcttagttaaacttttttatatttatttaaatttatagaaaatataatcgaatttttaacataaaaataaacatattatcataatatatttaatgctaaatttaataaaactaatttaatattttatatattgttaaattttttgatatactttatcaaatttatcaaagtttaattaggaaaaggagtcaaataacttataatattaaacagagagagtataaaatatcatacgttattaggtttgtttatatttatattttgtaagtatagagggagcggtagtagctgccagcctgccaccgcgacgagattgggtttcggtcgtcgtaccgtgtccgtgtcgctcgaccggagacgcttgaccccgcgggcgcgcgcgaccccagtcccgacccgcatcgcacatacatgtggccacaggcggagcctccggcccaacccctcctccaagtctgaccgtgcgccgcgcgtgtcgtacgtacataagcgggggcctccgctagctagctagccggagggatcagcacgtctcccagtcgcctccagcaacaagctccgtctcattcattcgccagtggcaagcttatcgccggccggccggccacccaccctcgcgcgatcaatcgatcggtacggtcaagctagctaagacgagctatggccatgctcgggaggaagagagggggatcgtcgtcggccaagctgccaccccacgccgaggacccgcgtgcggctcctccgccgccgcaggccggcctcaccgccaccgacggtgggcaggaggtggccatgtcgcaattcgtcgcgcagctaggcatgtgcgaagcctccgctcgagtagcgaaagcattttgtaagttgtaaccaatggatggatggttgaggaatttgatttttttttcttctttttttgggtgcgtcttggcatggcagacgaggcggcgcggaagaggctggacagcatgaaccagaggctcaggtggctggagcagcagatggagacgctggaggcggaggtcgggaaagccagctccgccgactgatgatcacctagtacatctttgtagcaacacccttttttctttagtcttacagatatgtagttcgatgatgatgatgatgatctgatcgccttttctagcttaatctctcttttgttcgatgcgttggagcagcgcctttttgcctggaacctctgccacgttttaggggtgagtatttgatcctgggtctaacgtgtttgcctacgattcattctgacatggaaaagtatggccgttagttcatcacttcatctcgtcgctttcattttctgtggaaatagcctaccgttccaaccacgcatgctggacttctgacttctaatgttctacagtacctgggaccaaaaccatacactctgtattaaattaaccagtactaatccccactgtctgcaatcactagtacatatttgtacgcaaatagaacgaattgtgccgaacattccacatctaaaagtgaatactctctgtcccaaaatcttaaaatataagagattttaggtgaatgtgatgtcccttatattttaggacggagtaagtatttcatctgtttagattcattgtattagaatatatcacgtccacttaaaatctcttatattttgggacgaaagaagtaattcttagtacttctattaattcagatgtaataatattcttaaatcattcaggagaggcactgttcacacaatcaccgaagtttgcctgtatggtcctttgacgtcttacagcaagcttgtgcaatttcatggtccgacagtccgacacctttatacgcgagataacatggccgtgtttaaattcaaactttcaatttttctatcacagcaaatgtttagacatgcatgcatggagcattaaatgtggaaaaaaaactaattatacagtttacatgtaaatcgtgagacgaatcttttgaacctaattacgccatgatttaacaatatgatgctacagtaaatatttactaataatagattaattaggcttaataaattcgacttaaaaaaatttgatacacgagctaaacacagccataacagaaagacagaaataagcgagccaatctattcatacaggtacggagtaaatgtccagccaaaagtaaaaaaggtatcatcacttcatcaagaacttatgtacaacagactgccttctgctttcacttaaaaagcaaaagttttacaacacaatttccttctcggagctaaatccatttggtaaaatggtacatttcccgcacaagaacaggatatgaatagtaccttgatatccagagtaaaaaggaaagaaatgaaagaagaaaaatgccgggaacaaccacaacggcatgcatccacaaccacaaccagatggcaatatgaggacatcaaactatgttgctattcacaagctagcttggtaccaaagctgctgaggctgatagcaaaggcttgaaacgctgagagtggctgccggtaatccatcgtgaagatattgtcatcgaccttaccaaactgcaacagaactgtttcctcatccttcgagctagcaggatcattgggatcagcagcagcaactagttggaaattcttgacagatgcaactgtcacccgcccatggaagttcaagcaccagcactgcaagtgctcatgccagcggggagctttgtttcttagaactgtgttccctgtgggttttctgaacttcgtctttagacagttttcccatgtctcttgagttgaagggcactcaagtgcacaatacattctcctaggacctctggatttgagcaggttgtatttataggaaacctgtccaacttcatagtttcctgctgacacttggggacttatccttctacttccaaaacgccgactggatcgactacttgatgctttagcgccatcatatggtggcttgctatcatatattttgaagtttgtcccccaaaaatcagatctaaacagaagcacaataataccaatgaataaaaattaagacaacaaaaatccaatacaagcacgaaaacacaacagatacccaaccagtccaaattatctgcacaccataaggggaatcaaatcaaataaggccataacctaatctaggacagtgaaataatgtctcaaaggaactgccgtgagacttacacagcaatcaattgcaaggaaataaatgaaatacttttgagcacaaataaaggaacaagagaagttataaaaactgaagagcctgaaaactccccaaagagtaaaggctaagacaaaatagaagcattcggcagttttaagtgcaatttatgaggatgcaaagtacttcggcagtcaattgcaaggattatgattcatgttgactgttactgttgcaaaccacaaaatcaaggaatggaggaggcatgtgtgacaccctaccctggtttgagtaagtccacacatgagggtgtgaattagtcccaccttgtggccttgtttggcaaggctaaaatcccaggggatgggccgggtctttcccaaacaaggcctacttttgcaggcttaccaggtccaaggtatcaatccctcaaaacagaaaaagtccaaggtatcaaccaaacccttgaacacgaacacaaaggatgaaagtgcaagtgtgttggtgtgagtgtgtactctatccaaaatggggttagaatttagattatagacttaaaaccagttcagaccttggggcatcacagcatgccaccatgttaaggggttcaatcttacaacataaggatatactccctcctttttatatatatacgacgttagttaattcaatattgaactaacaagcgtcatatataaaaaacgagggagtaccatttgaactataaaacagtccaatacctcattgaaaaacaagatagtaaagaaacagatactatttagaactcagaaggcttatattgtcttatggtatgggtacccaattttttttaaaaaaaaaacatctgcagatcagctaaatacatatttttagtgcattagcatgttccctaattgtaaatatattactgcaaccaatttgttagcactaagcaggatgaataacagaatatgcaagaatgattaagagtgaactatgcagccatgtagaacctcacctcagtttccccatgtatgcattgcttccttgtgaaaggtcatcagcatcaagggatacgatgtactcggtatggggaccacgtctaaaccttctagcagccatgaggaacttccctttatccacagttgctatcatatacaaaaagtatatattaatcatcaagcacatttgatggtgaaaaagtccatatggcattgcagttggtacaaaaaccagaaggaaaaatatacggtgtaactgacagaacccccatcctttttctttttcttttttttaaaaaaaacacatatccgcacatgttagatgttacacttgaacagctgagtgtaagcctgtaaggagagaaaaatgttgcttctagatacataatttgagtgctgttggatctgattgtcaaaataaaagaaatttgaaaacacttgactaagcaggccatcaaatgtaatggaacaagtagacttccagtcaccctaatcactatttgcaggacacgaagactttggtataattcagctaaacccttcaacaattatgtccaaactagccaatccaaataaataaacagtgttaagtatattcgggcccatatattctaggcccattggcccatgaggacataacatagtacataatcccgaaggggcatctcttatcaatttcttatcagttgtttcacaaaaaataggcaggtacaaaacaatattagttcctaattcaagtaaaatgctgtaggttctaatccattaggtgctccaatcctccaccttatcctcccaccatcccataccaattatgccaaaagatccaaatgcaaaatatcacatggtcctagaatgcaaacatactgtgcatttctgctggtttgacagataatttgaatctatagaaaaaaaatgaaagccaggaagcaaatgtgcatgggactgcccatgccaaaagttgataggtcaacatcaagccatcaactaggagaaacaagcgatgcatctccaattaaagccacaacgaatttgagttaaatctaaaagcattcaacttgactactgctaggcatcaagtgtcaaccacagacaagtaacaaattccaagaaaaacagaacccgcacagcaatcataaaacagcatgtcacatgccttacattgagatggcaaatcaaattgattatctagatgcacataatcaaattgatgcctgcacatatgcagcacaaaataaatgagagtcaaggaagttctcatatcacatcacgtacagtcatacacttaccatttgtcaaaccaaggtagaggtagaacgtagagttcttcttattccgcttaatgaaacattgcattgggaactcccttggccctggctgcttgacaaaaggtgtaagaactccgattaatttgcatacaaatactgtgtatcaaaactacgacactcctctgcaagactgcaactaaaatcctacgtagacgaatcacccaaaacaaaactatgctactcatctcatggggaatttcagccactaaactcccacttataagtgaaatcaccctctgtgtgataggatagtaaatagctaaacacatatggccccgttcgaatctgattattggatgaagattaagtgcgcatgtaaaacgagactcattagcgcatggttaatgatgttttaattattaaaaattaaaaaatggatttatttgattttttatagcaacttctatatagaaagtttttgcatgaaatacaatctttagcagtttgaaaagcgtgctaacggaaatcgaggaaaaatctggatgttgttggagcttagaacgggactaagtaaagctagactatatacatgctggaatatggtcctaacatcaaatctgtagccaaaagcatgaaaattcaaactgctggtgataagattttccaactattcattcatagcggacgaccctcctcgggtttgtttttccttccaagcctccagtgtgctatactgctatctaccaacgatgtggtgattttgccaaagccataaaaagaacaagtgcgatataaatcatccattgtactaactaaatctagttgctcccgagcctagttttaagttaaatccacaaactcttataaaaaaaaatactagtatcaaaatcgattgaaagttaacttactccaaaaacaaatagctaggactagacataaacaaattaactaatcccacgaaacatcgcgaataaaaaaggtaaatttgtaaacctcaaaaattaaataatcctctaaaaatagcatgagcaagtgatctcagcatcctatggccagaactgagggaacctaaagacgcaggctccaaatttagcaatcaaaagcatagaggactctctaaa

SEQ ID NO: 21555 - DNA, 8477 bp, Oryza sativa
atcttcttcagtgaacgagcagcctaagcccaaatttgtcttcggcttggctcggccacaccttggtgagtacccttggaggcccaacaacgcatagattgtcggcccggcccggcccgtacgcggcaaatatattcgctgcactagacactacacaaagtgggctccaccggggggagtcgccacgacggcaccgggcaccggcggaggaggagataacgcggaggcctcgcggcgcaaactccccaggtactcgcgctccttcctccccgcaacccaccagctcgagcctcgccggcgctccgaccagcactcgccgtgcgtttctcttgcggttgggaaggggtttaccccgctcggagttgctccgccggcggagaatgtggtagccacgccgcggccgaaacctcgtggtgtgtgtgtgtgtgtgatggcggcgccgccgccgagcgcgacggtggggctgattcccaacctggcggggcgcggggtcttgctccccgcctcggcgcctgattcgagcgcgtgccacgggttcgtggttccgacgaggaggaggaggagggtctccgtggcgccgtttggttggggtttggcgaggagaggccgggtttctgacgcgagagcggatggttttggtgctatgtgcgcggtggctggcggcgaggctggtcccggttcgtccgagttgcggcacgtcgagaaggagctgacgtttagcccgactttcaccgactatgtgaagatcatggagtcggtgaagttggacaggagcaagagtttagagagcacagaatcggatggaaggagctcgaggaggaggtttacaggcgatggcgatgcaccggttgttcggcgaggggacgagaggtcaggtgatggaaggagtacatcttttgataggcaaaagggatctcagaggaacagaggggatgtgaatgagaggagcatggcgaataatgatattcagaacaatagtattaggttagtagagaaaaaaaagccaggtgatgttgaaaagcgtcggggaagacagggaaaggtagatgaatatgtacagagaagaattgttcgaggtgagattagtgaagatgaaggtaatgttgataaaaatgagcgcaagcagtttacattgcagttgaagatgaaagatactagaggtagtatggttgctcatcaatcagagagaaacatgcatgttcagtcaaatgcacggaagggtttgcaaagacagtcgacttcgatggtaagccatatttctagcccttcaaacagcagaattatattggagaacaccaagtctttggtaaaaaggggaaaggagaactttagtagcccagcaagaagcatatatgagaacaatttcaaatatcccagagaaagaaaatttaccaactatgatgtcaatgctgatgataaatttcaaagataccagcaaacaacagaaaattcagggagaggtgttgtagtgggaaggtttggagagggtgatattgattataacaaggctactgtaagcaaaagatatggcaataggcaggcaacgtctgggcatgatggtcatccaacggtcagcttgaagcgtggaaaacctgaagcaattcgaatgcagagaggggaaaatgtccaaacagggaagtttattaggagagatgcgaaagctatagacttggacgatagagctgctttcaagacttttgaggtattcactgatgtcagaaacaggccacgggttcttcaaatggaactggaagatagaattcagaaattggctagtcggtaagtctttgtatgattggttttacagcctgtattgaatttgttgagttgtcttggttttgctgttgtataaattcatcataatagcctcttctaatttgaaaaaaaaaaaactcatgacggtattctgtcccatcaaaactacttgacactgcctctgctgcaggttgtttgatgggcattaagtattttttacaagagggagttgcctatatgtagcccttagcatgagtgttacttcgtttgaaaatctcagggcgttctagattctatttgaacactcatgtattcaccaattttaccatcgttgttcacatccaatagaagaggacactgaccacctctttttaattgatcacattaaactacatgatgtacttccagtgacatgaatttcgttttgatagataatgagtaataacactgggcttctatcaagactgctgctcaaatatattgtatcaatacttgcttatttacaggctcctgaaagtgagatgttacaagaacaggcatatgaaaactgttgtccgataattcccactctaaaattatgtgtgaacttttttttttgtgatcatgttatctagatgctacttgcttggagaattctttcatgcatgtaagacaatattacatgaatgggacttctagattgaacttagaaaatactttcattcgttgatgagcatcttgctttcctatacattttttgttgcttcctagacaagtcattgagcctatggagtcttcgctgtcttagttaattctttatggttatttattttgtgaaggctgaatgctacagatgtaaatactccagagtggaaattctccaaaatgattcatgatgcaaaaatcaaattctctgaccactctatcctaagggtcgttcaaatactgggtcgatatggaaactggaaacgggtcttgcaagttgttgaatggcttcaatcccgtgaaagattcaagtcctacaagagcaggtaatgaaacagttacccatttatatgttaatatattattgtgaatcttaaagctgcagtgttagtttatatatgtatatttcattttttaccgctgttatagacttatattgttgtttatgtagcagagtataatgtgtactaagttgtctgtgatgaaataagtttgcttcttcatttgttcatcttgtagtttctttttttgtttctcttgggtaacccgtaagtccttaagaatcacattaaatgatttacaatgcttatcatatttaatgcgtatgatgttcatgagagaacatatttgttttgtaggtatatttatacaacagtgcttgatgttcttgggaaggcaaaaagaccttttgaggcattgaatgtattttacaccatgctggtataactagcgctcatctgtcttatgtttggatgtacctaatctttccatttaaatgatgtccttatatttcatctgcaggatcaattgtcttcttatcctgacatggctgcttatcattgtattgctgtgactcttggccaatcttgtcttgtaaaagagctatttgatgtgattgaccgcatgcgttctcctcctaagaagtttaagctaagtcctattcagaattgggatcctaggttggaaccagacctcattgtgtacaatgcggtgagtgacacttttagcaaatgttctatgtaagtgagtgcaccaatgacaatgagacatgattgtttaatattgttggtaatttagtattcagtagaatgtaactgactctactgctatgtaggttctgaatgcctgtgtgcaacaaaagcaatgggaaggagcattctgggttctgcaacagttgaaagagaagaacatccgccctacaaatacaacatatggtcttgtaatggaggtacggtaatcttgattacatattctctctgtcctcccctaaaccaactgtgctggtcatgcagaaatgcgactgcaaatcttttatgattttatggaattaacacgtaatttgcggccgtgttctgcgtgcatgggactatacatatgactcatgacagtttcagagaccatttctgcatcgatgtttctcttacctggattctgacaagcatattatatctatctacagcagatagaatgttttgctcatatgttggtcttagggaaaactgttgcttaacttggttccatacgatttccgtagtattgattgtattttttttttcatatgtttggcacaattctttatgcagcgtaatccattttttgttataattttgtggtactgtaggtaatgcttgtttgtggcaagtacaacttggtgtacgagttcttcaataaggtggagaaaacgtcaataccgggcactttgaactataaaggtaattaagaaggtttgaaaacagttgaaggcaaattttatattatatctcatatctcttgctgcttgcagttctcattaatgctctttggagagaagggaagattgatgaagcagtcatggctgtcaagggtatggaaagtcgtggaatagttggttctgccagtctttattatgaccttgctaggtgcctttgcagtggaggccggtgcaaagaggcacttctccaggtttgcacttgcaaaaatatagttatatcttgtacatgacacacttgctgtagctgttgttgcaactgaaaatacattttgccacctatagtcatcttgaaaagtaaacgtagatctataattctatattggacttagaacctcagctgcaaactgattcttcatttttttaataaccgatagcagttattctgctggttttaacaatttatcggcattttactgtcattagttgctttcgtgaccataacttttactctaatcccgatttctcactagatagaacatacataatcacaattgcgaaaagcatattcttgttgaattaggcactgtgtgttggtatatgagactatatgcatatatatttttgatagatgaaccaataggctggaatttagttcccacagtataattatcggtgtgagcttcaaatccaattaacttactttttgtaaaacaagctgaaaaaactttatcaaacagccaggcataagaactcagcttgaacttgtctatctgtaagcgccatcacctgtctatgcttgtctcatgcctctagatgctttgttttatctcttaacctttttctgatggcaactgtaatgcaggtcgagaagatttgcaaggttgcaaacaaaccactggttgttacctacacaggactgatccaaacctgtatagacaatggaagcatggaaaatgctaaatacatatttgacgaaatgtgcaaatactgctcacctaataacataacatgcaacatcatgctgaagtcatacactgaacatggaatgtttgaggatgcaaaagatctattggagaatattctcagtggcaggataaggagtaaagtggaatcgagtcaaaaggcaattgcagacaaggttactttcaatattttcatggaggcctgtgctgaagcaaagaggtggaatgattttgagtatgcatttcgcaaaatgttatctagtggctaccactttgacgaacgaaggcaccttcgtatggtgcttgatgcatataggaacgggaaggtgcttatctcatattcctaactctttaactatccatgaatctccgtaaatgtagcttataaggatagaatattcattgtgcataatctttcatatctgaagttgaagatgtttggttcataacataggtcatgttattgcaatgaatggaggatgtttgattatgctgtttttcccccatatgtatgtgatcataagattgcatggtgactgatcttagtagttctgaaatctatacatgtgggccttttagcttatatttctatgccctcagagagaacaaacctcactagatttaaaaggaaatttcaactacaagcacagcataatagtactagccccagtttggcaacaatttgagccaattccttcagtattttatggcttactgtcaatatgaactatgcttagagttcagattttatggacaatgatagaatgcaagatatatgatcattttcccattaaactgcttcgttaattatttggtgtagctattcttagccttactgcctttcactattcaggagcagttattggaagatgtatgggactacatgtgccaatatggccgagttccgcctgcccccatgataatggaaagattttgcctgaaactgagacaaggggacacagtggcggcgatgtcctgcatcaatacctttcaggagagcaagatacgcaatgtttcatccatgtcctggttcaatctgctgaaccgtaatggggatcgcttgaaggaggatattattatcaagctacttcatgaactcaacaaccttgtaagctcaagtggtcactctgattctttgtatcaaaatattataagtagctgtacagaattcctttctgtttccacctctgtagaaaaggcgtcttctgatcagcagatgcttccctgtacgtcatagctactatatattaatatgccattatctaaaagaaaatcagagtttggtcattggtcatttggttcgtgctccaaaaagtttgatcatcaaatccatcggtttgctcactgcatcatactattctacgaggataagtgatcgtatgcatgtagcttggtgggctagttatttgttgggattgcatatcggcagaagtaactaactctgaattggtcgtcatcctgagatgcatggcacttcgcctcgttttaaacatcacctactccgctactcactacccgtgtttctcatgttgatatcaattttctcatgtcagtatgtcagctgcttggttaggttctctttggttgttccgacaaaactttgatactttcagctggtataccaaagaacacatggagaagagctacaggtgtgaaaatttctgggtcaattacacacatagatgtcctcgcataatgaatttacgcatgcagccgattgggaactctcgagcctgacgagtagtccaacaccaggcacttgtttgctcgcacgttcggacaggtctgaatccatcctcttgtctggactctgaagcctccatcttgcgacagtcgcctgattggcgctaccaaccgcgcgagataaggttagctcaactttggagaagaaaacgttgcatctgatcgtcgtgtcagtctccatgagcagtgtctctgtacccctcttgttcttttgataaagaaagaaatttttgaagcttcgtggatatttctattttccgtcaggctagacatatgttaagattaactataagatttcggtaagaatttcaaataaaacactctaattttgttagatgtttgaaatttttcctggagaatatatacaggtgatcagacagcaggaggaggatggcgcgcacgacgaaggcggctgcgcgacgtgggcgcggcgacggcgtcgtctccccaacagaagaggaagttattattaagctggcaaagtggcaactgatgaataaaacagaaaagaaaaaaaaagaaaagaggaaaactaacagacggacagctaggcccgggcatcaaataaaatcgtcggaaaaaatcaccaggaataaaaaaattccccttcctttgcgcgtcccacctgtccccttcgtgggccccaccaccgcacgtctccaccttcccccacctcgccgccggccaccgcctccgcctccgcctccgccgccgccgcctccacatcccattccccgtgccctcttccccaacccccctcgcgccggggggcctctgcgtgaaggaagagggcgctgcgacgccgaccgcgcgccggtaatgagctacccatccaccaaatgcgatctgttcgttcgtctttagatgaatcgatcgaggcttagagccttagacccggttttgctggccacttcttcgttatggaagagagattgttttatttttgtttatcgttttcgagtgcaagcatttggcgccgctaagaccccctgattgcaattggtcactaaacaaatgtcaatgtgaggaggaggagggtattaaccctattttaattccatgtgtgatgatgagcacgaaagggattttttaaaatgcgacgaatccgtcgccggcgaagctgaggcccctcgacagcgaccttctcgggcttcttcttcttccgcgcgtgtccccatccaattctttaatccggaatttcgtactcccggcgtggaattgtcctacagttgtcccgtggaattccgtccccgctttttatttctttaagcaacaatgcaatcttggtgatgggagagattgcaccgtgatttttctttgtaattttcgatgtttttttattttataatcgatttcaatgtgttgttgcgtttctttgatttcgccaactactacttgttcctccaagaacggacgaacgctgtttgggctccatttcctctctgctcatctcctcctccgttgccccaaccaccgggtgagcagagcagccttctcttctcttcttctctcgatcgaatcctccttttcggtttcttgattcgaatcgcgtgcggtgtaagctagataggcagtggtggccaatcaggcagagagaaaaagtagctaaagctgtctccttccttgctttggggcgatgcaag

SEQ ID NO: 21556 - DNA, 2689 bp, Oryza sativa
tgtcacctgcatgcaggagaggaggaggagcaggaggaggaggagggggtagtgaggtcgccgccgcggaggaagaggcgcaatggctgttgctgctgctgctgctcgcgcctgatcagaccatgcactccaggctgctcaagaggctcgcgaagaggatcatgtgacgtggagcgagccgcaatgtggaagatggtggacgcgctgctgcgttgctccgcgctcgtcgcgctggttcttcatttcgtcgtcaatggctgctcggcggtcaacactgaaggttagcggcggcggcggcggtggcgtctcgccggtgttgtgggctgcgttcattattaggtctgtgggtgattgattgggagctcttcttggttgcttgtggttgcagggtcggcgctgctcaagtttcagtcgagggtggaggaggatccgcatggcgccatggcaggttggagcgagcgggatggcgatccttgcagttggaacggcgtccgctgcgtggatggcagggtggtgattctgtgagttcattgcccttccttttttattcttctgaatgtgcagtgattctgattggaaatgcagtttacccattcgatcaaggatcattgttgcaaaatgtagcaggttttctctctttgatgatcctccgtttgactaaaaccattctgttgaagagttgcgttgatttattgttaaaatggacgttccttccccactacttttctcctctgatctatgtgcggtttgacttgagaatacatgttagaaaatgcagcaatgcttcagttgaatttctggcaacacaagcatctatcaactttatagcccagagaagttagatgtgcaatgattgacttgttgtatttggtaacagagcctccttggctcctttggactgtgggatttctccggattcttgtgaaaatcctttagattcgtgcaaaatggtcctgcgttctaaaggaggccttggtgcaatcagctcctcttccagccaaacagtcaatacaaagcatcatacacaatattaattccgtcccattttgatttgaattcttatttctttgatacatatacagtattcagaatgtccataaaatgtgctgtagaaattaattttccctttagaagcctgtatggaagtttaaaacataatgttgatatcattatttggtttatttaaatggtttcttgactcagccaatgtgaacaagtggccagatggtacattcaattctgtgacagggagatgttgactaataaagtgagattatcgactaaaacaatttagttgattcttttaaattgtaattatattggaggcccaagatagaggctaagcattggtgtagcttgatacttcagcagaaggtcaagtataatcaccatcggctgaacgttgtgatctgcctaggtaagagtgctgtagtagggtccatatgttcatataaaacatcccttatgtgtcagcggctcatatctagagagcttttcttaggcagcacattaagaaagccaaactaatgctgtttggcatgcttcacgcttatatactattcaataggaaaactgacatttccattcgtagttctagatccctaacatattagtctagcaaataaaaggtttgttcaatactctacatgtacttcaaccaagcacaatagcagccctttttctttcctgattacaaggtaggcagacacacacggacattgccactcacaccacacgcagaaatgcactattgtgtgcgctttgaactctttcgatgtcaagatttgctatcaaatgcctcaggacgtgtgacaggttgagtttcatacaccaatcatctcattcagaagtttaagttactaggaaaagagacatcattttctgctcatagagctttggagtagtcccttcagtgctacttaatattgatatttttacatgaaaacaccttaaggtgattctccgactcactaggttaataattttttcttctcaagatgatctattacagaaaaactcatgttcagattcttgtgtttcactatataagattcatttataattgccgcagtgtttctacatattttgagtggataatggttgctttatcatcttaagaattgtacttactatgaactctctttctgtaggaatctaaaggatctctcactaagaggtaccttgggtccagaactaggaagtcttagtcatctgagggctctgtaagttatcttgactttgctttaaagaatatacattggacatcttttgaattggatttctttaagatctagtaacgagaaattactatagataaatatattaattctttatcggttgatgcttgactagcttattcagtttgtcttccaggaaccaggtgtctaaataagtcaattaccgtcagtaaggacatctgaagcatatgtatccaattaaatgaatattggtttcaataggccataatcaaatggtgtagttcatatcaactaaactccgtgctaaataaaaatgagactaaaatgccacatgaatacattgtgcatttgtgtgagtaactgaggagtttacacagtagcataagatcttggctaatcttttgatggggcatccattacttgaattactagagctaatgagttgtaacactgtaatcttactcctgaatgtgatttgagtgttttctaca

SEQ ID NO: 21557 - DNA, 696 bp, Oryza sativa
tgcggggcaccagactgagaagcggcgagaagtccgtgggggtcgctggggagtccatgcctctagttatatttatagagggggtgattatgatccaggaatggtgcactgtggtgagttgtgttgtgcaaagggtattgtcacagcctctattcgggtactttccagtatcgcgacgcatggtagacatgatgaggaggctgtgtcttgtgggtacagtggtacacctctggctagagtaaaactattcgaatagccgtgcccgcggttatgggcgggttgagcaatgtttttcgtgattagtctcacacctctcacaataattatggatgttatatctggtaataatttgcttagctcctggtttggagttagatctgtacagccgggtatggttgttcaggatggttgggcctgtgcagcatgggtgtgctgttcagtgttgattaaaatttctgattaattactccactgttttactcctcttaaatgttttgctaaatgctgcttttgcaaatgagcctatattatgccatcctttggtatccttgtgcacttgcatatttgctgtgtggcttgttgagtatgtcatatgctcattcttgcaataatcaatcaacctcagttgaagaaaaagatccagaaagagaagacgtttggcttataccccagttgagctgcctgtgggagtggagc

SEQ ID NO: 21558 - DNA, 738 bp, Oryza sativa
ttcctgagatgatttccagcatgagtagaccaaaactgcacacgttcccagctggatcggcagacacaggctcatggtgatcaacaatgtcatcgttcttgggcatttttcctttagaaatcacttcttgccaaacactcatgtctgctacctgcgaaaaggactcggtttagaggaaagcataaacatgtagtctgatattacaactaaagtgtttgtgcaaacgaactagggagtacttcatattgctcaattgtgatgtagacaaacattttatccagtttgcttttccaaacaatgtgactctaaattgaaggtataatgtccagaaaaatggtttagaagctgaaattctgatcttacactatttcctttttgttttcatattactgaaattttggacaatcctgtgaagatctccacaaactagaacaaatacaatttgaaatttccataagcatatttgtacctttgcagctccatcctcagacaacaatatggcacttgaatgtaagtcaggatgtgtgatagaagggttcagctcatgcatgtgttggatgcagtatgctacccccataattactctcatcctaccattccaatcaatatgatcgaatccctcaactgcaaaaaggaaataaaaccaatttaatttggcataaagaacaaacattttacagtgggatcagcatttaacaggcttttaccatggagatgctcatagagtgttccattggg

SEQ ID NO: 21559 - DNA, 3679 bp, Oryza sativa
tgtaaaaggttagtgaaccaaatcctaggggaatattattattctaacagtatatgcattgcaagtataactagttcttctctattttggtaatattgacggtcaaaactgatcgctaacgacaatcaacaacaggtccgacccctaagcaaagagggggcagccgccactccaccccaggccggaccctccttggggaagtgccacgtgggtttgggggcggcctcctccctctaaacatgataccgccgggcccatatcacagacgcagtcagacttatataggtgtgttccttctaaaatgttatgtaggccaacatgtctactttatggtaaacattaaggtatgcaccaacttgccatatagatgaggagagaagtacatcaaagaaatgagcctctcctcctagctacccaatagcttatttcaacatcctaattcacgccatctctaaccatatacgataggttactactattgtgtaactcaaaagggtcttaaacccatctcactcgatgcactgcctatcacattttgcgatagtccctcaatgaactgatctgctagatttttagcaatctggacatatggctgcgttcgaatctccaacaaaagttggatgaaaactttgatattcatatcatgcttttcaaaatattaaatggtgtgtttcatgcgaaaacattctatgtggaagttgctctaaaatatcatataaatctattttctaagtttgtaataattaaaacttaattaatcgtacgttaataccacattgttatgcgtaaaacacttcatcttcatttacatgagtttcaaacacatagtctaattctatcactccgaagtattttaggattctcatagacttcaatcttctttttatatgtctgtatgactttatgttgtcctttaaactgttcaccttaataatcgtcatttgattatcacggttcataagtcactggtttttcaaccacggttaatccatcggaggcccatgaagtactcgatctcaatagtggcagtgctacgtcaaattattttgatttaatgactgaccctcaatcgttcgcaagttgttatacgttgcacacgtgtataccgtgagcgcaacttatccattttttttgtttaaccacattttaattttctctctttaattaggtatctaattgttcttgacgacatcagcatggagcagtggaatgccatagaatcgatatttgagaacaatggtagaggcagcagggtaatcgtgacgacggccatcctctcggtcgccaacagttgcacggcctacaagtccggagccaacggcggatgctgcatccgtcgccatggctgcgtctacaagatgcagactctcggagaagcgcacgccaaggagctcgccctcggcggcggcagcgatcagcgaccgccggagctggagcacggctcggcgacgcttatggcgaagtgcgacggcctcccgctcgccctcgtcagcgtcgccaaccacctgcggtgcctgggcaatctcacggggcggcactgcgccgacctgtgccacctcctcggctccctcctgctcgacgagcgcaacgtcccgaggctcgccgggacggcgccgccgccgacagcttcgcgaggctccgccgggttctgatggacagctacgcgggcctccctgactacgccgccaggacctgcctgctgtacctggccgtcttccccaacgacggccgccgcctcaagaggagcgtgctcgtccggcggtggctggccgaagggtacgcgcgcggcggcgaggacgtgcttggcaacagcaccgacgtggacgtcgccgacggccacttcaggtcgttcgtcgaccagagcatcatcgtcgcccaccctgccgacgacgacgacgacgacgaccaccgcacgaggaggtgcaggactcacggcatcgtgcacgagttcgtcctgcacaagtccatcgccgagagcttcatcttctcctcccgtgctcctccgaggcgcaagagagtccgccacctctccatccaagcggcggcgggaacaccacgacggcggcgctgagcacgacggacctgtcttgcgtccgctcgctgaccgtcttcggagatggcggcgacgccgtctccaacctccgaaagtgcaagctcctcagagtccttgacctcgagcagtgcaccactgctctgagcgacgatcacctcgctgacatctgcaagctctggaacctaagatacctaagcatagggatgagcagcaatgtcaccatgctgccagacaatatccgaaggctgaaactcttggagacgatccatctcagcaagaccaaggtgacaatgctgccactacaagtcgtcggcctgccatgcctagctcacctggtcggaaagttcaagcttctcctcccagatcaacgtgggaagaagacggtggtgatcagcaacgagctcgagaagctcgcgaagaagagcaacctccagacgctcgccggcttcgtcgccgacgagagccagcaagcgtttccgcagctgatgaggcacatgaggaagctgatcaaggtcaagatatggtgcgagttcggaggagaagaatccgacagtgtctcgacgacggcgacggatcacctcgccgacgctatcaggagctacatcgaggcacccaaggttgaagagaccgacgcacgctcgctgtcaatcgacatggagcaatgctcgaagcagctgatcaggtcatgtcatggagagagtaagctcctgcactccctgaagcctccatgccgcagctacctcacctcgctgaagcttcatggcgacctgttccggctgcacgggctcatctccatgctcaagaacctctacgagctctgcctctcgtcgacgacgacgaccctgaccagggatctcgtatcagccatcggcggattgcctcttcttcttcgcctcaagctggtggcgaatcacatcgagcatttcgccataggagccggggagttcagaagcttgcaacacctgctcctcgtggtgcatcgtcagaatcccatcctgctgccaaagatcgaggagggagcactgcctcagctcgtctctctcgagctgctctgcaagcatctgcgcggcctctccgggatccagatcagacacctccagcgtctcaaggaggtcgcactcgattctcgagtgagcgagggcacgaagcgagagtgggaggcagaggccaggaggcatccgaacaggcccagcatcttgctcctgaagaacagttacagtactgtcctgcctgacgacactgacagattggatgatcagatggacggggagcttgctcgggagaaatctgcacctgatgatgatgctggcaaccaggagcagattgcggaggtggaatcagaaagcagtgcatttcaattggcgaattccactatgaataattcagtcgctggaaaggaatcaacagctgatgatgctgatgaagaaggattgggaagcactaatgcagtgcccatggagcagataaattctactggctccatcaatgagaccgaggtctccaatagagggaaattcacaatgtcatattttgaggactgctgtccctaccatgaggtaataaactataaatttggcacatattatgtgaattcaactgcatttgagatattatttaattaaggtt

SEQ ID NO: 21560 - DNA, 2064 bp, Oryza sativa
ttcccctgcttttttttgttctggctgctaaatgaccggatggatcaaaacgcaccgatccatcatctcgtgatttttcttaacctttccgtgacctgcaccgttgtggcagcaggacctccactgtgcgtccgccgtggcagcagccaattcctctggacgctcttcttctggcccgccgtcccgaccagctcaggcatgtatacaacagcccagacctgctcacggagcccgccgtcgggaaaggccacgtctcggcgtaagacacaggggtgtaggtcgtgcgatggtggcatggcggccggggaccggttcccgaccctatgcggcgtcttcccggatgtcttcaggcttcagcaacaggttatgtgacacgtcactgccgcgcccttacaccgacagtttcctcaccgtcggcgcctacgagcttgtaacggggcgtgtccaatcgtcgtcggcgcggtgggctccttcctgaggctctgctccatcgtgtactgcctcctcattggcttctgcagctacgagatgtgtacagctccggctagctcaacatcgccaggcgccagcaacaacggcggcggtggcatctctacaggaactttcttttgcatgacgtctgaaggtgagcactccaatgaccaatcacatgaagtctgatgcactaaattaaaattacgacatatacatttcattaacagtctgtaacagattcccaggggcactgatctatgaacaaatttacattttcagtttcaggtgaagcacaaagaaagctgctcttcatttggtttaaagatatacatttctcttgtagtgatccaacacaaattcagcagttccctaccttggttaacctgaatgcttcactcttgagagatgtatatgttgctaaaatatgcctgataaaaagaagtcagtaaacttacccccattctcatgcatataccatcattaaaaaatattaccgtagcgttagcacgggcacattactagtgtcttataacgttgttgcgctaggaatctgtaaatgttatccactgtttcccttgcactgttccatgcagtcatctcattaattatataggggtccatatgaacccaaccatgaaatagccatgctttgggcaattttgaatcttcattgaacaacgcaaaaaaagaagacgtgagttatctgcactcggcgaatattcaatgttacatacgacgggctaaggaatgaaataaaattaggcctaaaagattccgggtagaagctaaaagcgactaggttcattatatctaagtcacgatcaacttctaacggatcttggaaaactttaaacaatggccatttacattaaagatgttaccttcgtcgtctcgcagcgtgacggctccatgtgatgaaacatcgacgacggtatatggatccattcatttactttgaagtttcctatgtccgaaaagcttcacccgtgagttgaacaacagcacctcgtcccctgccttgaactccttgtgcttgatccgcttatcatgccatcttttggttatatctttatagatcttggcattattgtggtaggccttgtccctccattccttcagctcagagagctgcatcttcctgtgctatcggctccctttaagtccatgttccaagtccggatagcccagtgcgccctgtgttccaactctaccggaaggtgagaagtcttcccgtagacaagttggttgctaacatgccagggtgtcttataagcagccctatatgcccaaagtgcatcaggtagcttgttcttccatgccttcccatctcattaacagtcttctgcagaatattcttgatctgtttgttcactactacaaaaaccttcataggtaccggccttataggtgccggttcatttaaaaccgacacctataggccctttcccacgtccgcaagatgaaaaaaataaagaaccgacacctttacgaagtataggtgccggttcattagttaaaatcggtaccaatactataggtattggttttttaaatagaaccggcacctataatatagaaccggcccatgtc

SEQ ID NO: 21561 - DNA, 4974 bp, Oryza sativa
attggtgccggctggcaaaccggcaccaattgccggttgggaaccgacaccaataggggttttttacttgtggttgcttgtttatgcctattcacttgtctggggatgatacggagtgggaatgttgtgctgagccctaagttcttgcaaaaagtttcggaaggtcttatcgatgaaatgagaccctccgtcacttatcaccatccgcggagttccaaaacaagggaagataatctcatggaacatccggcaggcgtgcttggcctctgtggccctgcatggcattccttctacccacttcgacacatagtcaacggccatcaggatatactcgcagtcataggactttgggaaaggtccaatgaagtcgatgccccatacatcaaatagcttgacttgcaggttgtatgtcagtggcatcgtatcccaagcagtgatccctccatgcttctggtaccttgtgcatcttcgaacgaattcctttgtgtcatcacacattgttggccaaaagaatccattctgccagatctttgcgtgtgtcctgaatgctccatagtgacctccatatggggtagcatgacacacttctcaatgatcttcatgccttcatctactggaacgcatctccgtagtagaccgtctgaacagactttgtaaaggtaaggtgcatcccacaagtgcctgcggctcttgtagatcaacctcttcttattctctcccggtggcacatgccccgcgaccatggagttgatgatgattgcataccacgggtcagaatctgtgactttcaacagcatgtcatctcacagatagtcatttatcggtagctcctgcatgttagtgatttgcatacgcgacaaatgatctgcaacaaaattctctaccccttttcatccttaatttgtatgtcaaattcttggagtagaagaatccacctaattagccgaggttttgcatctttttagtgagtaggtattttagtgcaacatggttagtacaaactattaccttagctcccactaaatatgacctaaatttatcaatggcaaacactatggctaggagctctttttccgttgtggcataattaagctgagctctagtaaaaattttactagcatatgtgatagcaaggtgctttttatccttagtttgcccaagaacagcgctgacagcaaaatcactagcatcacacatgatttcaatcggcagcaaccaatcagggggttggatgattggtgctgagatgagtgattttaaaggattttagacactcatcatcaaagtcaaacggggcatccttagctagcaaggtagttaggggtctagtgattttagagaaatcttttatgaaacgcctatagaaccccgcaagactcaagaagctatggactcccttgacattggcaggaggtggtaactatcgaattactacgatttttgctctgtccacctgaactccccttacggagatttgatatcctagtactattccttcacgaaccatgaagtgtcactttttccaattaagtaccaagtcgttttcctgacatctttgcaagaccctatctaagttctccagacaatgatcgaaagttttatcatagtaaaatcgtcgatcatgtcaaagaaaatagacaacatgcatctttgaaatgacgctggtgcactacacaacccaaacgacattcttcggtatgcatacattctgtatgggcacgtgaacgtgatcttactttgatcatcgggatggatggggatttggtgataaccagaatacccatcaaggaaacaaaagaaggaatggttcgctagccgctcaagcattacatcaattaaaggcagcgggaagtgatctttcttagtagccttgttgagtttcctatagtcaatacacatcctccatcacgtgacggtttgttgtgggcaactcgttgttcgagttttcaagaccatcatgcctcccttcttaggcactacttggacagggctaactgttggtatttcttacgatcacaaatagaatccgcaagcgcacggatatactgatgtagtacttcccctacggagtattccaagggtaccgaatcgaagggaacatgtgtgattaatttttcctctggttcatccaaggacaccaagcaaatgataggctaagatagagaggatttactggtgagaaatagtgtctagggaaatcttaactttaatcctagcacgatacttcaggcattggcaacccgctattcctagatgtcgctctactacgtacccggacagggacgacataagtgctcttgagggctgtcaccacctctacacctacctcaaatgtactgtgggatacacagcaattactggataaaattacctaaacaccacgtctaagcaattaatatatactttagtgtttataactcaccaaagcaatcactatattttagttgattatagtgaacaataatcccgtgtgataattaggaactaaccaagagataattctcacaaaataagtctaaattactcaggaagataattctattgatattagagtaatgaacagaagaaaagaaacaagagaagattatcgacagctccggaattcttccgacttcttctactctactctcttcgtaattctagtatacaaatagtacaatagagccttttataattcagctcaagcttgtaagcgtgtgaagaagtgaaggagtgaagctcttaaataggcaggtatgacggttgtaactactgcgaaatatctgaagtaccccacaactgctatcaggagaagatctggagtgttccagcacaacaagggattggcttttcaatgatgacaaaaatcatcactataactatatttttatcaaagttgctaccttgtgacgaacttatgattcgttgctatgtcatcactgaaattggcgtcacaaataacatagtgatgattttttttcaccacaaatactaattgtatttgtgaccaaaagtcttgtaactaatgatcataacaatagtgatagttaaatacgagatgtactagtgaccgcaacgacatcacaggtgtactcactccttccaaaactctaaaacctatttcattctttggtttttccaaaagtctaagtcctatttgtagtcattatgtgctaaattaaattgttgataggaacccaagaagccattttaatgcttattggtttggtcacatggtgaaagaattaattgctttttggtcttggtgcaaaaagaaataggactcacatttttggaaggagggagtacaagattgtgatggattatttcctcacgttttgttagtaattagtgagaatcatggtcacagttgtatgattcaataatgataaattttcatcacatattattgatatactgaaaacaatttctcacaagttaatttgttatagtgacgagattatataacgctatgaggaaattttaacttcaacaatacatctattgtgaggaaactgcattttattgtggcaatcttttcaccagataatattagcatattgcattagttttttggcaaaatttgctacaggacacttgaaaaacgtgtaattagctgagagacaccgcaaaaacgagacacggctgatgaacactacaaaaattgtgtaattggctataggacaccgaagacaatattttataatatccgggtcaaaagtggtaagaaatttttcgaaatggcaagattgcccctggctccaatcccatcttcctccacctgaaatcacaccaaaagaaaaatagcagggagaagccgccggcgaggttgtccacggcagggagcggataggagcgaccgcacgccaggagcggccgacggcgcggctgtgcgtggagcgcgagctggaggcggctgtgcgcgaggccggcgacggcagcgcggagcgtgagcaggaggtggccgtgagcgaggaggctgttgaacgttggccgatacgaggcttgctgcggccgccggtctcgccgttacacctacacatccattatcttgggtctcgcaatgccggccaaggcgaggacgccctgtctctattcgccggcaggcaatgagccggcgtgacgccgaacaaggtgaccctcctcggtgtgctgtcgcgccggactcgtcgaggaggggctccagcaactcaacgccaagccagaaccacgcatcgagcattacggctgcgtcgtcgacatgctcagccgcgccgggagactagacgaggcagaggagctcgtcgcggcaatgccaatacaccctgacgcgctcatctggggctcgctgctcgccgcatgccgcgcgcatggcaaagttgagcgcgccgagcgggtgatgcggcggcgcaccaccgacgccgatgcggacgccggcgactacgtgctgatgtcgaacacttacgcgtcgaatggccggcacggcgaggcggtgaaggtgaggaggcagatgaggaggaacgagatcgacaaggtccccggctgcagcctcatcgagatcgacggcgtcgtcaacgaattcgaagcaatcccagcaaattccatccgataaaaacacaacaagattcatcaaagaacaggttatccgagtggtcgtggttttcggtgccggagatggcgccctcgtcggcggggacgaagacgccggtctcatggtcgggcacccacgcgtcctccgggcccgccctccaccgtctcctcctccgggagcgcctccacgttcttgcggttcagtgccgcctccaccaaggttctgggattcaattgcagaaaaatttcgggccttaccgaaatgggcgaaattcggaaatttcggaattttcggacaaaatttggccgaatttgttgcaaaatttgaaccatcattagaaaatttgaggcaatttgttaacaaccaatagataaaacagaaaaaaatgaataggcaatcatacgaggatcaacacacaaggagaa

SEQ ID NO: 21562 - DNA, 3000 bp, Oryza sativa
tgcactggggggtgtgtcttgttgagtacgggggttgtactcagtcttgctcaatttttcccaaaccccaaaagaggagttcctaaaggatgaggctttggtgtctagctcgtgcctgccgtcaagcgcctgtggtcgtcgccctagtcttccgctgcttctcgtttgtctttgtgtgtgctgggccttcgtcgcctatgtaataaattaactatttacgcttccgcttgttaaactctgaattgtatcaacttttggtgtaccttgcctcctgggacaaggataatgcacgcacgtcaggaacgcccgttgggttatttccggtcgtgacaggtttaaaatcaagcaccgactcttctaataccagaaataatcccttcttcacattatagcaagatgcttgttgtgacaaatcatttgctctagaattatcatgcctagcaatatatctaatagcaaaattatcaaaattggcaataatatccaagcatgagtcaagatacctatttagtgatccgtcctagcatttgtagactctggcaacttgttgcaccaccaattctgaatcaccaaaaacttccacgtgcttatctccaaccaactccatcacttgtaagccgaataataaagcatcgtattcgggttgattatttgtacaataatacttcaaacggaccgatgcctcataacacatgccattaggtgaaaacaaaactacccctatgccttaaccatctttgcaagaagaaccatcaaaataaatctttcaaggtataacttcaactaagcaaacctcctcctcataagcaatatccacatgatggtctactaaaaaatcacatacaatttggcctctcatagattttaatggttcataagccaaatcatattcaatcaaagcatatgcccacttgccaattctcccacttagaattggcctttgtaacatgtgtttaataacatcggcttgacaagcaactatgcatgcactagataacaaataatgcctcaatttggtacaagcatagtataagcataaataaaatctctttataaagacataccttgtttcggcatccaaaagacggcggctcaaatatgtaatgatatattccttgccatcttcctcttgcgtcaaaacggcaccaatgactttgtctttggaggcaatacataaccgaaaaggctttacggttttaggcgcccgcacaacgggtgaagtagacaaatacttcttcaaccctttaaatgcctcttgttgttttgccccccaagtaaaatcggcttattttttcaagcgaagtatagggacaaaagcatcgattttacccgctaggttagaaataaatcttctcaaataattcgccttacctagcaacttttgaacttccttcttgcgtgtcagtgctttgaaatcacgaatcttctctatcttcttaggatcaatctcgactcatctctcatgcaccatgaatcctaagaacctcaccgccgacacaccaaaagcacatttaagtgggttcatcttcaaaccagaccggcgcatcctttcaaaagctaacctcaaatcggctatatgtccctccataccattcgatttgacaacaatatcatcaatatagatttctaagataatacctaacaaatcatggaagatcaaattcattgccctttgatatgttgcaccgacgttcttcgatcaaaagtcatgacaacccactcaagcaaaccaacaaatcctgggcacctaaaagccgtcttgtacatatcctcctccgccataaagatttgattgtagccggcattaccatccaaaaagctaatcaccttatgacccgagacaccattgatcatcatgtcggctataggcataggatattcatctttgggagtagctttatttaaatctctaaagtctttgcaaactctaatcttacaactcccctttttttccaccgggactatgctagaaacccattccgcataacaacgtggcctaataaacccatccttcaacaaccgatcaatctcctctttgactcggtcatatagcaaaggattaaaacgacgaggtggttgttaataaggcctaaaacctggtttgattggaagccgatgctcaacaagctcacggctaagacccgggatctcatgatactcccatgcaaagcaatccacatactccttaagtagctcgattattttaaccttataatcggctctcaaatttttatttataaatgtcggccttggcttaattccatcacctatgtctacttcctccaatggattggccgatgtaaaccctttaccaagcttctccacttcatcaaaatcttcaatagtttcaccaatatcgttctttgtagaccgatattcttgcaccctcttttgcaacaactctaaattagcttctttactcattatacaaattgatatggcctagccgtgctatacaagccggctttacagagatgcaagaatagctagagagatccatccccgacaagcattgaatattcccatgacgccactcaaaagtagcatcggtcattgcaacctcggccgatgtatcgcttgaacaatctcaacatcattgatcgtctcattgaattaaacattgatgcaaggtagaaggaacaccacaattggcatggattccaccacgacccaaaataacattgtagttacctttcacatcaacaatgaaaaaaacggttggtagggtcttgtttccacggtaaactccgccgaaaaaatacccttcgcctcggtggttcaccattgaagccaatgaaaatcatgttagtttttttcaacttattattttcacgcccattttttgaacaacgagtacggcatcaaattcacggcggcacctccatccaatagcatcctaaagacctgcttcccatcaacatgaccttttaaataaaaagggttcaagggacggttttatttaatggggtttttcaaaaccggaatcttaaggacttagtc

SEQ ID NO: 21563 - DNA, 1686 bp, Oryza sativa
ccggtcagatcggcaaaaggcaccggtcagaccggccagatgcgccggtccgaccgatattaggtcggcggtcagaccggcctgaggcgccagtcagaccgtcgttgggtcggcggtcagaccggccgtatgtctaccgccagaccggctagagggcctggtcagaccggccgactatgataagctggtctcggcttcggatttgttgcttgaggactccccaacttcatctccagaaggtattggcacatcatgagaccccactttgatggtaatcaccttaacacgctttccttccctcttttcttccttaacccgatttttaccataaaaccggccattgtttggtgaagacaaacgctcatgaattggcctccttggtcctccccacccttggttgaattgcattggaggcatatgattgaacattggcggtgttgtcccccatggcatgtagtaaggataaggataacccggcggcggcattgggtaaggcccccatgacatgtcaagtgaatgatgatatggaggtgattgcgaccgtcttgatgagtgaccaaatcgctccctaggaggtaatcttggtcttttccctttattgcgagctctctcaccaccttgcttctcatacttctccaaaagcatatcgaaggtcaccttagtcttcttaggagctttagaagttgagacttcgctcctattctctttccacacaccaaagactggattctttggcaccatcatctttggcctagttcaccaatgatcactcattttcccttagtagattcggcttgctccggccgaatcaacaccttcttatcattgaaattaattgtattcaccagaaaaggatcatgattaagcttcatcttggaaccatcggtgaacttcaatcgtccttcatctatggccgattgaacctatcatcgaaacacattgcaatcattagtagaatgagagtgagaatcatgccatttacaataagcacgatgttggtatttaatacggtcacagataaaatccgcaagcgcacggatataccaatgtagcacttcccctacggagtattccaagggtatcgaatccaagggaacgtgtgggggcaaattttcttccaggttatcccaggatcccacgcaaaagataggttgggatagagaaggattactagtgagaaggagaaacagtatctagggaaagcttaactttaatcctaatgcaatactttaaggcactggcacccgctgttcccagatgtcactctactacgtatccagacagggaggacttaagtgatctcgagggctgtcaccacctctacacccacctaaaacgtactgtgggatacacagcaattacgggataacaattacctaaacaccacgtctaagcaattaatatttacttcagtgtttataactcaccaaagcaatcactatattttagttgattatagtgaacaataatcacgtatgctatttaggaattaaccaagagataattctcacaagataaatctaaattactcaagaagaatattatattaaattcagagtaataaatagaataaaagaaataggagaaaattaccgacaactccggaattcttctgactccttttactctactctcttcctattctagtatacaatatagtacaatagagcctcttataatttatct

SEQ ID NO: 21564 - DNA, 4039 bp, Oryza sativa
  unsure (1)..(4039): unsure at all n locations
aggcctgatggtacaatcgaaaagtacaaggcaaggcttgtggccaagggttatacccaaaaggaaggcgaggatttcttcgacacatattcaccagttgctcgcttgactacgattcgagtactacttgctctggcagcctctcatggtcttctcgtccatcagatggacgttaagacagctttcctaaacggagagctggaggaggagatctatatggatcaaccagacgggtatgtactagaaggtcaggagggaatggtgtgtaaactattgaaatccttgtatggcctcaagcaagcacctaagcaatggcatgagaagtttgacaccacgcttacagctgcaggctttgttgtgaacgaagctgacaaatgtgtatactatcgctatggtgggggagaaggggtgatcttgtgcttgtatgtcgatgacatactgatctttgggaccagtcttaatgtgattgaggaggtcaaagactatctgtccaagagttttgaaatgaaggatttgggagaggctgatgttattcttaacatcaaattacaaagaggagatgagggtgggattacacttgtgcaatcccactacgtggacaaggttttgagtcgctttggatatagtgactgcaagccagctcctactccttatgatcccagcgtgctattaaggaaaaatcgaagaatagcaagggatcaactgagatactctcaaatcattggttcattgatgtacttggctagcgcaacgaggcctgacatctcatttgctgtaagcaagctgagctggtttgtctcaaatccgggagatgatcattggcaggctctggaaagagtaatgcgctatctaaagggcactatgagctatggaattcactataccgggtatccaaaagtactagaagggtatagtgactcaaactggatatctgatgctgatgagataaaagccacaagtggatatgtgttcacacttggaggtggcgctgtttcctggaagtcttgcaagcagaccatcttaacgaggtcaacaatggaagcagaacttacagcactagatactgcgacagttgaggccgagtggcttcgtgaactcctgatggatttgccggtggttgaaaaaccagtgccagctatcctaatgaactgcgataatcaaacagtgattattaaagtgaacagttcaaaggacaacatgaagtcatctagacacatcaagagaagactgaaatctgtcagaaagcagaaaaactccggagtgatagcattggactatgtccaaacggctagaaatctggcagaccagtttaccaaggggctaccacgtaatgtgatagacagtgcatcgagggaaatgggcttgatacccacctaaggttgcataatagtggaaacctgtccattgtgatcggagatcccgtgaatttggatggtgaaacaaactattgtgtgactgagagaagagacccttgaaaagggctcatttccatgatgtgcttctcttctttcctgcatggtaggatggcttatgtcttaatgtgatccgagtggcttttccaagcagagatgttgacctgcagaacatctcagaaggaacacacctatatgagtttgactgctagtcacagtctatgaggtttgggcaatctctagatactcatgaaaggcctggagtttgacttatatgctccaaacagaggggatgcgaacggcagcccagtaccagtcaaggttctgagtgaaacctgatcacacaaaacttacaattcaaggcatagtccattgttcagttgtggtctgatgtagctcatttcctaggtggaagttcaacttaacagtctccaccaaaaccctggtatatcaaacaggcacaacattgagaacatttcttatgagccttgaaatttggtggggattgttagaataattgggctaggcccaatttataataattaaatctcaaaggcccataataaatgttgaggataataataccacctcaggatttaagcgagaaatatctcaacctaaatagggagttattagaggctcctgttgaccagttgaggtaggggtcggaatgccacacgcgcgcgcgcgcgccgggccgggccgtgggcgtgggcgagggcgagggcgaggcgaggcgtggcgtggctggctggcggtgtgcgtgcgtcacgtcacaatcctttgccagccactaacccacgttcccacgattccctccgcaacagcgcgtccacgttctttctcctgatagataangaggccgcgagtccgatccgacttcttagcttttttcccggtgttagtttctccttctccgcgcctgagttgctccgcttccccgcttctgatctcttgcgcgcacgagagattggaagaagcagtgcctccgaaaccacacctttgcctgagatctgcaccgggtaggcgggagatcaggtttttggggagtgcctcctgcacgactgctcatcgccatgtctggagttgctgctgccgccgctaccggtggaggtggtacgccgccgccgacaggagctggtgcgccgccgccgacaggagctggtgcgccaggaggaggtgccgtgaacgactacaacaacggaggcaattctgcctcaccatccagcggagggccattctcggggtataatcttctcctcctgctactgctgttagcgctattcctgttcccattgttagcgctatactgtgtgcgctatgttcttgttcctgttctacatgatgcctctagcatgttatcgcgttactggtatgttcctgtttctgacattcatgatgcgcatagtatgctactggttatgttaagatcaccctacactgcttatgccatgatcattgtttcaatttcttggattaaaatatgccgaataatgactatatttccaacacaacctagttcatctgcataccgcttcgcttcttctttctcccatgtgtcctgttcatcttcttcccagcgccgagcacatgtcgccatgaactccaagacgccggctgatgcttgaggatacctagttgatattttttttgcaaaaattggaggataggctagagcctgatggagcctacctgctagaatcgccactggccgtcacctttagggtttgggttttgcttattctgtcaagaacagtttcgccgctagatcggtttgtaaggcccgaacttgtgagcttaatcattcatctgcaattttggttgtattcttctttgttcctatttgtgttctttgattcgcaaatagggattagccttctcggcaaggtcgtccgcgtttcaacacgggtgataaccagaggagacatggtgctgcgattgcagggctcaagagcgtgttcgttcaagaagccgaatcgatttgtgtcgcgactccacccaaatcattgattatcagaaccttccgaaagatcgaaccctagtccacgtcactttccacgcaaatagaacaattgtgctattggaatagcgatagcagaactacaatccgcatagttcagaaattcaagtgcataaggaaagatgtaatctcaccatttgtgagcacatagttagaaaataaaacttttcttgctttacccgcatgcaggccagtcatttgttatcagaatagaatgcatcaagaattcgacatacataacatgtataagaataagtgattaatagcctgtaacatgaaatatacgatgatacccagttgcccattgcagataccaaaacacataccccatggcagcttgtttaatataactgatttccaacgagacagacaaacacaagaaaatctttgttagcaatactaatggacgtgcagtgaaatagagggatttgcagtcttcaagcaggtaagagtgtggggtgcagtttgcttcaatccacattatgctacttgcaagattgcctaagaagaattcagactacatgctgaaaataataactcactgattcatcaggtcaatacattaaaatactgatggatcattaagtctacataactagctaataaa

SEQ ID NO: 21565 - DNA, 3082 bp, Oryza sativa
cccaactgacatgtgggctctcagtcaaattagtataaatgccaccgtctaggattgataaacttgtaatgcttgtattgtagaacttggtacaactgtaccctatctttaaactgtgataatatctctctgcttgtagagatttgtggttgaaggattgaactgtaagcctgtgatgggtaaacggatatgcccgcgagcacatggcgcccgcgggcgatgggcatagacaatgttccttccacgtcatgtagtaacgggcatgcccgcgggcacgagcatgggtagtcactacccgtgcccgtcgtgcctgccatccctaaatgcaatgataatgaaggggtggatcggacgctcaatgttcaaacttgagagcccagaaaataatttatattgcggcgaagcccagaagcttgtctatttttgaaaatgaataagtccacttgccgtccctcatctttatgtcgagtttaattaacatcccaaaactgcaataccataaatcttcacctccccccaaaaaaaaaataaaactttacaaaaccgttcaagtgaggtcccttggcagtatggatatttgttttggatgacgtggcatcttagtcatcggaaaaaaaagttaaaaagaacatatggggccggcccacatgtaagtgccatatcaccttcctttgccttctttccctctcttttcaccaacgggtagcacgcagtgggaatgggcttcagctccatgctgttatccatgcttgcctctgtcacgacgaactcccaacggaaatcggcttcggctccatgatgttggagctcatcagcgcggattccatcggctccgacaccggcacaaccatcgtgcgcaacttcttcggcatggcggctctacgtctcgctaatttttagagaaaaggtcagagacctggcttttacttgaaagccacatcggcggtgtcttttaacagctggggatgccagcgaaccatacaagagcaaaacaagactagtaagcttaaccacagcaaggagcttaggagcagaccaaaagctgaacaaacacttgacaacaacctctaaagccaacacaccaacagctaacgctaaccaactaacccacacctaatctcggatgccgtaggcctgtcatcacctttatttcttctgtcatagcttctagcttgatctcatcgttaggtttgaagagcctcctccactgcaaaagattagagataatttgaaagggcaaagttagtgtcacgcccagaaatttactagtaatttccgaactagtttgttgtcacgctcagaaattcactagtaatttccgaacttatttgtgcataaaatcctcgtccaggaatcagccgaggtacacaaactgacaatttaatatacagaatcatcaataatagtgttacatactttcaaaagaaaagaaaactgcaacggaattacggtctagcgaagctccggctccactcccacaggcagctcaactggggtataagccaaacgtcttctccttctggatcctttttcttcaactgaggttgattgattattgcaagaatgagcatatgacatactcaacaagccacacagcaaatatgcaagtgcacaaggataccaaaggatggcataatataggctcatttgcaaaacagcatttagcaaaacattaagaggagtaaaacagtggagtaattaatcagaaattttaatcaacactgaacagcacacccatgctgcacaggcccaaccatcctgaacaaccatacccggctgcacagatctatctccaaaccaggaatgtaccattccaaactaggagctaaattaattaccatcaattaccacattattattaatgagtagtgtgggactaatcacgaaagacattgttcgacccgcccataaccgcgggcacggctattcgaatagttttactctggccagaggtgtactactgtacccacaagacacatctccacaatatgtcaccatatcatcatgtgcccatgctgaacatgtcaccatttgtgtagttgtgacaagacccctcgcataacttaacccaaagcagtgcaccgttcctggattgtagtcaccccctcaaaaaccagaggcatggactccccagcgacccccgtgggcttatctccgccacttctcagtctggtgctccgcaatgagccttgttatacaaagtgtccagctgttgcccattctggcttgtggttggcacggttaatgtttcacaaccgaaactcgtgaaccggtccttaattgtcatgagcacgaccatcaaaaccatgtgctcacaacacaccattatcaagttttagttggcacattaattaattaaccaatcacgattgatcatcgtgagctatcattaaatatccatcattaagtaatagtgaaacattagttatcccaattgtgtgctaatgtttctaagcatggctaagtaattatgtctaacatctagctgaacaaatatataaagctcaactagtcaaattataataacccaaggtatcaaggaatagagtaatcaatgcaaacagaccataacaaaggaataagttcacaccacccgattgtaacactagaaatatgggccttcaaaaactttttaataaattgcatcatgccgattttatttgcctattttattggaatttggtttcaaagtttaccgatcgcgaataaggaataattaattaggaataaacactaaaattaaattggcaaaataactaattaaaataaagattaggtgagtttggaaataaataaaatattatcgcgaccatattggtaacaattgaatttaggtgcgatggaataagaattaaccctaattaaattcgaataaattaaatataaaaataaaaataaaatatgggtagtgataatctaagttagagcaacacaaatattgtgtaaacttgatttgtgcaaaaattagaaatattaggacaagatttgaataggaaaaacaaccaaattggaaaaataggaaaagtcactgttcattgccccataggtgttcgcttgaggtcactagccctaaccccccccc

SEQ ID NO: 21566 - DNA, 1191 bp, Oryza sativa
cgaatgaggggttcgggtctctcaagtacttcatgtttgtctgtacagcaccatgcatgacttttgtggaaggagcaatgccgagtgtgcaaagattaaatctaaggttcaatgccaacgagttcaagcagtatgactctaaggagacagggttggaacacttggtcgcccttgcagagatctctgcaagaattgggggcactgatgatgatgaatcaaacaaaactgaagtggagtctgccttgaggactgcaattcgcaagcatccgacgccgagcactcttatggttgatatacaatgggtggattggatctttggtgctgaagggagagacttggatgaagatttggcacaacaagatgatcacgggtatggatttttcattctattcccaggttacaacttacaaggattattgagcttctttctttctctgccgtggcttctatctttaccttctatgcatcttcaacctgacttgatgattgtttgaaaccaattttaatggaagttaaatgttattgttgtgaccctgaatcaggttttgtatgctaccggaatcctcttcacgtcttcagagtagaggtaattttgtttcttgtcattttacagttacagttcatctacttaaggaattaatgggaggtcctatattttctcgggtacctagaaggtgtggttcctagtcttacctccttaagaaccgtagaatgttggccctaacacttggatcaaagaacgaaaggtgtatgcactatagtatcctttatatattgcacaagtcaagacatttgttaaaacacacccagtgctagtaatttgtttactgagatatgaattatcgccaaatacccatactgagcctattagtaaaatatttacgaggtgtttgaggacagcataactttcagtaaagaatttactacgtgaggtgtgtgttttaggtattgcgcatcttgggtgcattttagcgcaaacgtgtataatatatatcccatggtactaactcatgtcttaaccataattgcacaccaacacaaaacatacactactacagagataagtatcgaagaagacatgcccaccggtgcggaagggacggtgattgtgccccacacaatggagcagttcgccctccacatgagccaagccaagcaatcccacaagctcgtagtcatccagttcactac

SEQ ID NO: 21567 - DNA, 6210 bp, Oryza sativa
gagttgctccgagccaaaattcgaaggcacacagcttctccttacttcctccgttgataatgacttcttttatcgtctttgtctagtatatatatggcacttatatagttaactaggaagggcaccttgtttaatgtagctttcatttttattatgaatgttaaggatgatattatattgttgaagtatttttttactccttgtaaacatgtattggttaataacgaagtagtttggacattagttatgattttcttctgattacccttgcaacatataaactccatactaaaattattaaaaaaaatgtgtcataataatggagttggtttatatctatttgtactatgtgtgatttttttaaaatatctagcatatcagtttccaaaattttactaacaatttttcttgtatgctatcaatgactttatggatttattatagtaatgaaaaatatttttcattaaaacgtagctaatagattactttatttaagtaaaggtagacttatattggttatactacctccgtcacagcacgcatcatgaacgataaatcaaatgaaattgatgaatatacatgacaatcaaagaactaggcatagaggctgtagaggctaggtccttctcctagcctcctcctgccatgcatggcagctactgcgtccctcgatttccctgccatggcagctgtggttgtcgatgatttggcggcaatctggcgcacgaaggtcaagtatgagcaaagcggcaataaatgagtctgttcgggaagcttctagctgatatagtttctctcataattaaaaggtcccctaaataatatagctttgattctaaaaaactgtagttatttaatatagaaaataaactagaaattaatcaaacgctgggaaacttagctttttcacattctcagaaattgaccaccaaccaactacttcccgtaatcttaagcaccctaaacagacgcggtgatgacatgcgtcgcttctgcttctagccgcgtagtccgcatccccagcaacgagcaaagcggagccgagccgcgcttccacgcgtggagatcgtgcatgcggctagctgtccgtctcttcacgcaattggagccgtgcagtcgcaccataagatcccttcctcaaccacttgtcgctcatctggataagggctgctcgggtgaggtttgtagccaggtatccaccaaattgccctacgcattgtagccaatgcaattagggatggcaatttgacatgtttgcctattacccatgggtaaaaaaaaaccccccccccctaatagaattaggtttattctccatttagtacccatgggttttttattaggtcaaaacctgtacccaacgggcatacggtgtcacgcctagaaattcccgaatagaatttcaagcagaatgtgcattaaattccccgtccaggaccagccggggtacacaaacgacaatgttgacattcagatccatgtcttacaaacatcataaaagtcttacataaatgcaacggaagaaaagaaagacaacaggagctaagccttgactaaactgcagcgggaacaccactccacaggcatcctcgacggcacgcacgaagcctactcctcagagaaaccttcatctgacccgaactcgaactctggggttgggaaaagtagagcaagactgagtactacccactgtactcagcaagtcataccggaataggggtatgatgcagggaattatcaaagaagagctagagcagttcatttgcataaagcgagcatttataaacagaagttgaaagattaaaccgttgtaataattaattaatatcaactatccactgcccaacgctaacccacgttgcgacaggcccaaccatccacctaaactatccaatttcaaaagattacactagggtgagactaatcacggtgaatctggttgaccgcccataaccgcgggcacggctattcgaatagttttactctgatcagaggtgtacaactgtacccacaagacacagccccacgacacgtttccatgcgccgacatgccaccacgacatatcagaaagaggccgtgacaggacccttcgcataaccccctctagccaagcacaccacacctcaggtttcacccccgtccccagcgggcaacgggcagtcccctctcgtgcctaggtgaatccggaaacgacagaggccgtcgcagggcccgccccgctccatcacgcccacccttgcctggatgcgtcgactagatgagagctacactacaagcccagccgttgcccacgctggcttgtggtaagtacgataagttctttcagggcatcccgcgaaccggtccttaactgccatgggtgcgaccagcaaaaccatgcacccacagcccaccatgtgatttattttaattaaccaacaccaaagcggtggcactaatccaacaaaaccattagaaccaacagtctaaacattaataggattttccccattgtgaactagttgaactaagcatggctaagcaattcctagtccaaactctaatcatgttgtaaccccaagctaacaaaggagcatggtatccaaaaagcatagctgtaacaataggtaaccatcccatagtaatattataaaacaatgcaatatttgaaagaaaacaatagagcatttgcaatataggatcaacatgttcaagtgacaagcatgacttgccttgctctgctgctggaggaacctcggcgactatttcgaagtacaccggagcgtcggaggagtcggaatctagcgacatacaaagcaaacaatgcaaacaggctataagactactgaaacagggaacaaaaccatttttaatggattctacacattactcttgatttactgagacttgaatgggcttaaacggagctcggatgaattagttatgaattttagaagattcactgtgtttattactataacaaaaattcttaaataatttattgcgcaatattttccagggctgacatcagcacggggaagcggcgctgacatgcggggcccaccagtcagcggctcgggagagagaggaagggcgccggcacgcggggcccactggtcagcggcggggggaaagaaaaggggcggcggcacccggctcggcttggctcaaggccggccgaccggccgcggcgacggcgcgcgcgcgaatgcgttgccggcggcgcatccggcggcggggcgacggcgcaaaacgacgcggaaacggcggcaacggatggcggcagcgaccgaaggcgacggcgagcgcgggcgacggcgacgcacgggggatcgggggaaggaaaggaaaggggtgggagtcctcaccgaatgggacggcggcgaccgtcgacgatgagccacgggaggacgacgtcggcgggcggacgagctccgagatgccctaagaaaggaaaagagagagattagagggagaggggtggtccacggcgggcggaaaccatggccgaaggcggcggtagagatggtgctcaccagagtgcgagggggtgagggctccggcgacgaacctcgacggaggaggggtgaacggggtggacctcggccgcgcgaacccaacggcgccgacggcgcggtgcggcggcaagtgtagcggcggctagaggcggccggagtagcgggagaggcggcggcggatgggcgcacggcgcgggagcaatggagggcacgggagagagcggtggaaaaagaaaatatgtggaggggagtgcgggcatgctttataggggctcgggagagacggatgtggccaaggcgctcccgatttcaccggcgacgtgggaggttgaaggtgggggagagagagagagagagagcggcgggattcaaatttgaatcccggccatctcggttgagggcgcggcgagagagagagggggagtgggtgcgggaggcgcggcgcacgcacgggcgtggccgatgtggaccggaggaggcggggtgcggcggatgggctacgtgggcgagtgcccggaggttggggaagggcccgacaggtgggccccacctgtcggcgaccccggggagaggagggaggcggccggcctggctgggcctcggcctgcggccggcccagcagggaggagggggaggaaggagagaatgggccggcggcccattcgaaaaaaggaggaaaaaaaaagggaggaaaaagaaaaagaagaaggaaaaaggattttccctggaattaaaatattgcttgctcaattttaattggttaaaattatttctagagctctgaaaattccactaaaaatcctgttaatgaatttcgacatgtagaactcaagaaaaattccacatgtcaaatccgattattatttgcattactttcttagggttttctcttgatttgcacctgcattttcttggggggtcgtttataaattaaattttaggcctgggaggagaacttcggggtgtgacaaacctaccccccttaaacggaatctcggccccgagattcggaggagctggtgaagaggtgcggatgggcggctttcaactcatcctccctttcccaggttgcttcctcttctgaatgatgactccactgaactcggcaaaacctgttgaccttgtttctggttcttctttcgctggtatcaagtatacgaatcggcttctccacgtatgttaggtcctcctggatatcaatgtgtttcgaatcagcctgttcttcaggtacccttaagcacttctttaattgggacacgtggaacacgtcatggataccgatcatattggatggaagttctaactgataagcaacttctccccttcgttccaagattttgtatggtcccacgaagcgtggtgccaacttgcctttcgtctgaaaacggtgtactccccggagcggagtgacacgaagatacacgtaatctcctgcctcaaaagtgagctcccttcggcggttatccgcgtagctcttctgtcgagactgggcaatcctcaacctttccctgatgattctgactttctcttctgcttccgctaatacctctgtcccgaacagttgacgctcgcctgtctgatcccagaagagaggtgtgcggcacttccggccgtataaagcttcaaacggtgccatctgtagactggcctggtagctgttgttgtacgagaattccgcatatggcaagcttttgtcccaagctccaccaaaatcgagagcgcaagctctcaacatatcttccaagatttgattgactcgctcggtctgaccatcagtttgcgggtgataggccgtgctgaaatttaaacgggtccccaattcttcctgcagcttctgccagaattttgaggtgaactgactccctcggtcagatacaatctttttgggtactccatgtaggcacatgattctcgaaaggtaaagctccgccaaccttttgcccgtatacgtggtatgtactggtatgaagtgagcaaccttagtgagtcgatccacgactacccagatcgagtcgtgacccgacgatgtccggggcagtcccgttataaagtccatcccaatctcctcccatttccattccaggatttgaagaggttggagtaaacctgctggtctttggtgctctgccttcactcgttggcaaacatcgcagagtgcgacgaattcagctatttctctcctcatgctgacccaccaaaacttttctttgaggtcttgatacattttagtgctgcctggatgaatggagtactgggtctgatgagcctcggtgagtatcagatccttcagttccttgtcgtcaggtacacacaatctttctcccaaccagattgtgccatgctcatcttcgtggaaatcccgggcttttccgaccctcatgttctttttcagctctgctatttcagaatcatttacttgagctgctctgacttgatccacgagcgtaggccgtgcctccagagcggctacaaacccgtgttcaacaattcccacgttgagatgctcaaactcctgccacaattcctcacacatgccctcgatgcatagggcagtgcagtaacttttccggcttaatgcgtctgccaccacattggctttacccgggtggtagtgaatactcatgtcatagtctttgattagttccaaccatcttcgttgtcggagatttaggtccggttgggtgaagatgtatttcagactcttatggtccg

SEQ ID NO: 21568 - DNA, 2406 bp, Oryza sativa
acttctcatctttcttaagcaaatgagtcatgggtcgggcgattctggagaagttttcgatgaatcggcggtaataacctgcaagtccaagaaaacttcgaatctgcgacacggtcttcggcggggtccatttggtaactgactccacgtttgatggatcaactgccacaccctgagctgtaatgacatggcccagaaatttgacttccgtcaaccagaagtcacacttgctgaacttggcgtatagctggtgctcctttaacttctcgagtactagacggagatgttgttcatgttcttcttcggacgttgaatagataagaatgtcgtcgatgaacaccacaacaaacttgtccagaaattccattaacactttgttcatcagattcatgaagaatgcgggtgcgttggtaagtccgaacgacataaccgtgcactcatatagcccgtaccgagtggtgaaggccgtcttcggaatatcctcctcccgaattctcaactggtggtagcctgatcgcaggtctatcttagaaaacactttagctcctttcagttgatcaaacaaatcatcgattcgcggcaaaggatatttgttcttgatggtgacctcgttgagtgcgcgataatcaacgcacatcctcttcgtcttatcctttttctctacaaaaatgaccggagcaccccaaggtgaagtacttggtcgaatgtaccctttctgcagctgctcatcaacctgcttcttgacctcggctaattcgttggccgccattctgtacggtctcttgtaaattggggcggttcccggtgccaagtcaatccggaatcaatctctctcttgggtggcatggtagtgaggtcttcgaggaacacttccggatactcgcagactatgggtatatcttccaatttcctcaaattcttctccacggtgtccactgggatttctgcttcaatctgattcaaagagaccccttgctttggtgagactagtgatttgtacaccacggtttctcccttctcgttggtcaaggtgactgtgcgattcgcacaatcgatgacccccttaaacttggtcagccaatccatcccaagaatgacatctaggtctttggattcgagaagaatgaggttggctagaaatggtgatctttgaatttctattgttatagaagggctgaattgaaccgaagtggagctattccctggggtatgaacccgcatcggtgtgctaagttcctctcttattaacccatgcatcccaacaaacttctttgaaatgaacgaatgcgttgcaccagaatcaaaaagtactgttgcagggattgagttaatagaaaacgtacccagtacaacctctggtgctgcttgtgcctcctccgcagatgcgtggttgacacgagcctggataaaccttggcccggcacgcctaggcttcgggcatttgtcagcgaagtggccaagctcaccacagttgaagcaggaccctggttttgctccagtctccttcttggcttgcgcgggcgggcctgactgtgccggtgccattggtgggcgtggagctgcaccgcggttggactgacctccatggtggttctgactgccactggcgccctggggaaagttgctagggttgaacgggcggtgctgaccaacgatcatggtggtaggtccaccctgctgcctgggagcgaagcgcggcctttggtgacttccctgaggtgccctgaactgtgcggctttctttttcctgtccatcttggtggcgtggatctctgaccgatggcttgtcaacaacttttaaacgtcagcgtagtccccaaatttcaagtgggtgggcaacttcgtcttccaaacccgccatgaacttttcctgcttttgggcgtcggtgcggacattctctggtgcatatcgcgcgaggcgattgaactcgtggaggtactctgtcacagtcctgttgcctgatggagtgcccggaattccctcttcttttgtgccacaaccccatctggcacctgcgccttcctgaagctacggcagaactctacccaagtgacttcagtacctggtgggcgggtggccatgtgattgtcccaccaagctgacgcgggaccttgaagctggtgtgtggcgaaagcaaccttctcctgatcattgcattgcaggagattcagcttcttctctatggcatggagccagtcattcgcctccatagggttggtggtgctggagaaggtgggtggcctgacacgtagaaactctggcaacttggactgagggggagggggaccaaactgttgatgctgctgttcggcgtgctgcagcatccgctggtgcatctgctggtgctggtgctgcatcatggctgccatcatctgggtctgatgtgccattacttggactagcgt

SEQ ID NO: 21569 - DNA, 4239 bp, Oryza sativa
aagaaaaacagaagctcaaaaactaaactttattaccaaagaatttaaaccggcattggtccgaacctgattaaaacccttaaaaaaaaccagccaaaatccttattaagacagccatatcataggcacatgatatcgaccgtcgactgaccccaagcaagcaacctaaacacacaaactaacaagcagaagctagacagtcgattaactaatggaaaacgagcctaatgctcggaacggctcctgcggtcggtggagtcgaaggcgtcctcctgctcgtcaccaggtccctctgagcgactcctggagcctggcagataagtctcgccgctgcccgactctgagccactggagctgctgctgctgagatcgcggctgccactgggagtagcagacaaccaacctccgttgccactggctggacccctggcggctgatgctggagcgaaggagagagcggacgcgggagctggagctggagctgcaggaactgcgggcggaactggaggtgctgcgggagctgctgatggaggtgggttcctgggcgcaagctggatgcgcacgggtgccgtcgtcgtcttgcggggtgtggtgcggatccggactcctcctggcgcgggaagaccctttaactgagcattctccctcttcaggcgcgctatctcgtccatcagagcgacgatcctcatgagcttcccatcgttcaaggccttggtcgccttgtgcaggtccgagtgcatcctatccaatccactcatcacagcacacatgtgaccaaaggtggtgtcgttctggccggttgtcggacggaaggtgctgacatcatcaccactggctcgacgagggtgaaaacggtatgccatgtcatggaagatgtagttgtggcgctcccgtagtctggccatcatcaggtatgctgcctcctgacaggcgtgatctgctgtgcctccggacgcctcaaccaccatgttagctaggcaggtacccacgtagccatggacctccaagcgaacacggtgaggaagctcgccactgagcggtggaaccgtcgtctactctggcgcgttggggtagcccaccaccagcgtcatgcgtgccaactctgccacaaaatcaatcatgccttctccgcggtggttgggtgggtgtccggccatctagagaagacaaaggagtaggatcaatgcatgctcaaatccaaatttaaataaagcaataaaagactcaaataagagaatcgaataagagcgaaattttatgcatagatcattttgcatgagtgcgaataaataagacagactcacataacgataaaataatggggaaattagatacatactaataataacaataagagctgaaataccttgcaacccatgttcctgagctaggacctaatgcatttcacccatcaaatcccaactgactaacgaataaatctcaagagttttactaaaactctagattgactcgttttgacaaatctcacttaaacgagcgaccaagatttttcccttgaaccacaagaacggatcccaattttcccggaacaaatccaattgccaagaacatatgcaatgaaaaggattcagagggcttttaggtttttccatttggcttgtcctacggtcaaggtcggctctaataccaacttgtcacgcccagaaattcccgaatagaatttcaagcagaatgtgcattaaattccccgtccaggaccagccggggtacatgtcacgcccggaaattcacaagtgatttccaaacttatttgtgcataaaatcctcgtccaggaatcagccgaggtacacaaactgacaatttaatatacagattcatcaaattaactaaaacgataagtacttacttaagaggcactaagtcctcaccaagaagaaaactgcagcggaaaataaaatctagcgaagctccggctccactcccacaggcagctcaactggggtatgagccaaacgtcttctccttcgcaacttgtcttcaactgaggttgattgattattgcaagaatgagcatatgacatactcaacaagccacacagcaaatatgcaagtgcacaaggataccaaaggatggcataatataggctcatttgcaaaagcagcatttaacaaaacatttaagagaagtaaaacagtggagtaattaatcaaaaattttaatcaacactgaacaacatgcctatgctgctcaggcccaaccattctgaaacaaccatacccggctgtacagatctaatctccaaaccaggaattatccattccaaaccggagctaagcaaattattaccagttataacatccataattattgtgagaggtgtgagactaatcacgaaaaacattgctcaactcgtccataaccgcgggcacggctattcgaatagttttactctggccagaggtgtaccactgtacccacaagacacagcctcaacatcatgtctaccatgcgtcgcgatactggaaagtacccgaatagaggctgtgacaataccctttgtacaacacaactcaccacagtgcaccattcctggatcataatcacccccttataaaacaaggcatggactccccagcgacccccgtgggcttatctccgccacttctcagtctggtgctccgcaatgaatcatgctatacaaaaggtaaagccgttgcccacgctggcttgtggttggcacgattaatgtttcacaatagtagctcgcgaaccggtccttaattgtcatgagcacgactctcaaaaccatgtgctcacaacccaccattatcaagttttagttggcaagtaattaattaaccaatcacgattgaccatcgtgaactatcattaagccatcattaaataatgagtcataagttatcccaatagtgtgctaatgtttctaagcatggctaagcaattatatctaatatctagttgaaccaatatatataaagctcaactagtccaattataatcacccaaggtatcaaggaataaagtaatcaatgaaaacaggccataacaaaggaataggttcacaccacccagtgacattcgaaaataaatgcacagttgaaataaatagagaatttaaatataggatcaacatgctcaaaggattgtgtttaggatctgtgtgacttgccttgcaataatcggtcttcaattaatcttcttgaatacttccggcgcactcacgaaccttcgcaacaacggaaacgacaagctatcacgcaaaacgaggaaaaagactaataaaaaccaattaaacaatacataaaaaataaacaaacatgtagatcataattttagatgaattatgagacttgaacggcctcattctgacttcaaatgaatttattacgaattttacaagattaaatctatttaaagcccatttaaaaagaattaaataaatttaattcaatttatggacaattttaatatgtagatctttattttatataatttttgcaacttgaaccacattaaactgagttcaaatgaattagttatgaatttttaaagattaaatcggattaaaacacttatatggattttaattgaattatgacgcaataatgaattatttttgaaaaggaaaaaggatttattgcatcagcggctagggtttgcggtggaccgggtgcacggcgacggttcacgggaacggacggccgagatcaaccctatccaaaacggaaggccgagatcaaacgggtccacgaccggctcacgggagacggcaacgatgacgtcagcaccggcggcggctcgggagcgcaagctcgccggcgaacgacggcgcgacaactgagaacggagggcaccaggacgtagagcgcggcgcggcgaacttaccggtgaccaaagaagcggcggaggaacaacggacggcgacggcgacgaggaagaagcggcggcggagatcgggtcgacggcggcgacggtgctccggcgatcttcggcgacggcgaagcggcggacggggacggcgacgacttggcgatcccgacggtggccttcccgagtgacgacgacgaccgtagcgacggcggcgcacggctggacgaacggcggcgacggcggcgcaaaagctcacgaggtagggcgctacacacgacggcgggcgaaggcgagagaggcggcgggtagcggagacaccgggggtccttttaaaggggcaaggaggcggcagtgaaggcccacggctgccggcgacgagaaggaa

SEQ ID NO: 21570 - DNA, 900 bp, Oryza sativa
gtgtaactatactaggttgcttgcttaatcaacttgaacaatataatggtctacgcacaccagatcagtggtaacctggttaaggtcttgtctttagtgtaacctctctccttctatcttctctaatatgcaatagatggtgaacactcgcgccagtggaagtggaaacaataacaatgaagggaacccaactcttgctcaagtcctggctcaacagactcagttaatgaacatgatgatacagcagatgcagaaccagctcaaccaagggaacaacaatgctccaccgccgcagaacaagttaactgattttcttcgtgtaaggccacctaccttttctagcactaccaacccagtagaagcaggtgattggctacacgctgttgagaagaagttggaactgctccagtgtacggatcaggagaaagttgttttcgcttcacatcagttgcaaggacctgcatcagaatggtgggatcatttccggatgaacagagcagaaggacaaccaatcacttgggaagagtttactgaaggattcaagaagacacacatacctgtaggagttgttgctttgaagaagcgtgagtttagggccttgaagcaaaaggatcataccgtggcagagtatcttcatgaattcaatggcacgttatgctccagaagatgtgcgtactgacgaggaaaggcaggagaagttcttggaaggcttaaaggatgaactgtcagttacgttaatctcccatgactatgttgattttcagcagctggttgacaaagcaattcgacttgaagacaagaagaacaggatggataaccgtaaaaggaaaatgattgtattccaggaggcacaaggtagtagccagaggcagcgtatcaagccactccaaattggtgaat

SEQ ID NO: 21571 - DNA, 1500 bp, Oryza sativa
atttttcatatttgtaaaaaatttgaataaaataaatggccaaacatatatacaaaatcaacattgtcagacattaaaacaagaggcagcagttaaattgcaccatttttatcactgtttcgttttagttatattttaaattttgtttatgtacaaatacgattgagtttagtctaattcttttttgaccgaacaagggaggcccttacgactattttttattaagtaaaaaaaagttcttgtaacaactgagaaaatgaaaagaaaataaattacaacttactgctataagttaacatgccattgtggtagtttagtctaaaaaattataacaagggtatgaagcatgtactttcatttacatttagtaattaaaaatacaaacaactttgtagttgttctactagtagtagaaataatgtactagtagtttagtcgcctaaaaaaaataacaagggtatgaaacatatactttcatttacatttaataattaaaaatacaaacaactttgtagttcttctactagtagtagaaataatgtaaacactttacctttattttttcatgcaatagaccatatctatttatattaacaactcaattgctgttagtagaatgaggtgggtataataattgtttagattaccagtataattcatggctcgatcgaatcgtatctactaatagagggcactataaaagtaatttaaaatattattggcattgtcgagtaaattaaattcatatgtatagttactaacttaattactatatgaaggataaaaaaggggaaatttgagaaaatagtttgtaaattcatgaaaaaaatactagagatagatgtagacatgaattaccttttatcttgcaaatgcgtccggatagtttcaaggagtcgatcaacctcccaaacatccgaagactgatgctgatgttgtggccgcagctgtgacagcatgtcggtgaggatcttcgtcatgtcaggcttccggggcgtccgcacgaaagcccggcagtcgaacggcgcatccaaccgccggccatgcagacgatagaattctgtggccagcgtcgtcttgccaacacctccggatccaacaatggaagccaccttgagcttcggctcgccgtcggccagccaccggacgagcttttgcatcgaaatatccctaccaacgagctggccgtgcacagcagcgtcgtccatcccgaacgtcagcgacagaaaccggcggcgttcgttgccggcggagtcctcgcgatcgtcgtcgtcgacttcttctctcggcctcgagctcgaggtgcgcctgccaagatggtagctctcctggcggcgaatggcctccttcacgcgggcgctgaacagggtgacctcgtcggcgatccaccgccgccggttaagctcccctcgaagccgggcgatcatgctgctgatcatcttcttggcaccagcagtgctactgccatcgccgccgccgcggtggtggaggagctgggtc
